United States Patent Application Publication US 2007/0054278 A1 - sequence listing, part 14

SEQ ID NO: 93228 - DNA, 56137 bp, Homo sapiens
cctttgcgcacagaggtaagagaagcaaatcttgtgcttgccttgagtgagtgacaggatcttggggcagccaaaacctcagttaagtcttgcttccccrctacggaagccccacatgcatgcactgacccctgtgcgttaaacctgcagcgcctctgggaacaaaggggtgtaccttatctccaggctgaaggccttttaccttccctcggatattcttcaccagctctgggtagaagaactctgggcagcgtttgtgatctggttcaaagagggtgagtgtaatccgaacagctgctgcagccggctcacagtcctgatgctgttctcctgccccagcctcctccttccgggacttcttcaaaaacgcaggattcagggaacctgggagagaggtgaactggaccctgtggggctccgacatggctaccaacaagtcttagcgggtgtcactgcatggcttctgttaacattgaaaagaagggccaggtcaaacgaagatgataaaatagtttacctgcctaattaaagagatttaagtttaagagaatttcattgtcaagaaaactccattgttatattttgtcatttattgtttttttctgcttattcatcctaaaattttttcacaatcattcagagatagtcactgcttagcatacttccagtcttttttcctgtgcatgtgtatcctagatccttgaccttaaagaacccatgctgacagagccttagacctccaaattgtaaagactactaaaatattaattattttccatttaatttgtctaacacttattttttctggctgagaataatctttaagacccctttattttcatcaccagcagtttcctatcattgggagccaatcttcacaatgacaaagcttttatcagctgaacaaaagatattgcctaccccaggatagtaaagaaccagtgactcaggagggtgtggctaggctcacttcctaacaaagttacacactcctgccctgtgcaccactctcacacccaaacactggccttgacaaaataacaaattatgacatgccaaagaccttcaaaatcacttgggaatggtcaaaatagattttgaatacagaattccaaatgttcacagaatatgaatatgctaatacatgccatacatgttttctgcttacttcgtatacaattttgtgtcctgctttttaaaagagttcatattctagtgtgaactttctaccataccaataaataaagatattcattgcagccttgtttatacaagaaaaatgatggaagcaaccaaaatgacaatcaaatgacaatcaatcagggaatggttgaataaattgtgactttcttattgacttgtaagcgctcttgatattatacataaattattatacattatagatatacaaaatctgtcatatctcttataagtacttcttcttgttttgttatttgctgtttagtgttgcttagagtgaggtatgatgaaagaaatgttaacttttttcttttttttttgagctagggtctcgctgttatatccaggctagagagcagtggcccaatcacagccacttcagcctcaacctcccaggctcaagcaaacctctcaccacttcaacctctcgaggagctgagactacaggtatatcccaccatgcctggctaattttttctattttttgtagagatgctgacccactatgttgcccaggctggtcttaagctcacaacctcaagcgaccctccttccaaggaaattataactttgtatgcagttaaaactaggctcttttcctttgagactcctcccatttcttttatgcctagaatgttcgtctccaaccagatcttatagaagaacttgtgtatataggttttttgttttttgagacaaggtctcactctgttgcccaggctggaataaagtgactcaatctcagctcactgaggcctcaacctcccaagctaaagcgatcctcctacctcagcctccctagtagttggaactacaggcgtgctaatttttgtattttttgtagggacgttgttttgccatgttgcccagactggttttgaactcctgctgggattacaggtgtgagccactgagcccagcctatatggtcatttatagatattttttcacatttacttcattaaccccagatgaatttgctatgctataaagtatgaggagaggctgtaacttggtttcttccagcatcaatcactaaacaatccttccttcctctgctgatttggcatatattgcaaagcaacatcacagatatctaaggcctgtttctgaagtccatgtgtcatattaatacggtatttagagattctttaatcagtattgcactgttttgtaaagtttcatactttaatgttgcaaagttaaagctcatgtttattatccttctttataaataatactttgccattccagcctatgtattattttggcaggtttcaaaaaaactcactgtattttggttgtaaatcaatcacaaatgtgagttaattcaggaaaattagcatatatcgtatatatccacatacatgtagacgtatttgtatatatccaatattcatttgtcgaattatgatcacaaaatcaacttataacatcacataagggaacaaaatatctacaaatgaagagttaaaataattctaatcaggcggcaaaacgattagcagtgtaacaggctggcgctgcaaaagaccatctcccaacacgtactaagatgttaaaggagatttccctaaaagaaatctccaaggccctcaggatatttgtgatgcgctgggttgtggaaataaatcccagctgaaggcttacagattcccccactgatagaaccggaacagtctcactataagaagggaatcagcaagttaaccaatgggatgcaggaaggtcatccttgaattggcaaccaggtcctactccccctgtccaggcagtaaacacataaccttatctcagtccaagtctgagagactgcagcttcaatcctagatggcaaaactgctcctttcagttgcttaagtgactctccaggcccaagaaggtaaaaaataggactacaggataaagtgagtcaaatctgtactctattaccacttagatttggggttgttttataatcattataatgttctgctgttactaagccatttgaaacatttaagagaatccaatatatttaacaatggtacgttagacttacaatcataattcaaaatgcttaagaaaatataattaagttcaaacatgtttgaatgcttaaaaaaaacttacatttatctattagacttacgagagttgcctaagtccttggaaagattttagctttttttgtggtttttttttttttttttgtgagacagttgcctcactcctgttgcccaggctggagtgcagtggcaccatgagagctcactgcagcctcaacttcccggacccagcactttgggaggctaaggcaggatgatcgctggagcctaggagtttaagaccagcctggacaacatgatgagacttcatctgcacaaaaaaattttttttaaattagccaggtatggtggcacacccctgtagtcttggctactaaggaggctgaggtgggaggatggctttagactgggaaggtccaggctgcagtgagccgtgatcctgccactgcactccagcctgggcgacaagagtgaaactccgtctcaaacaaaaaaaagaaaaaaacaaagatccccctttaaaaacctcagttggtgttactgagaaaatactagccttccttgtcccttggttatcctcagcaatttttaattttttcttactatatatatatatatctccttctaaacattgtattttcaaactggttattgatgaaacagaaaaactaaattgtgcattccaacttataatgagtacccttcctgaattcttattttaatgggttttttggtttttgtttttgttttcaaaataggcagacctatcatccacggaaatgagaattctgtcttcccttttccaaaaattgcatttcttatttttgtttcctgtcttactgcactggctagaactttcaggttttaggcaatatattcttattatctaatagtggtagaaatgtaccatgtttctgatgttaaggggaatgcctctaggttttggtgcaatgttcatttgagatttttttttcttttttctttttggcggggggacgagtctcgctcgctctgtcgcctagctggagtgcagtgacataatctcggctcacggcaacctccgcttcccgggttaagcgattctcctgcctcagcctcccaagtagctgggactacaggcatgcgccaccacgcccggctaattttgtatttttagtagagtactgggtttgaccgtgttggccaggctggtctcgaactcctgatctcaggtggtccacccgcctcggcatcccaaaatgctgggattacaggcttataccaccctgcccggccaagattcatgtttttatttaagttattaaaatctcattcaattcctcacaaattcagaatttttaaacaggaacttatgttaaatttttatcaaattattccctggaatcttaaatacgctttaaagatcactttgtcttaaaaatacacacgcagtaaatgacagtccgtgcagctaattcttggtacttcagggaaactgatctcccaagaaaaatcaggctgcgggacgacccagtacgctaaacaccgacttgcaaccgaaatctctaaccaccacaatgccttggggaaatgcgtgtsgactcgccacctttgccagctggcagtgactcaacaagagcccgacaccaagtctaagtcaatccttaacactgtggagtctgtgatcgggactgggatcttttgcaaaattgtgattctacctggtctgctgaagtttgggccgacgctgcgctcaactgcagttaacacttcccagttcatggttcagttttaaagtgtccaaactacgcccggcatctgtcttcctgttgtcacaactttttcaaaagtgcaaaactagggcaaggctaacgagagagcccggacccgacaacgacacgcacctttgtccccagcgccgacgcgggccgcagacgtccccccgcggcggtcctcatgccggtccccgggcggcggcgcagctagcggtcggctgctaagccgtggctcccagcgggcgggcggcccgcgcctcggcccatggccgggtccccgagcccaggggagcctggtgtgccgcgccgcgcgccggcccaggaggaagcgaagaaatgccaactcgacgtccgcgcagccactccggggacaccagggggtcgggggagcagcctccggtcgccccaggagaacttgcggcgcgggaccccgcgctcagacggcgcctccgaaagcggccgtcgggaggagcgctccaaagaacacgggcggcgggagcggacgggcgcggacaccggggcctcccggcctgcggccaagcagagttgccgggcgcgggagcccagacccggcggaggctgagttccaggccgcgccgagctccgtcagggtagctcactggcgctgcgacggggccgaccagcgcctcgggctcgggaatggccccggggcccgcgccggaccaacgggcgtaacggaagcgccgagaggggaggggcgcggagtccaagacccgggggcggggcgagccgcgaggccggctccctctcgcgctcagccggtcgcaccgtcgccgccgccgccgcctcagaccgcgggcgcttcgttgtcacgagccgaagggagggggaaggagccgggagtctctgcgctccggcgcgcggagaccgcggcgctcgcgtcacgtgcccctcggtcgaccaatgatccccggcgggcgcggtgacgtcagagtagcggcgtggccagtgacagccggcccccgtcacgtggtcgggcccactccaatgggcggcgccggggcgacttgctgttcccggcggcccgtgcgtcggcggtggttgggtggtaagatggcggctgtgagtctgcggctcggcgacttggtgtggtgagtccgagcggccgggccaaccgagacgcgccggggagctacccgcctgggcgcggggttcgctgccggcccyggagctgcctttttatgcgctccaggtcgcggagagaggggaagagaagstgccggcgcttgcgagcggcgccaggcggaaggggcagtcyagtcccgggggaccgaggccgagggtggccacgtcgggcaccggctttgatccccgaggccggccgggtggggtctgcactcggggcccagatactggcggcccccgtgaagggagccgccggtgccgcgaggcttccccggacgaccrgtccccggggtcttgttggggcttcccagaaagcagaagcgccggggaccggacctgcgagatctggccggtgccattcggtcaaagcccaggttgcgatgcagccgacctgtgcggccggctcagccggggktgtctaaaccggactgctggcgttgccccgcgaagaaacggcggggggasttctcctttacaaccgatggcttggcagtgaccagtgcacgcttgggtgcctcccgcggtctgcttctgtgtcccagacaaccgcccgaaccaagactttgtcgccgcctccctcgagctgcgtagcttgtttctccacccagaggaaggcttccattagcatttgtcaaagccaggcaggtctcctgttgaattaaaccagacttagggagggaaagtctgtgtttacagaggaagctgtcctcccacccccgtcattaagaagctctagacaagtgacttttgacagttgtgttgttctgtattccttgtcaacagaagaatggatatgcgttgtgcacataagtatacaattttgcattttacttctgagggtgttgggcccagctatgaaagcttttgtttcggcatttgaggatgccagcagagayttaggaaaataaattgcgtattgagtgggttgaaggagatggactggcttttgcagggcaagtgttgactctttgtgttttctctagggggaaactcggccgatatcctccttggccaggaaaggtgagtgtcttgctactaaaggaagagatctgaagttgggtttgaagaggtggagaatstaagatgcattcctctcagtttctagtattgagttaaattgggctcattcagatggcacttagaattttttttcccctagtatcggttattttttaaaaggcaatgcagtatacaccagatcattaaatcttctctaaacccttatttctggatttagaggaggtttatgaagtttcttttttaaccccggaaataattctagtctgaatttagctttatgcttaaatgtaacaaaaggagaagaaaatataaattatccaggaagaaagtctaaatgtaggttagtgaaaagccaaagtatttttgtcccaactaagtttaaatcttctttccatgttaccatatgtgctactccagtgcctctttgcagaagttggcattccagattttgcatgaggtgatccatcattgctttccaaatgttgtgtttttatattcttgcttggagcccgggaggtgtctttagatggtctctttgcaatatggtgttttctgtgcctcggttgtcctttgttttcactatgtcctgtgtcaacccttcctgcacaggaagtatttcaaagagtgtcgtctgcattttttcagtaataatggggtcacattggagcaggggtggggtggtggggggcaggggatgctgttgatcttagttttaactgcttgtaaaacagggccactgcagtaaaagggatattgtgtctactgagcactgtgctacatgttaaatattgggaacttctagaatatctacacatttccatacacctcaatagaaaaatgggagatttagacaagtactaggccttgggttctgttttgtatataaataaatttatttgtaagtaagtccttttaatttacttttttcttagcaacgtagaactgtagagcaatgtggagccactagaaagtgggctgctgtgttgccagccaacctttttccccccttttatcctccagattgttaatccaccaaaggacttgaagaaacctcgcggaaagaaatgcttctttgtgaaattttttggaacagaagatcagtgagtagtactcaccaggagtctcccttcgcctttytttctgtgttacctggagtctgagctgctttgaaaatattctaaggatccttagttcagtcttcttataatgtgtaatactggcatctcattctgccttcatacctaaataaaggtgcaatttcttgcagaaattgccctagacaacygtcctaggtctataactaagtcaggcaagaactaggttcatttaccttctaactataacaatcacattgaaacagtttctcacatgtttctttacccaactccaaaggcagttcctttttgtttgtttttgagacagagacttagtctgtcacccagcctggagtgcagaggcagtctcagttcaccgcaacctctgcctcactgactcaagcggttctctcacctcagcctcccgagtagctgggaccacaggtgtgcaccaccatgcccagctaattttttgtagagggggttttaccatgttgcccaggatgttcttgaactcctggactcaagcaatccacctgccttggcctcccaaagtgctggattataggcgtgagccactgcgcccagctggcaattatttttataaaagccatgttcagttctcttttaatgccatatatcattatggttcatgcttggggtatacagtggaaacttttatttatgttaataaaagtaattgttcaatcatgttctcatgtgtaaaactaagtgatttgctttgacattgttatagtaagtctttttaccagatctgtcctaagttggggaaaccaggaccattaatctgagactctgaccatataacatgttacagtgacgggaagaacgtgaagaacctgtattaacttgagttgctagtgatttgtttagctttttatcactatgtcaagtggcttacctgggtctagctagatggtttgatttttttttttttttttttttgagatggagtttcactctgtcacccaggctggagtgcagtggcatgatctcagctcactgcaacctccacctctcgggtacaagtgattctggtgcctgagcctcccgagtagctgggactacaggcgcacaccaccacacccggctaattgttttatattttttagtagagacggggtttcaccatgttggccaggctggtctcaaactcctgacctcaagtcatctgcccctcccccccccaaccccctcagcctcccaaagtgctgggattacaggcaagagccaccatgcccagccggtttgatttctttaagtagttgtatttctatttattattcttataggaaaatacagccttagatttgaaaaaaatgtctgtggcttctctggtaaatctaattctgacggttaaagtatttctacttagaaagcgatatattataaacagtattcttcactcatccaggagtttatatgtcagatgctcttcctggtttcatgtttacagatagacccagccccatttctctatcacaagccagcttagcagcctgtggtggcagtatttcaaggagatcgctggcctggagctgtggagccagagcttctggaagagggaatgttcttagaactccatggatttaaaaagaagatttggccgggcatggtgcctcaggcctgcaatcccagtactttgggaggccaaggtgggtggatcactggaggtcatgagttcgagaccatcctggccaacatggcaaaaccccgtctctacaaaaaatacaaaaattagccaggagtgttggcgtctacctgtaatcccagctacttgggaggctgaggctcgagaattgcctgaacccaggaggcagagattgttcgagaccctgcactccagcatgggtgacagactgagactatgtctcagaaaagaaaaagaaaaacaggaaagattgtcctcatgcataacatcagtgttatgtgtccactttctgaattgcttgacactgagggaatttataagaaagcaagtattatagttcccaccttccagatgctcagtcaagtgacaagttgtaaacatttcagataagatgatgtgcacaatgatggtcgggcatggtggctcatgcctgtaaccccagcactttgggaggccggggcaggcagattgcttaacgccaggaatttgagaacagcctggccaacatggtgaaaccctgtctctactaaaaatacaaaaattagtcgggtgtggtggtgcacacctataatcccagctactcaggaagctgaggcagtagaattggttgaacctgggatgcggaggttgcagtgagctgagatcgcgccactgcactccagtctgggtgacagagcgagactctgtctcaaaaaataaataaagattatgtgcagaatgaatgatggcagataattgttaattctaggctgggcacagtggctcatgccygtaatcccagcactttgggaggccaagacargaggattgcttgagcccaggagccggagaccagcctggacaacatagcaagaccttgtctctacttaaaaaaataaattttttttttcaatagccaggcatggtggcacacaagtgtagtcccaggtatgcagaaggctaaggcaggaggattgcttgagcccaggaggtcaaaactgcagtgagccatgatcacaatattgcactccagtctgggtgacagagctagaccctgtcttaaaaagaaaaagaattctagaagagggagagctcagtggagagccatgagaaccaagaagactgactgaagagatgggatttgtttttctgtttgtttttttttgttgttgttkttttttttttgaaacggagtctcgctctgtcgcccaggctggagtgcagtggcgcgatcttggctcactacaagctccacctcccgggttcatgccattctcctgcctcagcctcccgagtagctgggactacaggcgcacaccaccatgcccagctaatttttgttgtatttttcagtagaggcagggtttcaccatgttagccaagatggtcttgatctcctgacctcgtgatctgcccgcctcggcctcccaaagtgctgggattacaggcgtgagccatcgcactcagccagagatgggatttgaatccagctctggaagatacatagaatctggatggatggggactataggggcatttcagacagtggggataccatgaacaattggcattaagctgggtgttatggaaaggaagaggctccctgcctgaggtaacttgtgcttaggaataacagaggcaatatggttggcccaaacttcattagctaaatgaataattacacaagtctgaaacaaaaatgggaactcagtctcataaggagcctgaaagccattgtttccttatgttttttgttgttgttgttgttgttgttgttcttgtttggtttcttgatttttttttgagaaagggttggagtgcagtatcacggacatggcttactgcatccttgacttcccaggctcaggtaatcctcccacctcagcagtccgagtagctgggaccacagttgtgtgccaccatgccctgctaaattttttactttttttttttttttttttttttttttttgtagagacaagttctcgccatgtttcccaggctggtcgcaaactcctgggctcaagtgatcctcccacctcggcctcccgaagtactggcattatgggcatgagccacagcgccgagccccgattttttttttaatgctaaaagactagattaataaactgtgatccttgtttataacaagtgctagaaataggacacagaaaattggagttgagttaatttcagagcttaaccaggcaaacaggtgaagccagtggtgatgtgcttgctcaagacaaaaatagcctggatggtggtggtgatgatataatttctaactgactaaggttctttggagggttgtaaacaagtgggatacaaagcaactgctaaatgcaatatttttaactttttaaactcctttgctagagttctacattttaaactataaaaatgaagtcactgtggtactaatgtgttatctttttgtgggtaggcagttaacttagagaaaggaaataaagggtaaagatgtacagtacttctctaaagaaggaacacttccttagtgatcagtgctggggcagattttattttgtgtttttctatgaaggtaagatctccagattggctggtggcagcagattactttggggaaagagctctggattggttaccagcctaatgtgcattcaggtaccggttccaccttgctccctgatttgggcaagctatttcacctttctgagcctctgtgtcctctacataaggggatgataccccctacctcatagttaggaaggaaaagtagtatctcttgtgtagagtgtggcttgccatacagcaggtattagcacacattggtccaggatgcctttaagtatggaaaactgagagagatggagactctccctatgggagagagagagagtgtgtgtgtgtgtgtttgtttgaaaagaaaggaatatgagagttggaagttcctaaaggatgtcagccaggtttgctctttttaccaaaaaggctttgagtacaaaaccatgcatcattccacctttatgtaaaactgtatgcgcctcatcaggaatactctatggacttcagatcatgctttcaaagggatctcttagaattggccaagatccagaaaagggaactgagtcagacaaaagagcaggactcttcaatgtggaaaagcaaagactgaaggaatcacgggatcaggaggtaggaaacagcgaatggcctagaggagtttggcgatgggcactgcaagtggattgtggtatgactgtgttaggaccagggtgaggagcactgcataaaaggggcgtttaagaggtggtgtaaacaggtattgcaaggggattttttagggatgagaactaacttgtgaagacaaagccataagtgrctcctgtagaagctggactgcacctcgcctttaacacttgacatcagggagggggcatgtggtccaggcacatcctgggtgggggcaccattggttactggaccctggcccaggtggatagggtctgacccagtggagtgtcctccgttcctgagaaatacaggatttggtcaaagatgttcagtttcaaaattgacacactacttaggcaaaaaaaagtgtagttatacttttttaatatttgcaaggtcttttattaaagagcagaaagaacggctccttatgacaagataatcagtgattacaatcttttagaaacctgatttttctctctccacatctctgccaaaatatctaacaaattgtgttgacatcccactgttaggagagggccagaccttcctaatcaggtgtcctggtgagaggaggacttctttatacggattcggctccctgagcgagatggccaagacaaaactgcccacgtaatttttgtattttcatggaaatacgaaggggatataatttcagcaaaaccctgccagcttcacttggtgactacaaccaaagattatgtgtcaagtgcacgagggtccctctctgacaggtctgattagtggtgacccccccatcagagtagagacagagctcacggtttaaaagtttcatcggggccaggcgtgatggctcacacccgtaatcccaacacttcaagaggcagaggcagaagcatcactcaagcctaagagttcaaggccagcctgggtaacatggcaagacccatctctacaaaaaatttaaaaataaaaaatttaaagctaccatgccggcttgttctcacctttatactctatgcttgtgtgtgtgtttgtgtgtgtgtgtgtgctttttctctgtctgtctccctccccctgccawcttctccccgccctttctccttttctctttctcttagcttcacggcttcagcccaggtcacctgtctatccgaaggctgaaacacaggtgagagggttcatgcgtagtagcatgtacctgtagtctcagctacttgggagactgaagcagaaggatcgcttgagcctgggaggtcaaggctacagtgaactgtgattgaggcactgtattccagcctgggtgacagagcaggaccctgtcttttaaaaaagaagagttttggccaggcacggtggctcacatctgtaatcccagaactttcaaagggcaagtcaggcggatcacgaggtcaggagatcaagaccatgctggctaacatggtgaaaccccgtctctcctaaaaatacaaaaaaattagctgggcgtggtggcgggcacctgtagtcccagctactcgggtggctgaggcaggagaatggcgtgaaccccagaggcagagcttgccgtaagtcgagatcgcgccactgcactccagcctgggcaacagagtgagactctgtctcaaaaaaaaaaaaagaaaagtttcatcagtggctgtggatgatgatggaatggagggagtgttcatttaaattacaggtgcttagaagccaccagaaaccaaccggttcaacagattgtggacaaacagtggagaagctgcaagtgcctacctgcgagtttccatagcagtcttcccctccagtcctcacagcagccctttcaggaagtgcacagggtcatctttctggttcttattttttcacagatgaggaaactgagagaccagtggtccttttccaccaagccacatctaaggtggaccggtctcgctggatgtgaggtgtctgagtcagtactgaaagtagctgctctagaagaatatgtggttaataattagaagcatagcagcttggaagcatccctttttcgtttcacctggcacctgatttgtgtgtgtttttttctggtgcctttatttctgaagaacttggcctgtaacacctcagtaatcttcagcccctttggatggattttttttaaaaaggcacccatagaaattgtttactaagtattcaccaaatccaaatggagaagcaaacccacaccttctggccccatctttgttctcacctgtatttttattcttatcwttatttatttatttatttatttatttatttatttatttattttttgagatggagtctcgctctgtcgccaggctggaatgcagtggcacgatcttggctcactgcaacctccgcctcctgggttcaagcgattatcctgcctcagcctccggagtagctgggattacaggcgcatgccaccgcacctagctaattttgtatttttagtagagacagggtttcaccgtgttggccagggtggtctcaatctcttgacctcggcctcccaaagtgctaggattataggcgtgagctaccgtgccggcttgttctcacctttatactctatgcttgtgtgtgtgtgctttttctctgtctgtctccctccccctgccatcttctccccgtcctttctccttttctctttctcttagcttcacggcttcaccccgggtcacctgtctmtgtgaaggctgaaacacatgtgacagcgttcaagattagtcataggctgacatctttaatatacagtatctacatgtatgattttctttttttttttttaaagaccaagtcttgctctgtcgcccatgctggagtgcagtagcacgatctgcactcactacaacctccacctcccgggttcaagcagttcctgccgcagcctcctaagtagctgggattacagacgtgtgctaccacaactggctaatttttgtgttttctggtagagatggggtttcgccatgttggccaggctggtgtcgaattcctggcctcaatccacctgcctcggtctcccaaggtgctgggattcaggcatgagccaccgcaccgggccctacatgtatgattttcatttaagaggaaagcaaatcagaagtgtgcaagtttttgaaaataccagattttaattcattttgattggagtaatctgagagtgccttagtggcggttctgtattcatagatgaagagactttttataggaagagtgtcaggtcaccagggtaaattggctgtgttacaggtgcagttatgccagcagccaggcagcagcaacccaccagagcaaacctgcaaaccaggaagtcatggaggaaaccctctgggcagtcggcatagcctgtgttctagggcagaggcctttagtattgatttgttttgttttttttttttttttccaatataatatgtgttcaccattcaaaaacaaaaacttgtcaacattgaaacagttgcattcatccccatcccacagccacccagttagaccagtttctgatgatgtgtccctccagagatatcagtgcgtggtcagtccattttccttgtctttgcacgagtggtagcacataacatgcattgctttttatcttgctcatctccacgtagccagatatcttacgagacatccgctttccttctctgtaatgaccttgcctgttttcagctatttactatcacaatgtgtcattcattctactgtacataaaaagcaaagtctcctactttaaatacagcttgaataagcttgatttttctgacttcccagccacaattgggctgaaagatatagctccatctaagtcttgggaggatgataggaaaatcaaaagttacagcttctatcaaggaaagaaacagtcacttaaaaaaccaacagtagcaacaacaaaaacactaaagccttacgcactggagcattgtagcaccttttaactcactggtgagcagtacatcctcctgaacatctgggaaggaatcatttacccagtgattatttattgaggaccagtggtgtgccaggcccggctgatgtgcctccgtgaattagacagtggtgcattgttgaggcgccaactgaaaagcatattctcattaaaaagacagaggtaggccagttgcagtggctcatacctgtaatcccagcactttgggtggctgaagtgggcagattacttgagttcaggagttcgagaccaacctgggcaacatggtgaaccccatctctataaaaaataaatttaaaaaagatgaaagaagtgtaacctttagagaaaaaattgtattcagatagccaaagtgatttaagtttggtttgctttcaagaggtaatccccatagagctctggtaagctgggtttttttgttgttactgtttttgaggtggagtctcactctgttgcccaggctggagtgcagtggcacaatactggctcactgcaacctccgcctcctgggttcaagtgtttctcctgtctcagccttccgagtagctgggattacagctgcgtgccactacacccagctaatttttatattttcagtagagacgagatttcaccatgttggccaggctggtctcaaactcctaacctcaggtgatctgcctgcctcggcctcccaaagtgctaggattacaggtgtgagccaccgtgcccagccaagctggttttttatggctgttttttgatgtaacaggatgcttctccagcaataagttgattccttaaatagattaacatttcttggatttaccatcctattcatactgtcagttcatttagccattttaatgtttcgaagatggttgtaaagaggaaaattttagtatctcaaatgctttaaagtgagtggaattttgactgtacagttccttctagcagaaatcagtaaaccttgtaagatgcttcaacaaaaaatggggttgattccttggcacttcacagacatcctcacctttctgttccctcagaatcgggttcctgtgaggctgggtagtgggaggcagggatggaggtagcaggatggcgtgggtgggattagcaagtctcggagtctgttgtcccatctcaaggggttccataaaaatcacctttttggtcctatattgggaacttgtgtggttctcagcttctgaccagaagctcctaggaagaactggctggtcacgactccttaagcttcatccttgatactggttgtgtcatctcagacccacgggttagtatggtagcttcactggcttttggggctgggtctgactttgcatctgattgctctggcctgtcattagcatccctgtaaggagagggaacggagtcagttcagggatattcttgccagaaaatctggggtcgaaatctccttccacttttcctcccagcagattggactcattggcgctctcatgttgaatttcaaactttaagatgagttggtcactggaaaggagtttgctggctcacacctgtaatcccagcactttgggaggccaaggcaggtggatcactggaggccagaagttcaagaccagcctggccaacacagggaaaccccgtctctactagaaacataaaaattagctgggtgtggtggtgcatacctgtagtcccagcaactcgggagatagaggcagaattgcttgaacctgggaggtggaggcggaggtcgcagttagctaagatcgtgccactgcacttcatcctaggtgacaaaatgagactctgtctcaaaaaggaaaaaaaaaaggccaggtgtggtggctcacgcctgtaatcccagcacttgggaggctgaggcaggagaatcacttgaacctaggaggcgaggttgccgtgagccaacatcgccccattgcactccagcctgggcaacaagagtgaaactccgtctcaaaaaaaaaaaaaaaaaaaaaaggaatttgcctaactcctctagttggagctgtgccagggagaccagcttctgtatctccattcatcatctcacttagccatggtggcatgcctgatagtggttcgctgcctgacatctgcaggccgatgatcccaggtctgtgtttttgcacagaccccattatcacaactaccagcagcacactcaaagtccaggtagctggtggagggttagtaacattatttttatgtgcaaaggttaacacttgctgttagtgaatattctctagctttctatgaagaaaacaacctgaagcttgtgagatagctgggtttctgtatccttaacctgacctactttttctgaaggttatgctgtgaaacctgtatcacaggctaaaacatgtaaactaactgataccttgtaaagcctataaaattattttgtgcttggattctataagctgcatgccattcagggaagccatagaaagccagctgcagcagatttgttcaggttagtgtgacagatcagawaccccagaattgacagctgactactttcactttcatgtgttacacattgatggttgaaattaaaaattacatatcggaggtgtatgttcttctacctttaatctcaagcatcttgtttctatttttttttttttttgagacatcataaaacagcatgccatcttgtttttaaatgcctccttttgtaactgctgcccttattccaaaccatgtgttccgtgttttgtgtggtttagtagccatggttaccatcatttatgaacaaatataggctcagtggctgtgaatatccataggaaccacaaattttagaagatgttgcatttcttcagctctgtaacatccctgactctctgtggatcaacagatcataaatctggttcccattgttgacaggcagcaggcattttcctgcatagtaatgctgctatcatctatcacatttccaggtaccctgattcccagggatctgtgtgtggccatttgtgctgcctggtgagaatgggaaagggtctccagatttctttctgccctgagcaagtggcagcgtatatgtggttgggcattggaggctgatagacgattgtggaaataaataatctgcaacacagtgctttcactggaggaacttgatttgtggttgctgcagtggtggtgatggttgttctgcttgasttgtttcaagaaaatatackttagacataagactctgagatggttgatagcatgttttgaaagaaatggcaaggcctattgcaaagtccagttaaaccaaatggatatttacaccgtgccatagtgaggttgttgatactttagggcatatgctatatggttcacaccctttttgtgtttgttttctgctagtgcctggatcaaagtggaacagctgaagccatatcatgctcataaagaggaaatgataaaaattaacaagggtaaacgattccagcaagcggtagatgctgtcgaagagttcctcaggagagccaaagggaaagaccaggtgagagacacaatgttcactttctaccaatgccagactggtgatttttgcatagcaactaacagattaaatgtcacccaaacgcaaacctttgttcttctgaaatgctactggagaaagctacttcagttctaaggtgtcagcgttttgcttatcagtttgaaactccatgcagctaacctttctggagtaggttgttgcttttaggaaaattgcttggacccaggagaaatatctcagcatttgagtctagcacaggccatttcttcctttcatagcacacagattaggagcatagcctctgaaatacatatactgcctagatttaaatcctttcttctagttttgggacatagggaaagtgacttttgatatatrtattttttaaatctgcttctcccaatgtctgggacgacagcagaatctatttctagggtcattgtgaggagaccacacagagtgcctgtagcagcacatggcacctgtaaatgatggtggcgatggcggcagcagctgtggtggtagttatcattattattattaaactttcagacgtcatcccacrattcttctgatgacaagaatcgacgtaattccagtgaggaragaagtaggccaaactcaggtgatgagaagcgcaaacttagcctgtctgaagggaaggtgaagaagaacatgggagaaggaaagaagagggtgtcttcaggctcttcagagagaggctccaaatcccctctgaaaagagcccaagagcaaagtccccggaagcggggtcggcccccaaaggatgagaaggtttgttttctctctgcagcttccgggattagtgatgtccttttagtacaaggtagagttaagctctacagtatgcttatgtagtatgcttatctatactctgctcatggagtgggagcagaattctgtgctcaagaatcctgcagggcaggtgcggtggctcatgctttatcccagcaactcaggaggctgagtcaggaagatggcttgagccttggagctcaaagttgcattgagccgattgcaccactgcattctagcctgggtgatggagtgagaccccgaatcttatttaaaaaattaaaaaataaagaatcccatagaccaggtgagagacacggcctggatgcaggtgtaaagtaggagcgcgaggcaggaragcagtccacttgagccggtgcacaagggctggccctgggaggggcttagcaagaaagaagggtaggcattccaaagatggagggcacagcccgtgtgaggctcggtgctggtggagatactctcgaacagggagaggatagtgaggaaagccgagaaaaaggaagcttgtccctggatcgtggagggcctgaaggtctactgaagcagcgtggtactaaagcgtcttggagtcagtgggggcccgggaaggtgactgagccagtggcagtgtgtgcctcccgtgtgtgcaccagtagtcaccgagtgcagaggggaaagtctcagagccaattaggaggtaagtctaggcgtgcattcataagggggtaattgcaaatgttgcaagcaaagaggtgagaggcacttcagaggaagagttcttaagattccataattggttatatagaggatgaatgagaaaaaggaaaagaggatttccatcttcattcctgggaaagtggtcatcactttcttaaaagtagaggactggggatgtagaggtggcttgtggagaaagagtaccagttctgtttggaatgtcaagaacttgaggcaaggcctagacagcctgggagcttggtgtgacctcaggactagaaatgtagatttgggaggtgaatttgtaaaagggtagttgagtccgggcagtggaatgggtttgtttcaggaagagagggagaagagggaagcgcggaggcctgcattgccacaagaatgccgtgcttggggcaggaaggagcaggaggagctagcaagatgagataaagcagtgagagtgcctctctcgccttcttgctgacaagatttggggccggtcttacaaggccacagagaagaatttcaaagtgaaggggactgtgtcaggaacgcggtaggattgtcaacagcaggataaagagaacagaagccagatggctggcagcaacagttgggtgacgaggccatgatggaacattagaccttggatcaaggctcaaaaattcagacaccagcgagcccaggcaggtaatggaagcaactgtagctgactggacctaagaagcagtggcacgggtgccaggcaccccagctgacctgccttggtgctcagagcagcagggctggccatggtcagggagtctggggaggtcatgctctgtccacagggttctagccagcttctgccaaattgtctgttttttctcaagagaagctgggaaggccagttgtggtgtctcatacctgcaatcatagcactttgggaggctgaggcaggaagatcacatgagcccaggagttcaagaccaggctgagaagcatagtaagagcctttcccttaaaaaaaaaaaaaaaaaaaagacaaagttggccaggtgcagtggcttatgcctgtaatcccagcattttcggaggctgaggtgagcagattgcttgagcttaggagttgaagactagctctacaaaaactaaaaaattggccaggcatggtagctcacacctgtaatcctagcactttgggaggccagtgcaggaggatcccctgagcccaggagttctagaccagcctgggcaacatagggaaaccccatctctattaaaattttttttgctgggtgcagtggctcacacctgtaatcccagcactttgggaggccgaggcaggtggttcacctcaggtcgggagttcgagaccagcctgaccaacatggagaaaccccgtctctactaaaaatacaaaaattacccgagtgtggtggcacgctcctgtaattccaactactcgggaggatgaggcaggagaatcacgtgaacccrggaggcagaggttgcagtgagccgagattgcgccactgcactccagcctgggcgacagagtgagactccgtctcaaagaaaaaaaaaaatttaatataaatgaattaaaaattagctggggttggtggtgtgtgcctgtagtcccccctactcagaaagctgagatgagaagatcacttgaacccaggaggtggaggttacagtgagccaagattatgccactgcactttagtctgggtgacacagcgagaccctgtctcaaaaaaaacaacaaaaaaagaaacaaaaagtactagttgggcatagtggtacacacctgtagtcccacctacttgggaagctggggtgggaggatcacttgagcccaggaggtcaaggctgtagtgacctacaattccaccactgcactccagcctgggcaacagtgtgagaccctatctccaaaaaaagagagaagctggaaatacaggtttttatgtgaaatatcccaattttaaatgtgcttagttcaaaaatatgtcttggggccatagaaacatctctgtgggctgccagtgtgaggcctctggtgagagacagcccttctcactgttagatgacctcaggctgagggagtggtgagagcaagggtggcagtgctgtccctgcataccgtcagcccaaggtttggaaaagctgccagctgcagtgcagagagaactttatagggaacatgatctaaattgacccacaaaaaatgtaatgtgacttctgagtttatttcctggaatccaaaaggaatctgggctgtcagattttatgctatttcccaaattgatattgtctggtatgtgaagccatgcatctcaccggtgcctgtgccaccctggaaagaaataccttctcgttggataaagggaagtacaaaggagaggttatgacgagggcctggagtttgaatcacgtatataggaccttagcaaagcacctttgccccagtttccttgtctcatcgttaggaattacaacagtacgtgcctcctaggttcactgtgttagttaaatgagtgacatggacacagcacttagaacagtgcctgtgtacaaggcatttgatcagttctttaggtttgtttcgcagacactggccgtttgtacagtgagaaccccagaggccactgcccaggcttacaggaactcgtctcacgagctcccaataaactgcagacagcccttgggtctgaattattaatctggggagtagtgtagcatacgttggagatactgcaggttcgattccagatcattgcaggtcacacaaacgtcttggtttcccattgcatgttaaagttaggtttatactgtagtctattaagtggtacaatagcaatatgtctttttaaaatgtacatacctttgccgggcgcggtggctcacgcctgtaatcccagcgctttgggaggccgaggcgggcggatcatgaggtcaggagatggagaccatcctggctaacacggtgaaaccccgtctctactaaaaatacgaaaaattagccgggcatggtggtgggcgcctatagtcccagctactcaggaggctgaggtaggagaatggcgtgaacccgggaggcggagcttgaagtgagccgagatcacgccactgcaccccagcctgggtgacagagcgagactccatctcaaaaaaatatatatatatacatgccttaagttaaaaatacttcattgcttaaaaaaaaaaatgctgacagagacacaaagtgaacacatgctgttgggaaaatgtcccccatagatttgattgatactgggttgccacaaaccttcaattcgttttttggttttttggttttttggtttgttttttttgagacggagtctcgtgctgtcgcccaggctgcggtgcagtggcgcaatctcggctcactgcaagctccgcctcctgggttaatgccattctcctgcctcagcctctggagcagctgggactacaggtgcccgccaccacgcccggctaattttttgtgtttttagtagagacggggtttcatcatgttagccaggatggtgtcgatctcctgacctcatgatccacctgcctcggcctcccaaagtgctgggatgacaggcgtgagccaccgtgcctggcccgttttttttgtttgtttgtttgtttgtttttttaagtgcaacacctacaaagcacaataaaacaacgcataataaaacgaggtgtgtctgtggtccaggagctctagctgctattgacccttcgaggtgtccttcctgcctgttctttgtgcttcacctggcccatagtgaaaggacgtatgagcaggagaggacagagctggcatgtggtacaggacagatagccgtttcagttcagcaccttcagacaggtagggaatcggtgcctgggctttggaattttggtgtgttttaaatgcgatacatcccgtagtctcagaggagggtgtttgtgtgtgtgttgctatagtaattgtcatttggctggcgagctcctctcagaaacactgagcagtcacataggctgataactgggcaaagcccagctgagtgccattccgggacataatctcctgccccgtgaggattaatggaaaaagctgaccttgatggcggaggcaggcagggaaaggctgggtttgcgtctggacctgcatgtaagagctgcaccccagcagcgcccacctaccctctttctggggatgaactctgggcacagcccacccagatcaaagtagcgctgttagttctgtgactctcccaaaatcccatactcacacgaggagcagaagtttaggagttggggcccttccttagtgccaaactgagagttacaagctgcctcctccttgtttccattgggtcattgtggccttaggtgagtcctagggctgcaccacccaagacagctgtgctgccccagccacaattggccatttaaattgaaattaaatgcacattaaaatgcagcttctccatcaccctattgtgtgagatgctccacagtgacgcttgactggcgcctgctctatcacacagtgcagatggagtacacgcccatcattgcagaatattcttttgggcagctctgggctgggccttttcttttcccccaaaaacctctgcattcaacaaatgtttattgagtaattctcctataggccaaatgcctggagagaaagcagcataaaagtcagacgaggctccttcagtaagaattgaacctggactgtatggcagcatgggttgtagagtaggccagactggcagagttcttgcttttctaggatgtgcttctaatatgacagaccctggagccaaattctgtcagtctgctaggcacagtggctcactcccataatcccagcactttggaaggccgaggtaggaggaccacttgaggccagaagttagagaccagtctggccaacatagcaagaccctataaaaacaaaaaattagaaattacagaaaacaaataattgcaaataaataatacatctacaaaaaataaaaataaaaaattagctgggcgtagtggcacacacctgtagtcccagctacccaggaggctgaggtgggaagatcacttgagctcaagtggttgaggctgcagtgagccataattgagtcactgcactccagcctgggtgacagctagactatgcctccaaataaataaataagttgtgtctaccacaccagtgactgactcggtgaccttaagcaaggttacttaagctctgtgtgccttagttttctattctgtaaaagaagattataatagggctgggtgcagtggctcacgcctgtaatcccagcactttgggaggccgaggcgggcggatcacgaggtcaggagatcgagaccatcctggctaacatggtgaaaccccgtctctactaaaaatacaaaaaattagctgggcatggtggccgcgcgcctgtggtcccagctactcaggaggctgaggcaggagaatcgctggaacccaggagacagaggttgcagtgagccaagattgtgccactgcactgcagcctgggctacagagcaagactccgtctcaaaaaaaaaaaaagaagatgataataattctgtttcatgaaggggcaagaattacatgagaatgtatgtataaaataggacttattgtgatgtctagcacatagtaagccctatgaaggcatttgttctcattataatccacatcagcatcatgttctatgggcaaacataaaaagaggtcaggtgaagccactctgataaggtgacatttcagcagagtcccaaagcgagcctgagccaaggagataactgtcagaagaacgttccaagtagcacaagggtgccagggcaggcacatgcttggtgtgtttggtgcgggggggaaagccagcagggtgctaacgagctagagagcagtgacgggggaagaaataggacttgaggttggagattggcgtgggatgggtgggagacggcagaacttgcaagaccctccctgtagaccatgctcatgaagcccgtagctttactatgtgagactggaaggcagtttaaggcaaagaagcatcataatctgattggcccttttggtagctgactctggctgctgtgtagagactagactgtgagtggaagcagggagatttatttttgcaattgtccaggtggcctgagcttaggtattagtagcagggatggtgagaagaaggggttgggcagatcgccaactgtaaagccccattcattgtcagtggattagagaagagaggggtcaagaagggctctaaagatatcggcctagtagaatggagcaggcgttttctaagactgagaaaacctcaggagtagtttaggcagggggtgtcaagagggccactgtggctggaagggagtgactggggaaagggagtgcaaggtaacatcagagcagtcgagagggaccagaccagtgttaaaactggaaagaggaccctttgcccaggaagaaggtgagccgggccatcgatgaagaggagcttctcatctcaccatgtcctcctgtgtccgtctcaggagaactcaggctcttgggctctggccaccctggagtttaattctgcctttgtcatgatagctgtaaaatgtgggcagatctcatcagccccatgtggttttattcgtttctttgaaatatggcggattccttctgaagccactactgtttcttttttttctttttttttttttttttgagatggagtcttgctctgtctccaggctggagtgcggtggtgcaatctcggctcactgcaacttccacctccccggttcaagcgattcttctgcctcaacctctggagtagctgggagtacaggtgcagctaatttttgtattttttagtagagacggggtttcaccgtgttggccaggctggtctcgatctcttgacctcatgatctgcctgcctcggcctcccaaagtgctgggattacagacatgagccaccacgcccagccaccacaactgtttcttaatgtttggtattcaccataaggcatttactctgaaactttgcagacagtactgcagatcgtacttgggctttctaattacctccatctttgtgaaatttagacataagtacacattttattatttccagaattgagaagaaagactcactttgtgttaatgggaagaactggcttgtttctcccgagggacggtcatcagaacagtggttggggattggcttgaactttcccttagactgtggagcttgcaaggggttttgttggggtttgaatgtgattttaaaatgccctgcccctccctctataggatctcaccatcccggagtctagtaccgtgaaggggatgatggccggaccgatggccgcgtttaaatggcagccaaccgcaagcgaggtaaggagctctcctgcaggcaggacaagctgtggcttagggcgaggttcctgtgtgatmctttttttttttttttttgtccctttcttgtgtgtgaggcttaatttattattacaaaacagtacagaagtctatgaaataaaaaattaaaaatttccctctagggtgagcactgtgaggctcgaggtgacggatttcagtcctttgggatgcccacttagcattcatttacatgattatagacctatgtctagttttttttattttgggcagggttctttttcacaaaagtgggatgattccacaagtttttttcccctaatattttataaacaccctcttattgtccataaatacaacttttatgtttagttttattatccttggtgcggctacacctgttgctgggcataattatggaaagcccatgaaggtccactgtcgtggctactctgtttctgttaatatgctcagtaagatgagatcgccaagggcttggtaccagacacaagtaggccaaaaccctgaaattccagaatagatgtgacttagtttgctgggttatctgctgtgcctgatragtaccgaatttataaagcacaggtatgcttgttaatattttcccacaggctcattggaataatttgtgtaccaacctagcagaatcatctattcttttacactttaaagccagttttcctctagctggaatggggcttgtttttataaaaaggcttaggccaaaatgggaaaagagtttccagacaattgtgaaaaagagaccagaatccagaggtgttgcagccagaggagagtccagttaccagggagaaggaagtgacctttggtggsagataactggttttatttcactgttttctggtttcagcctgttaaagatgcagatcctcatttccatcatttcctgctaagccaaacagagaaggtgagttgcctttgaggctcttggcccttggtcaggggctggccaaggagtgctcctccactgggtcctggcctggccatctgaaaagttaggctctgccggtgtattgcccagarcaactagcccagaagcccccatatgggcccgctaatgagccaagcattgttaagattaaaagtaaatccaggccgggcgcggtggctcacacctgtcatcccagtactttgggaggctgaggcaggtggatyatgaggttagggattcaagaccagtctgaccaacatggtgaaacctcatctctactaaaaatagaaaaattagctgggcatggtggcgcgtgcctgtaatcccagctactcaggaggctgaggcaggagaattgcttgaacccgggaggcagaggttgcagtgagccaagattgcgtcgctgcactccagactgggcaacagcgtaagactctgtctcaaaaaagataaataaacccaaaggccgggcatggtggctcatgcctataatcccagcactttgggaggccraggcgggtggatcacctgaggtcaggagttcaagaccagcctggccaayatggtgaaamcccatctctactgaaaatacaaaaattagctgggcatggtggtgcattcctgtaatcccagctacttgggagtctgaggcagtagaatcgcttgaacccaggaggtaaaggttgcagcaagccgagatggtgccactgcactccagcctgggcgacagagcgagactctatctcagaagagcatttaaaactcagccagctgtgtagttgagactgtcacagtgacctttagagtttagggcagaaaccaaacatcgtaagctgtcagcaccccatgaaattgcatggcagacacatcttcaagctcactccaagaggtagtctccaagtcctgcggatgcagagggaggtyctcccaaggtctgcaaggttatggggtggcctgagccgtgctaggatctcatgagagtttgtggctttggagttggatagatgtgggttccaagcttatgactcttattctcaacaccatggtcagcaaaaagacctggtagaattgcatggggacttgaatgaggtaatgtgtatgaactttctagtgtaaaatttggagttcactaaagtataaaacaaatagttgatgttaacttcccactttgggtctaacctttgaggggattattatgargactggttaagcctgcagtagcacaagtagtctctttcctcctccttcattagccagctgtctgttaccaggcaatcacgaagaagttgaaaatatgtgaagaggtatgtaggctccatgcctccccattttaattttcacctggggccttaaactgcaggcagactgacttgatgatgtgtgcttcctgtccgtaggaaactggctccacctccatccaggcagctgacagcacagccgtgaatggcagcatcacacccacagacaaaaagtaggacctttgatgaaaaggcctccagtggctctggttctgctgagggtggggagaaggtgaccccaggggggttctttaagggttgtgtcccagccattgctggcattgaatggaaaaggtggggggatgttgtaactcttatcgataaagacaggagtcaaaagctgtgtaaatctgtggtcgggtctcccttgggcataagctgagggatttttttggctccagaactcaagagcaaggagcacttggctcagtggttctcagactttcctgtgcctgacagtcacctggaaggtggcttctcagtcaatatgtccgggtggggcccaagaatttgtatttttaaccagttcccaggtatactgctgctgctggtcagagctacgctgtgagaaccactggctgagtagaatcatgatgaggccccaaaattggccatggtggggcaggtgggggaagggagatgaaagtgcttggggatcctcactgagcacttgctggctgtcctgcaccctgcccggtgtgggtggggcgatcctggacatgctcccagacccaacttgcgcccagccttgcctctgtgcctgctctgtaggcatgtctcctccgcagagtcttgttggcaaaaagataccttttctaggaaaacacgttctctggagcaagttagctaaagtcagtttccagtttgtacctttcacatggtcttccccagactaaaaacagtgcatcttttacatgatayttttgtactgtttaaatcactaatgctaccagttatttttggtgaacttgtctctgtagagtggaggagataagggcatattaggtgcaaacaaaggggaggaggattgtgttaaaaaaataaaaataaaaaaatgatcaggatagggtgaggacagagtcctgatgtttttacccaacacatttattggcccattagtcaaacttttaataaaagagtatgaagccagcatcaaaaccaaccagttttgttgttgcccaacccaccttaatccacatttccattttgtctgagacacagtgtgaaggactctcagttgccatattaaaaatccagaaccttgacctgggcatggtggctcatggctgttatcccagcactttgggaggccaaggtgggcggattacctgaggtcaggagttcaagaccagcctggccaacatggtgaaaccctrtctctacaaaaattagccaggcatgatggtgggtgcctttaatcccagctacttgggaggctgaggtgggagaatcgcttgaacccgggaggtggaggttgcagtgagccaagatcgcaccrctgcactccagcctgggcaacagaacgagactgtgtctcaaaaaaatccagaagctttatcccaggtctactggacttcctagaacaccaagaaaggaaagggaattcgcctgtcatgatttagaatcatgggggaatattgtactacccaaataatgagtgacaaaaaggtacctccttgtttttaagccacaacttgaagcagttagcaaggaggtctattttggtgagaaagttggtgggttccattttcaacatgtgattcaaattacttaatacaggctgggacagggagaatgtgagcagctgatattccagctgagattaggggtccatttgtagagatggttccagaagaccaaaactatggaaagaatgacagggtcaaagtggaggagctgccggggacatccagcagtcagagaatttctgaattgaaaacatggccaagcgcagtagctcatccttgtaatccccacactttgggagaccaaagcagaaggatcccttgaggccaggagttcatgaccagcctaggaaatacagcaagaccccgtctctacaaaaaaattttaaaacttagccagacatggtggcatgcacctatagtcctagctgctcaggtggactgaggtggaaggatcacttgagcccaggagtttgaggctgcggtgagctatgatcacccccctgcactccagcctgggagacagcataatgctgtcactaaaaaaagaaaaaaggctgggtgcagtggctcacgcccataatcctaacactttgggaggctgaggtgagaggattgcytgataccaaaagttcgagaccagcctagccaacatagcaagacccccccatctctctttttaaataaataaataaataaaaattaaaaactataaaaacaagaacatgatatgatcagaaatgaggaaaggcattcttttgcaccattgtcacttgcaaagagaggtgaagaagtacaagaatcaagaaaagacactttggcaagctaaaagtcatccgtaaaagcatgttgaaatagcagcagtggcatccagcccccagctctcagggttgcaggaaggagcaggcggagtatgtgaatgtgtgtggaggagactggccaatgagtgcttctgtcacaaggattgggaaggacctgtggaaggaagggctgggggaacagtgagaggtttgggggaaggcaggcatggggagaaggatttgtggactgggaaagattgggttccaagctcaggtgaaggacttagctttggagaggagaggcaaggcccattctgttgataacgggaagacgggaaaggtagggtgtgggtagagaattgaagttgggaaagagaggtgaaaattgccgtcctggttcatgcagtcaaggaagttgcctggctctaaacacagtgcttcagtgacttgtggtggattctgttgggctttaaagtagtatccagagccgggtgcagtggttcacacctgcaaccccagcactttgggaggctgaggtgggcggatcccttaagcccaggagtccaagaccagcctgggtaacatggcaaaagcccatctccacaaaaaattaggtgtgctgacagatgcctgtagtctcagctacccaggaggctgagggggaaggattacttgagcccaggaggtcgaggctgcagtgagccatgattgcaccactacactgcagcctgggcaacagaacaagacactatctcaaaaaataagtaaagtgtgaggccgggcatggtggctcacgcctgtaatccgagcactytgggaggccgaggtgggcagatcacgaggtcaggagtttgagaccagcctggccaacatggtgaaaccctgtctctactaaaaatacaaaaattagctgggcatggtggcgtgcgcctgtaatcccagctactcagaaagctgaggcaggagaatcgcttgaacccaggatgcagaggttgcagtgagctgagctcgcgccattgcactccagcctggaacagagcaagactgtctcaaaaaaaaaaaaaaagggcagcaaggggactttgccctgggagactggccctgaaccatacacatcatacttttttctgtgacagtcaggggtttcaaaatgcctgtttayatcctgggacagctttagaccatggcataagagaagacccatgtgcatgacgcccctggctctgcaggtagattggccactgctgtttctggcagtctgaattcccctaccccaagctgtataagggagcgagccttgtgctgcatggaatcatcatcaccgtgaccctccctttccaccctgaactcatcagtctctctctgtttcaggataggatttttgggccttggtctcatgggaagtggaatcgtctccaacttgctaaaaatgggtcacacagtgactgtctggaaccgcactgcagagaaagtaagcattcaggggtggtgcctgttggatcggyggagtctggggtaaccctaagagtggacatctccccctgttgtctcagcgttctgcgtgcaatagaatagaagccaagcttttagtccaggcaggtagagatgtagatgcctaaacttaggatgttattataaaacctaaacatttgcctggcgcggtggctcactcctgtaatcccagcactttgggaggctgaggcgggcggatcatgaggtcaggagatcgagaccatcctggctaacacggtgaaaccccgtctctacttaaaatacaaaaaattagccgggcgtggtggcgggcacctgtagtcccagctgctccagaggctgaggcaggagaatggcatgaacccgggaggcagagcttgyagtgagccgagatcgcgccactgcactccagcctgggcgacagagcaagactccgtctcaaaaaaaaaaaatagaaaatacaaaaattagctgggtatggtggcgttcacctgtagtctcagttactcaggaggctgaggcaggagaataacttgaatgtgggaggcagaggttgcagtgagctgagatcgtgtcactgcactccagcctggcaacagaacaagactccgtctcaaaaaaaaaaaaaaatggcacaatctcggctcactgcaacctccacctcccaggttcaagtgattctcctgcctcagactcccaagtagctgggattacaggcgcgcgccaccacacctggctaattttttgtatttttagtagagaaggggtttcaccatgttagccaggctggtctcgaacttctgacctcaggtgatccacccgccttggcctcccaaaatactgggattacgggtgtgagccactgtgcctggcccagaagtaattttttaaaagaaaaccagaagaaaataaatactaacatagatctttgtaaatctagaactaataaaaatcacacaagaagatcagttgattttttttgataatactccccaacaacaaaaaaataaaattcaaaggaataccaactagaagtacttgtagcaaatacgtaagaagggtaatatgttgcttttattaaacatagtttgataattaagacaaaaaaattagtagggtgctaattaataattttagatctaagaataggctcacacctataatcctagcaccttgggaggctgagggaagaggattgcttgagtccaggaatttgagaccagcctggacaacatgagactccatctctacaaaaaataaaatattagctgagtgaggtggcacctgcctactatagtcccagctacttgggaggctgaggccagaagatctcttgggcccaggaggtagaggctgcagtgagctgtgatcataccactgcattcccacctaggcagcagcaagaccctgtctcagaaaagaaaaaggacaaaaaaatggctcacaaaagaggaaacaaaggcataaaaaatattcggtaatcaggagtaattaaaatatatcaaacaaggccgggtgcggtggctcatgcctataatcccagcactttgggaggcagagactgggggataacgaggtcaggagatcgagacctcggtgaaaccccgtctctactaaaaatacgaaaaattagccgggcacagtggcgggcgcctgtagtcccagctactcgggaggctgaggcaggagaatggcgtgaacctgggaggcagagcttgcagtgagctgagatcgtgccactgcactccatcctgggcgacagcgagactctgtctcaaaaaaaaaaaatgaaacagttgccttttttgactggttaaatgatcaggtaggaagaattttacatgtatttatgggcacttatttgtagtttttaaattacatacttggtactggcataataggagagcttgctggtgatctttatgaagtgacatagtctcattgggaagtcatctgtctacatttgttgagagccttaaaacttttagaacctgttttattctatttgtggagacctgaatttaaaacatagagaagttttgtacgtaaagatgtttggtgatgtgattttacaattgaaagtgggctaagtgtcaaactacaggtcagccattaggtaaatcacagtatatctctcagtgaagttttccatagtcaaccactataaaccataattatgccagaattatgaaagacaacaatatagataaatgtgaatcataaacaacattaaaagtctgatagaaaatagtaggcccatccagcctgggcaacatggtgaaaccctgtctctacagaaaaaaaaaaaaatcacacatggggcatgcacctatagtcccagctattcaggaggctgaggcaggaggatcacttgagtccaggaggttgaggctgcagtgagccatgattgcaccactgtgctccagcctgggtgacagagcaaaaccttgtctcaaaaaaaaaaagccaaaatggtagtgtttttaggcacttccagaagtcttattaacctgacaacagtgttgagaaacaacccaaaaacgaatggccaccaggtggaaggcttccagcgacatccccacattcccagcagagtgttgatagctcagggccacagccaggacagcacagcgggggctggggagaggtgctactgttcataccccattcttgaaacagcataccttcagcagacacttgtgaagcagttcatcatcctaggcactcgtcatgcaaaaactgaagatggccagtaaaaggccccgtgcacttccccaaaagttgggctcctatctccatgacccaggctcccggcctcagcctcctgccttggtaggccgccaggaggcctggtcagcaattctctggcctggctggcatgtttgttgtgcactgcctgcagctcacgttaggatctgtgacttttgcagtgtgatttgttcatccaggagggggcccgtctgggaagaacccccgctgaagtcgtctcaacctgcgacatcactttcgcctgcgtgtcggatcccaaggcggccaaggacgtaaggaccccctccctcccctcagcractccgggtcacagccaggattgctggctggcctcttcccctcctcccctgcacaccaagtgagtgtccacatgtggggggctgaatttcccatcaggggccatctcccattgtgaagggtgtttgcattaattgaatacagacttcctttaattcagatcaaagaatgaacactactagggcccttgaagtctgtgctgaaatgtgtcttgaacaggcttcatgtgttcttgttgaactagaagctttggaactgaatgtgcctttggtccaggtgccaagcttctatgtttagctgtcactgtatttgtatattttagaagttcaagtgyggtagtcatcttattaaactggtgactagcctaatccaagtaaatccaaagaagtccccaaagtaaatgctgaggttyattcttttaaatggggtttgtttttttttttttttaaataaaaagaaatgcacacactcacatagattctttttaaagataaatgggagcatgcgggaagtacttttctatcccttgcttatttcattgttcttcccttttcagctgatagaaatcaggaaatgagccaaaacagcagcaggattctgatctgaggtctgtagggctcctgagcatctgcccgggagcctgggctattgcttctcccttgtgtccccacagctggtgctgggccccagtggtgtgctgcaagggatccgccctgggaagtgctacgtggacatgtcaacagtggacgctgacaccgtcactgagctggcccaggtagcagccttccttgggctkgctctccagcatcttttctatcagagcccaagacccaggcttacaagagtgggcagttaagttactctagagccaaagccagagagggaagaggagaggcgagtagccttgggactagcctatcccgtgctccaccttcaaaccgcagctagtctgaacagccatgggcagtcgctgcatggctgggatgggcatcaagtcctggagctgccagccttatgatgagaagcaacccaggccgcccgcctggcattggggtttgagcagctgtctgcatttgacactggcaaagcatccctcctccccgagcatctggcccaaataagggagtggggactttgggacccacatatgttctgaggggagggcagcatccacaggggaggtgtgtgttcagccgagccattgacatggtcacatctggttctagttgttggtctctaagaaattccagtccgggcgcggtggctcacgcctgtaatcccagcactttgggaggccgaggtgggcggatcacgaggtcaggagatcgagaccatcctggctaacacggtgaaaccccatctctactaaaaatacaaaaaaattagccggacgcggtggcrggcacctgtagtcccagctacttgggaggctgaggcaggagagcggcatgaacccaggaggcggagcttgcagtgagctgtgatcgtgccactgcactccagcctgggcaacagagcaagactccgtctcaaaaaaaaaaaaaaaaattagccaggcatggtggcggttgcctgtagtcccagctactgaggaggctgatgcaggagaatggcatgaacccgggaggcagagtttgcagtgagctgagattgcgccactgcactccagcctgggcaacagagcaagactctgtctcaaaaaaacaaaacaaaaaaattccggccaggcgtggtggctcactcctgtaatccaagcactttgggaggccgaggcgggcggatcacaaggtcaggagatcaagacaatcctggctaatatggtgaaacctgtctctactaaaaatacaaaaaattagccaggcgtggtggtggacgcctgtagtcccagttactcgggaggctgaggcaggagaatggcatgaacccgcgaggcggagcttgcagtgatccgagatcgctccactgcactccagcctgggcgacagcgagactccacctcaaaaaaaaaaaaaaaattccaagtcagttgggttcctgtgtggagaccccagcgtctcatcactgctgtgattcggcctgtgtgacctrcacatggttagctcctgagtttaggtgtcagctaaaggaccttggtatgggtggccgtcccctccagctctggaaggtgatgagcagccgtggccactcagcaacactccttgagtcctgcccagagagygctgggagaggggaggcctccagaagctgtgacttttctttccaggtgattgtgtccaggggggggcgctttctggaagcccccgtctcagggaatcagcagctgtctaatgacgggatgttggtgatcttagcggctggagacaggggcttatatgaggactgcagcagctgcttccaggcgatggggaagacctccttcttcctaggtaacacgcctgcacctgtcaggcctggagcctggggccacatctcctctgtttcacactgatgacagcgtcagtcccacacggcctttctgccggggaccctggggaaggtttcctttcacctgcatagtcagtgcgtggaaggaggaagagccagtctgtcgggggcaggtgaagggggcctcccctggagagaggtgggtctgagcagaggtgagggtggacagagaagccctgtctgtggcattcttgggctgtgacsgtgagtctttaccctgggcaggtgaagtgggcaatgcagccaagatgatgctgatcgtgaacatggtccaagggagcttcatggccactattgccgaggggctgaccctggcccasgtgacaggccagtcccagcagacactcttggacatcctcaatcagggacagttggccagcatcttcctggaccagaagtgccaaagtgagttgtttttggcccctcttcttgcatttggtgtttgattagagcagggtactaggtcagggatttagtgagcgtgaaagatgcccctccccagtcagtccctgaccctggccagaggaggttcagaaacacagtgggcgggatttggggatataggctgggagctgcagccctcaggtgtctaagggtgagtgaggagccaagaggcctaggctatgtggaactgagccctgagtatgttttaggtactgacacctggtggaccgtaagtagtttttagtttcaggtccttggcttttgtctgatactggctttttctcctcagatatcctgcaaggaaactttaagcctgatttctacctgaaatacattcagaaggatctccgcttagccattgcgctgggtgatgcggtcaaccatccgactcccatggcagctgcagcaaatgaggtagggtagatgtggcccaagccccaaggcccttcagtttctttttctttcttttttttttttttttaacggagtctcactctgtcacccaggctagagtgcactggtgcgatctcagctcaatgcaacctccgcctcctggtttcaagcaattctcctgcctcagcctcctgagtagttgggattataggtgcccaccaccatgcctagctaatttttgtatttttagcagagatggggtttctccttgttgttcaggctggtctcgaactcctgacctcaggtgatccacccgcctctgcctcccagagtgctgggattacaggcatgagctaccacgcccagccattcagtttctttttctttttctttttcttttattttgagacagagtcttgctctgtcgcctcaggctcttgccaccacgcccggctaatttttkttttttttttttttttttttttttttttagtagagacrgggtttcaccatgttagccaggatggtctcgatctcctgacctcgtgatctgcccgcctcggcctcccaaagtgctgggattacaggtgtgagccactacacctggccaagtttctttttcttttatcgtttccttccctctacttagtttagcttttctttgttctttttcttttttttgagacagagtctcactctgtygcccaggctggagtgcagtggtgtgatctcagctcactgcagcctctgcctcctgggttcaatagatttttgtgcctctgcctcccaagtagcctcccaagtagcctgggattacaggcgtgccccaacccgccctgctaatttttgtatttttagtagagatggggttttgccatgttggctaggctgttctccaactcctgacctcaggagagccacctgcctcagcctctcaaagtgctgggattacaggtgtgagccactgtgtctggcctctttgttctttttcaaaccctttaaagtggaatcttaaatcatttattttaatcctgctttctttataacatgagtatataaatctttaaatgtccactaatccgtgttaatttgttttctgatttcttctttgatccatgaattacttaaaagtttatctagtgtttgggttttcctagatatctaatgattattgatttttaacttactgctctatgatcaaagaacatgccctgccctgtattgggttttttttgtttttttgttttttgtttttttgttttttttggagacagagttttgctcttycgcccaggctggagtgcagtgtcgcgatctcggctcaccgcaacctctgcctcccaagttcaagcgattctcatgcctcagcctcttgagtagctgggattacaggcacacaccaccatacacaactgatttttgtatttttagtagagatgaggtttcaccatgttggccaggctgggcttgaactgctgacctcaggtgatccgtccacctcagcctcccaaagtgctgggatgacaggcatgaaccaccacaaccagctgcctgtatgattttttttttttttttttttgagacggagtttcgctctgtcrcccaagctggagtacagtggcacgatctcggctcactgcaagcttcgtctcccgggttcactccattctcctgcctcaccctcctgagtagctgggactgcaggcgcctgccaccatgcctggctaattttttgtatttttagtaaagacggggttccactgtgttagccaggatggtctcattctcctgaccaagatgttgaaacccctatctctactaaaaatacaaaaaattagctgggcatggtggcaggcacctttaatctcagctactcaggaggctgaggcagagaattgcttgaacctgggaggcgggaggttgcagtgagcctagatcgcaccactgcactccagcctgggcaacagagtgagactccatcgcaaaaaaaaaaaaaaaaaaacgaaagctgctacagccttctcaggcttattgttttcatggtatgtatatttttccatccatttcctctcttatttatgtctaaattatggctttgatagacagtatgtaattggggtttggatttttatccattttgacagtatctgccttttaattagcatgtctattagcatttttcaaatgatgttttaagcacttaacacgtgcactttttttatatttgagacacagtctcactctcttgcccaggtaaagtgcagtggcacaattatagctcactgcagccttgacttcctaggctcaagcaatcctcccacctcagcctcccgagtagctgggactataggcgtgcacaactgtatccaacttcacatacactttcgaaaagctttttagggtagaagttccgctttcttagctcatcttcatagaatttgaatctaaaaaaaaaacaactgaaaaacatttgtctttaccatattattataataaaaatgacactttgtgaaacagcagctgtatttttaaagtactatcagctgatacacttttattttatgttattttattttattttattttattttagagaccgagtttcacccttgttgcccaagctggagtgcaatggtgtaatctcggctcactgcaacctctgcctcctgggttcaagtgattctcctgcctcagcctccacagtagctgggattacaggtgcctgccagtactcctggctaactttttgtatttttagtagagatacggtttcaccatgttggccaggttggtctcaaactcctgacctcaggtgatccacccacctcagcctacctaagtgctgggattacaggcgtgagccatggcacccagccagtactgttcttttgacacctggcttttcatagtataattctctgttcctgaattgtatttttttttttttttttttttgagacagagtctcactctgttgcccaggctggagtgcagtgacatgatctcagttcactgcagcccccacctcttgggttaaagtgattctcctgcctcagcctcccaagtagctggaaccgcaggcatgcaccgccacacttggctaatttttgtatttgtagtagagacagggttttaccattttgaccaggctggactcgaactcctggcctcaagtaatccgcctgccttggcctcccaaagtgctgggattacaggcatgagccaccgcatgcagccttgttcctaaattctgtcttctgtctcttgtctgtttcaacatttcagagtacttatttcatgactctttcagattacattactatttcaagtcccccctgttcattctaccagtggattctctctggatagtagaattcgttgtgtattttataagtcttttttgatgaaagctcatttctgactatagttatttcccaagggtttcatgtggcttgggctgggaaagcttctctttgaagtgacttccaagttgcctccaccctgactacaggattcattggcttggaagcagagtttttaggttaatttctcaatgcagctckctgctttcaggtcgtttggatggtatgagcttagactctatactgttaggagttcagaggttaggttctgaaggttaactggtgcattgacctttagtagttgtattgatatgtggttcaatttggggctgccattttatcatttgatttctgttcgttgtctttgtcttttgtttgttcctcctttcttactttctttttagaattccagtttcagctgggcacggtggctgacacctataatctcaacactttgggaggctgaggcgggcagatcacctgaggtcaggagttcgagatcagcctggccaatatagtgaagcccagtctctactaaaaataccaaaaattagccgggcatagtggcgggcactattaatgccagctactccggaggctgggacaggagaatcacttgaacccaggaggcggaggttgcagtgagccgagatcgtgccattgcactccagcctgggcgacagaccaagactccgtctcaaaaaaaaaaaaaaaaaaaaaaggggccaggcgcagtggctcacgcctgtaatcccagcactttgggaggccgaggcgggtggatcacgaggtcaggagatcaagaccatcctggctaacagggtgaaaccctgtctctactaaaaatacaaaaaattagccaggcgtggtggcgggcgcctgtagtcccagctactcgggaggctgaagcaggagaatggcgtgaacccgggaggcagagcagagctggcagtgagccgagatcacaccactgcactccagtctgggcgacagagyaagactccatctcaaaaaaaaaaaaaagaaaaaagaattccagtttcatttatctattttcttttttactttgcctctgcattctttttttagtggttactctacagattgcggtataaatccttaagatagagttaatcttgccaggcacagtggcttatacttgtgatccttgtaatcctagcactttgggaggtcgaggcagggtcgaggcagggtcgaggcttaagcaagcccaggagtttgagaccagcctgggcaacatagcaagacccccatctgtacaaaaaaaaataaaaaactagctgggcgtggtggcgagcaccctattcctagctacttgggaggctgaggcaggtgaggcaggaggattgcttgagcccaggagttcgaggctgcaatgagccatgatcctaccactgcactccagcctgggcaacagagcragaccctgtctcaagaaaaaaaaaaaagacagttaatcttgtaccatttcccattaaatgtaaaaactttgcaaccacacagaagcatttctttcccccttcctctccctcatcctttaaggcagggtttctcaacctcggcactgctgccattctgtgtgggggggctatccaagcactgcaggatgttgggtagcccacccaccagacgccagtgacatagctcctcctcaggtgacagaaaatgtctccagatattaccagatgtcccctgggggcagaagcaccacaggtgtgagaactctcactctgaggtataggtgtcctgggtgtttcatctgcccttgttttattttttattcatttatttatttatttgagacagttttgctctttttttgtttttgagacagagtctcgctctgtcacccaractggagtgcagtggtgtgatctcagctcactgcaacctccgcctcccaggttcaagctattctcctgcctcaacctcctgagtagctgggattacagrcacctgccaccatgcccggctaattttttgtattttttttttttaaagaaggggtttcacgacggtcaccaggctggtcttgatctcctgacctcgtgattcacccaccttggcctcctaaagtgctgggattacaggcatgagccactgcgcctggccctaatttttgtatttttagtagagatgaggtttcacctttttggcctggctggtctcgaactcctgacttcaggtgatccacccacctcggccttacaggcatgagccgcagtgcccggccaatgctgaatgttttatatcccatagtgtatttcattctcacaagatcccccgggtactgttccttctcccagagcaagaagcacagtggctgaggtccagagaaacggaggtgcttcatgcaaggtcaacacaggattcctaaccggacagcctgggctccagcactgcctgctggccacatccaccactgcctccaggaatcaggtctaggtcttgaaggcagctctggggccagagactgagccatctcttttttttccaggtgtacaaaagagccaaggcgctggaccagtctgacaacgatatgtccgccgtgtaccgagcctacatacactaagctgtcgacaccccgccctcacccctccaatcccccctctgaccccctcttcctcacatggggtcgggggcctgggagttcattctggaccagcccacctatctccatttccttttatacagactttgagacttgccatcagcacagcacacagcagcacccttcccctgaggccggtggggaggggacaagtgtcagcaggattggcgtgtgggaaagctcttgagctgggcactggccccccggacgaggtggctgtgtgttcacacacacacacacacacacacacacacacacacacacaggctctcgccccaggatagaagctgcccagaaactgctgcctggctttttttcttccgagcttgtcttatctcaaaccccttccagtcaaggaactagaatcagcaacgagagttggaagccttcccacagcttcccccagagcgaagaggctgtagtcatgtccccatcccccactggattccctacaaggagaggccttgggcccagatgagccagtacagactccagacagaggggcccttggggccctccaacctcaggtgatgagctgagaaagatgttcacgtctaagcgtccagtgtgcacccagcgctccatagacgcctttgtgaactgaaaagagactggcagagtcccgagaagatggggccctggctttccagggagtgcagcaagcagccggcctgcaggtgagcatggaggcccggccctcaccgcctcgaagccatgccccagatgccactgccacagcgggcgctcgctcctccctaggctgttttagtatttggatttgcattccatcccttgggagggagtcctcagggccactagtgatgagccaagaggagtgggggttgggggcgctcctttctgtttccgttaggccacagactcttcacctggctctgaagagccactcttacctcggtcccctcccagtggtcccaccttctccaccctgccctgccaagtcccctgcatgcccaccgctctccatcctccctcctctccctcttcctcccgtggagacagtatttctttctgtctgtccctttggcccagacccagcctgaccaacgatgagcatttcttaggctcagctcttgatacggaaacgagtgtcttcactccagccagcatcatggtcttcggtgcttcccgggcccggggtctgtcgggagggaagagaactgggcctgacctacctgaactgactggccctccgaggtgggtctgggacatcctagaggccctacatttgtccttggataggggaccggggggggcttggaatgttgcaaaaaaaaaagttacccaagggatgtcagttttttatccctctgcatgggttggattttccaaaatcataatttgcagaaggaaggccagcatttaygatgcaatatgtaattatatatagggtggccacactagggcggggtccttcccccctcacagctttggcccctttcagagattagaaactgggttagaggattgcagaagacgagtggggggagggcagggaagatgcctgtcgggtttttagcacagttcatttcactgggattttgaagcatttctgtctgaacacaaagcctgttctagtcctggcggaacacactgggggtgggggcgggggaagatgcggtaatgaaaccggttagtcaattttgtcttaatattgttgacaattctgtaaagttcctttttatgaatatttctgtttaagctatttcacctttcttttgaaatccttcccttttaaggagaaaatgtgacacttgtgaaaaagcttgtaagaaagcccctcccttttttctttaaacctttaaatgacaaatctaggtaattaaggttgtgaatttttwtttttgctttgtttttaatgaacatttgtctttcagaataggattgtgtgataatgtttaaatggcaaaaacaaaacatgattttgtgcaattaacaaagctactgcaagaaaaataaaacacttcttggtaacacagctgtgccgcaggagtcctgcttccctcgtcctcggcgagatgggtgggaggagaaggcagcggcggggccggggtgggttttcgggacctccgcgtccggggtgagacggrcttgggagtggcggcgaggtccgcggcagggttggaaccacgaccaatggagccaagcgggccaatagggaggaggagcggggacagactgtcctgccggccaatgagtgagcgcgagtggagcagagcgccctatcatatcctgggggcgccccgggagctccgcccccaagcgggcgccccaggctggtgccggccgcgtccctggccagccggagcaagcctgactcgtgcagccgccggccgcgtccctggccaggcggagcgagcctcactcccgcagccgccagtctggttccagggctcccgcaggtttcgggggccgaggcggaccgacaggcgccagccaatcgcgagcacggagccggcctgggggcggggtggtacccgctccgccaatcgggtgggggcggagccagacgccgggggcggacgggaggaccggaggaccgaggacagaaagattggtggacaggagcagcggccggtggggagggcgctcggcggcggcctgcggccatggccaccgtgatggcagcgacggcggcggagcgggcggtgctggtaaggcgcgcgggccagcgggcgggccggcggggcggcggggccgggcgcgaccgccgggtctgtcccgcaggaggaggagttccgctggctgctgcacgacgaggtgcacgctgtgttgaagcagctgcaggacatcctcaaggtaacgacccgcgccctgccccgccgggcgtggcggccctccctcctcatttccctggctccacctggggccgcgcggctgcgtcctgagcgcctacagtgtgcggctgccgcggctttcaggcagggccccgcctccgcgaactcgagccgacctcattatataagtacctgtgtgcgggcaggggcgggtcccgacgagggtgctagcaagggcctgagtcccgcccggcctcgggtcggggaaggccgccttgggagcagcggcatccaatctgggagccgaagaattctgcctctgcctggcagtgtgacttcagccaagtcactgaacctccctgggcctcccttttctcattggcaaaagggagataacagtacccgcttcgcgaggctggggtgtagataaatgagccaggcagctcacagaagtaaccggcgtagtgcttgctgtggcccaggaccgcgggttaccataactactgccttgttccctgactctgccccttgcccctttccccctcaaccaagctgggaggctgcccctgtctgttttgtattccccgaggcgggcacacaggaggtgttcagggaatgtggtataagcagagatcgggctcacggttaggtgccctgggggcttgggcagggtcttcccaccccagctgaacccaggtgaggccaggccacgttgttccttccccccgctgacttggagggaggggggcttctggaaggagcactgggccgggcctgagtgggcgctaccagctcccctccttccctctgttccacaggaggcctctctgcgcttcactctgccgggctccggcactgaggggcccgccaagcaaragaacttcatcctaggcagctgtgggtgagcctgggctaggcggaaaccggggaaatgggtaccttggggggtaggaggcatggccatagccctgtcctgcagaccagctggttgtgcgatgggacaggaggggcagcccgccgggagggagggctgggtggtgggggggtgaccacaggcaccgctctgacgccacatgttacagcacagaccaggtgaagggtgtgctgactctgcagggggatgccctcagccaggcggtgagtcccccggccctgtcccctcccatcctgccaatggggaagagcatgggagctcccactttctctctgtacaagccctgcgactctgggcgggacccttgatctctctggcctcagttttctcctttggaaaatgacagcaaccctcacaccttctcccgggatcggtgtgcagattcagtaagaggtgcaggagaggggttctttgcacacggcctggcctggcgtccggaccagtgaaacatgggcattggtggattaggctggccacacatcacagttgaatcagccaatgcctgaactccagtctgcacccgactctgtgccaggcaccaaggcgtggggggaggcccccctcctgggctccatctgttgccctttgtagacactagatgcaccccgttcgcacagagcctcacagaggctgcctttcctcttccccttcccctttcttcacctctttccatttcacttctttgtggctcttcttgggcctggtttcctgtttcctgacctccctgttcaacccccaaacggccaaggcattgggagaccctctgccctatacagcggccaaggcctgaaccaccacacaccccatttctgccctgggcttaagggctcagagtggctgtggcaggaggtgcccccccactgcccagctcaccccactcttgcctgtcaggatgtgaacctgaagatgccccggaacaaccagctgctgcacttcgccttccgggaggacaagcagtggaagctgcagcaggtgaccccgcccctcctggctagtgctcagccacaaggacaggcggcagcaggcctgccgcggggcctccctggagagggactagccctggggatctgtggccacagcaagcctgggagggtgtttcctaacagcaaagctgggggcaggcgtttcctgaagccctggaggctgcgccatgtggggaggtagagaacctggcctgagagccccgagggccacatcgggactgtggagtccccacagcagctggctggatgagatggttcagaagccctctgaaaagtcactcccttgcccagagcctccagggacttgccatggctctggggatgaggcccatgctccctggcagctcctgtaccaatgggccccagcctcctcccctgccccctccaccccgactgtctccatctcagcacccttgcccctgccttgtcgccctgtttgcttccctccgcaactcgcacagactcttgtcttgggcattactgtgtgtccatcccttagaaaggagggggcagtcagcttgggcagagaccaggcctgccccaggtgatgccagatgcccatcacctggcgtggacctggccctctggggcacagggatgacagtgtggagagtggaatgacgtggggcaggcaggcagcacccactctcccctcctggccgcatggaagctggcgtgacccctctggatgacccctgcttccagatccaggatgccagaaaccatgtgagccaagccatttacctgcttaccagccgggaccagagctaccagttcaagacrggcgctgaggtcctcaaggtgagctgcccccgggcctgactcctgggcctagtcccacgttcttgatccggaatcacacctgggttccaatcccagggcctccacgttgagctgtgcaacctgtaagcacttacctgccgactctgtgtctccatttctacctgtggggtcaggggcaagctggagtgactgttcaccataataattcaggtcacggggcccccagtaagcackcggcacacaccactgccggtagcagcagtgaaagccttcacattaaccgcgtggcacatgtgaagagctgacctgggcacctgacctcatgcttgagttctgcccctgacttgctgtgtgtcctccggtggttcacctgccctctctggacctctgtttcctcacacttagaaccagatagactaagatcccttcgagaactgtaaccaccctagggtgctacaggccctatacccccagtcagctcttacgtgtttcctgggagccacatcaccctggtactcatggccacggctgaatggcacgaaagctggggctctgaggagtctgccagggctctgctccacggcaaagggaaggaatgggctccaggtggtcccaccatccatcagccgtgaccctggcttacccccctgaaaacctcaacccagtcatccatcgcctcttccaggaagccctctctggccctttacaaccaacctttgttgcctgtacccctgtccacaaagcctgtgcccctgggactgacctcccaggaccttccattccccattgatccagcacccaggatccccgtgcagtgaatcagccccatcccgactgacattagtgcagacatcctgccctcctccatacccagctggagcccaactacctgtctttaacaggtccctgctgccgggtttcgggacctgggaacagtagccactgggctgggtgggagtgggagctaccatgtctgttgttccttaatgcatggggacacgggaggacgcagagccaacccygcctctccctgcagctgatggacgcagtgatgctgcagctgaccagagcccgaaaccggctcaccacccccgccaccctcaccctccccgagatcgccgccagcggcctcacggtcagtgcccctgccagcccctgctgcaggagaggggtcccacagtgggtcccagcttgccctcaggatggacgcggaggggtgccactcccagattataggtggaatattctgtctaggcaggtttctgggatggggtccttggcttccgtcctgtgcccctaaaatacgttaaccctgtttcgggttagtggttcccaaacctgacagcacaggagatacttggggcacctgggaaaagtctggaagcccccattgatgagaagagcatctctggggtggggactgggatcccctgcagactccatgagtgactgcagagccccgctccatccagcctgggctgggggcttgcgagggcctcatcccacctgcctcccrcagcggatgttcgcccctgccctgccgtccgacctgctggtcaacgtctacatcaacctcaacaagctctgcctcacggtgtaccagctgcatgccctgcagcccaactccaccaaggtgaggagggacccctgcccggcccactgcccgccatgcacacgccctgcaaggcctgacgggtctggtgctgttctccctagaacttccgcccagctgggggcgcggtgctgcatagccctggggccatgttgtaagtaggcaggggcggggggtccaggcacgcccaccccatccctccacacctggagggccgggaccctcctcagggaccctctcactgcccacagcgagtggggctctcagcgcctggaggtgagccacgtgcacaaagtggagtgcgtgatcccctggctcaacgacgccctggtctacttcaccgtctccctgcagctctgccagcagctcaaggacaaggtgggcccgggccgagcgccttcattaggggaaggacttctaagggtccttgccacrccctcagagcgccccaaccttggggtctggtgtaccccacagcactgcgaggcagcaatgccctgtcctgacatattgtccttgggtgaccttgacatctcccctgggctaccccatcccccttcagcaacctacagcaccctctccccttgcagatctccgtgttctccagctactggagctacagacccttctgatcacagcacccaggagcttgtctccaggaaggcggccccgtcccctactcatacccaccacagagcaccagccagtgccaacgccaggctgctatttatctccctatcccaccccctaccccacctaacacatttgcactgccrggaatggacactggaagtgccaggaggaaggaaggctggtttggtggggtagtggggaggtcagggaggcggggccaagggtgtcccacattcccaacaccgccctct

SEQ ID NO: 93229 - DNA, 172672 bp, Homo sapiens
gagctcaagatcagcttggccaacatggtgaaaccccgtctctactaaaaatacaaaaattacccaggcgtggtggtgggtgtctgtaatcccagctactcgggaggctgagacaggagaatcgcttgaacccaggaggtggaggttgcagtgagcccagattgtgccattgcactccagcctgggcgacaagagcgaaattccgtctcaaaaaaaaaaaaaaaaaaaaaaagagacagggtcttgctctgcttcctgggatggagtgtagtggtgtgatcatggctcacagcaacctcaatctccagggttcaagcaattcccctgcctcggcctccccactagttaggactacacatgtgcatcattatgtcaggtaattttattttatttttttgtatagatggggtctggctatgttgcccaggctggtcttgactcctggcctcaagtgttgggaatatagttatggccactgcacccagacaatgtgttgcttttttttgaattctcctggtgacaactgagttctttcagggcattctgggcctatatacatacatttctgtagcggtcatttcagttgtcattgacgcatatatgctccatttgtaccatgaggtatagatgaacacccaagagctcttgtctttcagagcttctttttccctcatgaggacgttgcatttgtattttctgaattcttggcttggacttaggtagtgctgtttcatgaattccctccaggaaatatccttgctgtgtacacacagcctgcataggatgcaaaacagggccaagagagtgccctagatctttagagcgtgccatcttagtcaccagggccccctatccagattcaatgttccggttcactggttgtagtggggatcagtatacggatctgaagagcagtatgtgtcctcttccttctcttggaacccaagaggtgtttaccagtttatcctaatggatacaacccaggaagagctggatggaagagatgcataggactaggtatgggagagaagtgtgaggagcttccatgccttctgtgttcatgccactctaccagcacctccacgtcgtcagcagtctggaagctcctcaaaaacattttaaatctgtgtaccggctttggcatcttttattggttgttcttatatattagatatttaatcgtttttaatattattttaaatggtgtttaaaaatgttcaagtcctaattctttttttgtatgtaagacaatgaatttttgttggacattaacctagctattaacagcttagctagttaaacaacctaggagcaacccttaactactgtgagatggggttcatggataaatacccctagcttcctccctcctcagtaggttaattctcaggtatgtcctggtctctcagagggttcccagtgggattgggtcccagttgcctgtggtagtaaaacacttatcagcccaccttttattggcatttctcccacccttatacatttctccattcccacacagtgcttcctgcaatcacctcctaaataaacgatttacagccaaatccttctctcaagctctgcttttggggaaaccaaatctcagatatggcctatttcagggaggcagtccctcaggtctgaacactgagtaagaggggttcgttagcactccccactgcattgggtgaaactagacatcaatccctgttatcttagccccaagtacctgtcagacctgctctacttcagcttctcagtttgtatttctggaattgacacgcatcccaggggaaaagtggctccaaacagaggactcacttggggcttattcatcccttggaccctggtttggtaatccatcattattttgctagctttcttgtgccattaagcaaatttgaagaaatattttgcctaacttttctagctgtcctcaaagggagaattagttcaaattattagaaaggagctccctttaaaaaggagtctgttttctaaggttgtattgcactttgactcttcaaagagcttctgttgacccctgcttatctccattatctgtatttcttcagcccccacacatgtgatggtctttcacaactccatgcttttacttgtttttctctgttcaaagtgtgacccaccaaggtgttacagccctgggagaggaaaagtcttcctaatatgccatctgggacaacaaaaaggtagcaaagccaagatgattatcaaagaccagagaggcagtttcccaataggctgtctagaggaagcagaccaactttcaaccaggagaaaaagtctcagtcctaggaaactaggaatgggtgaatcgagttgaaagcaggataaaagcataatgaaaagacaaaggagatatttggaagaaagagaagcaaggcaaactatgggtatggtgtgatctgtttgggggcaattctaaaaagattagatttaagccaggtattctatttgctcagaacattcttgaaagctcagcttggctgggcgtggtgactcaagcctgtaatcccagcactttgggaggctgaagagggtggatcacctgaggtcaggagttcgagaccagcccggacaacatggtgaaaccctgtctctactaaaaatacaaaaaattagccgggtgttgtggcgggcacctgtaatcctagccacccaggaggctgaggcaagagaattgcttgaatctgggaggcggaggttgcagtgagccaagattgcgccactgcactccagcctgggcaacaaggttgaaactccgtctcaaaaaaaaaaaaaaaaaaaaaagaaagctcagcttgagtgacttttcttaattctcttggctggaatcacttcctccttcaacctccacattactcttcttccatttatcatataatttttttctctattggctttgaatagtctgttccttctaaattattaacttctagatggcagcagtggtatagtggaaagaacaatggaatccaagtcagaagaccggggtttcagtatcagcttcagtccttacctcaggtgtttgagccccagtgtcctcatctagataacagggatattataatttaccctatagtgtgattcaagtattaaaaggtataaggtgtaaaagttgaacatagatgggaggccgaggtgggtcgatcgcttgagcccaggagatcaagaccagcctgagcaacatggcaaaaccccgcctttacaaaaaatacaaaaattagccaggcgtggtagcctgtgcctgtagacccagctactcgggaggccagtgcaggagaattgcttgagcctgctaggtggaggttgcagtgagccgaggccatgtcactgcactccagcctgggtgatgggagtgaaatcctgcctcaaaaaaacaaaaacaaaaacaaaaacaaaaaaaaaaactggaacatagcaccagacaagtaaatgtttccatttgctgagcctactatgtatatgaactgtcctaggtgtctgacatacattatcttatttagatctcactgcaactctgtgtagatagatctattagtatggaatatttaacaaatgaggaaaaaagatgcaatgataggttaaatctaactaatttttttttaagacagattctcattctgtcgcccaggctggagtgcagtggcacaatcttggctcactgcaacctccacctcccgggttcgagcaagcaattctcctgcctcagcctctggagtagctgggactacagccacaccaacactcctggctaatttttgtatttttagtagagacagggtttcaccatgttggccaggctggtctcaaactcctgacctcaggtgatccacccacctcggcctcccaaagtgctgggattatgggcgtgagccagtgcacccggccaaatctaactaatctaaatccaagtaaggccacgtagttaagtagcagaaacaactgaaatttagatctgggctgggcgcagtggctcacgcctgtaatcccaacactttgggaggccgaggtgggtggatcacctgaggtcaggagttcgagaccaacctggccaacatggtgaaaccttgtctctactaaaaatacaaaaattacccaggcatggtggcagcgcctgtaatcccagctactcgggaggctgaggcaggagaatcacttgaacccaggaggcggaggtggcagtgagccaagatcgtgccattgcactccagcctgggcgacagagcaaagactccgtctcaaaaaaaaaaaattttttttagatctgtttggcttgaaatctagcagtgtctactggtctaccttccttcctcagggctcccagggacatctaatagtgaccttgaaatcactttttagtctaaactaatctgggccaatggttgagctggtaacctacaaaagtgttccattatctgccttgagggtaccaggtctgtcctgatttgtaagtattttttcataaattttgctcagaagaacttcctaagcaaaactgtgtgtgtgtgtgtgtaattcattaacagaccacctctgtagaaggaatgtcatgttctcagtttttgccttcgaagaggtactttattttttaaaggaggtcatagaaacctttgagaagaaagtcatgaattggttccttagggaaaaaaaaacagacttatttgattaaaaaaaatttttttttgagatggagtctcgttctgttgcccgggctggagtgcagtggcatgatctcagctcactgcaacttgccaggttcaagcaagtcttctgcctcagcttcctgagtagtggggtttacaggcgcgcacagccatgcctggctaatttttgcatttttagtagagatggggtttcaccaagttggctaggctggtctcgaactcccaacctcaggtgatccgacatcctcggccttccaaagtgctgggattacaggcgtgagccactgtgcgccgtggccaaaactctgaaagtgtcttatagtagaaactcggtataaaagatcctatctcggccaggcgtggtggctcaggcctgtaatcccagcactttgggaggccgaggcgggtggatcacctgaggtcaggagttcgagaccagcctggccaacatggtgaaaccacatctctactaaaaaagaaatacaaaattagccggacgtggtgacacatgcctgtaatcccagctactccatagactgagacaggaaaatcgcttgaacccgggaggcggaggttgaggtgagccgagaccgcgccattgcactccagcctgggcaacaagagcgaaactccgtctcggggaaaaaaaaaaaaaaaataataattttccgttctgattccactgatcataaattgaactcctttgtagaacaggtttatcatctttcatttaaaagtaataaaaaatcacgaatcatttatatcaggaaattagtggaaatttccacattttgtctttgggcatgtgatggtggtgaggaaactggggagaccgaggtaatagaagttgctgcaaagccaactccaggatcctactatctccttctggaaaggcccttacataatttccttacttttccaataaaaggctgtatatgtcttgccccttaactgattttaccaacttcaccataaatacaactgcggatgaaggatgagaagcaacaagaaacccctaaggatccgccaaataattagggctgccccaggggaatccgagcgaaagaacacaagagcccctcttcctcctcgcctcctctgggacacacacttaccctccctcccggcaggttagcccgcagcctcctccttccctaacacgtgctctccggaacactcactctggagacatcccacccccggcggggctgggctcgggagccgaacggaccaatcggcacgcgccttacagcgtcgtggcccgacaacgttgagcagcccaatcgagggggccttgccgcccgtttcccggagccccgcctctcgccgccgcgcccccgcccgccggtctcctccctcctcctcctcccgtttgcccctcccccgccgctccggagcggagcctgcgagacggagaaactggggcagaagtgaagatggcggcggcagcttctcgctagtgacgcgcggtgcgggctcatctccttcccctccttcctcacctcccctagtccggaccccgtccgccgccgggaccagaccgtccycgtagcccgcagccagcagccgcccctctcctcccccggccgcccctctcccaacgcccgtctgccgctggccggcggcgcgcccctggtcccggccgcctgcctcgcactccgcgctgtcgccgggggagcgggtggcgtgtggattcgccctcctgcccgcccctccgggccgcggacacacgcccggcagggaggcggcggcggcccctgcgtatttgcttccctccatttggggactgggaggcggcggcggctgtgggttttggggaggggtagagggctggggggcgggcgagagcgggagggggccgccctcgagtggaggacgagaaggaaagcaccatgacgtccatccatttcgtggttcacccgctgccgggcaccgaggaccagctcaatgacaggtaatagggctggcgggtcggcgggcgcggggggaggggcgcccttccctccctcccctcccccacgggccgtgccgggcgggtgcgggtgtttacgcgccggccggccagctggggtggggtgcgggggtccttactgcctcctgctaggctccttccggggcaaacttctcatcccgggggcagggggccgcggggggagcgcggtgtagacgggactcgcggtgtagactggagagcgctctgtaaacccccttccccctcccgcaaggagcggcgttgaactcggcggagatgggggggtggtttctggctcccggggggcaggcggtaattactgcccggccaaggcccgaggaatccatattagtcaaagttgaattgagacagacaatgcggatgggggatggtggaggtaaaaagagagggaagaggagaagcggggccaggggccccggggtgggctgggctgggcttgtcccgggcccccggcagctgtgtccggtggggtggtctggacctggggatcccggggtcgggttggggagagaagccgattcccggcagattgctgggagcgggcggggggtggggggaaggtgatagttgggggagggagtgagggaggaagcgccatgattattgttattattattaaatttgagcccctgcagtgaggtttgcctggcccgggaggggatggattcaagcgggggtggggaagtgcattggattccctttactctcctcctgaaatggtgctggcagctcctgctactagcccctgtggtgcgagcttttttgtttccttttctattctaatgatagtgttttcctgagttgtaatttgacagctgaaaaccgtgcgtagagtgtcaaaggaaaactcttacgtttgcagttcgcaatgctgcttttcttaacacgctgtaaatttctgggttgggtttgctatgggcggaggatgaattatgattttattttatgttttgtcttttataggctgttttggtttggatttctccttttcttccgccaccgttccttgccagtttaggatattgaattgcagtgccgcatgctctcagggaactgagataaggcaggaaaagttccttcactgttggaaaacagactcaggaggttgagggaggcctccattaaagcatgtcttagaatctaagactcagatctaatgatgggctaaatgtttacaggatcacaaagtggagcattttaagtcttcctctctcccagtacttcactgctctctacatttcttttgcgtatagaaggccatctggtcccaagtttagaagttacatagaatttttgctaagtgaccgggtgacttaagttgcatgatgccctgtttgtcatgcgcttcccagagggaggaagaggcctaacttgctgctgagatactggcctcttgtgtcagtgtatctaaccgcctcaagtggagcagacagcttttaaatccagagctggcggtttagtttctgcacttggttcggatttgcctaatctttgctgtagccatattgtatttaacatgtttgggaatcttttgaaatacttactgaaaatactaactactcagagttgtcacatagttcctttaaattctgaaataactttttagttatttaacattttgktatgtggttcttagcctgactttacttcattaaagatcttttggagacattaacataaaattttttggtaaaatttagaaacaggctagtagtgaggatagctctacggtcattaacagaaccatgttggtagtgcttgtcttgttacttagaaaaccgcaccagagagaagagaggtagggcatgttttctatattagtcctaactttatgtaccaagaaacctgactagcttactcagttggctgtgcatgccaaaacctattttgcggttgtgttgggcactttgattcatttttgagcattccttttgcttcagctatttgagaaatttacaagtaatgtatctttttaaatgctaactcttctttttccattcctagtataaacaatcagctttgtttgattcttctatcattatacaacattaaaaatatttagatcatagtgacttttaatttcatgaaattaggaaaaaagtagacttgagtcataacatgtgcatcaaggtggcagatatttgaaaaatagaaaggtgccgtaggtgaaattataaagagctatatggttgtatctagtagcggtaaacatgtcttgccttttgagatttgtgaaggcagcatttaagataggcacatatcctaagttttgaagtagctgatttgtggcaggagctgttctgtgtttccctttcaaaaggagggctcctttttgcatacctacttgtaataggatcaacctgtcacttgagaaaaatctgtttccaaaagagactggttttctggaaccttttaattaactagaataagcgtattttcatctaaagataaaaactttaccaagttttagtaagttggggcaataaaaaagctactgctactgtagcttgactttttttattatgagaaatgtatgagagtcacaaataaaatgataatcatagttatgtatgaaaagggtgtaaatagactttatactttggaataaaagtagtaagattagacaggcagaatggtactgcaaataaattgctcagctgaagaaaacttggtcctcaaaacagtagtgttttcttcaaatacgttttctttctttacccacatcctcttaaaaagtcaaatattttgttcagcatcatagtctgatgtctcaagtgtctaaaatgtacaaagcataaaaaagtatctttttttcataatttgtgttttcagacttgccaataatgaataataatgatgccaggatgaaattgacaaatacaggtggggatggctggggtggaaagaagaggatgttggctgtgacttcccagaatgattacaaggtgcctggcacagaatgctgggccctcaagcaaatattcattgagctgaattgaaaccattcagtgctcagatactttggacattttgatctcctttccaatggatttcttgagttagtactacgttcctgcttaaaacattgtctcagagaaacagtaaaacaatataaagaatgtggttcgtcgagcttgaggggagagctgaaaggcctgcctcactaatagcctggaaagtgcctcactaatgagctgaaaaaataggcacagagatttacagtgtttatgcagggatacaactactgagagacagctgaggtccacctgatgggtcttctgacttttctttaaagtccagggctccattccacttcacgtggcttgtattccagaatggttctgctgtctcagacatcccagccttcaggcagtgtggccacctgtcttagtgttttgattccgttttcccctcaactgctctttccagggctcctaatgggtttatgcctttttttcagaggctgacgctcttaaccttttcttggtactaggttaggataggtcttcttaaggtgatgtggttatggcatttattgtccttgtcctgaattattcctcaagatgcaggttagttacgaaacaaaccagttcttattgcttgtctgtatgtggaattttcctgtgagatttgccttttggcattacaacgtattgtgcagtcataaacagtctttattgagattgtcatatcaaaaggatttttctmtaagcttagagtttccctttcaggtgtcataacacaaggtaagatactatagacaggagtttcaaactctgcgctggtagcctagtcatttaacctcttagaaccccccacatcaatctctgaattaggtgtagcactctcctcaaggtcagggaggaacagttgagacagtagatgggaaaagatcaatattataatgtggattctacggaaaacattacgaagagatggttacttttaactttttacgtgttgcctggtttccagatagcaaagcaggaactcaaaagagttgccctagaatatccttagcattsagagcagaatcgactcttagttctagattagtacttctcagcttggtgtgattttgcaccctccacacacaaccccctccccttattgggcagtgtctggagacattttttattgtcacagctggggcattgctactggcctctagtggatggaggccagagatgctgctaaacatcctataatgcataggatagcccccacaacaaagaattacggggtccaaaatgtcagttgtgctaaggttaaggaagcccatcctagatgatcttcaatgcatttggttgtaaaaataagtgaaaatgacttttatgaagaatatttcaagcaatawacgttctttttttttttcttttttgagacacagttttgctttgtctcctaggctggaggcagtggccggatctcggctcaatgcaacgtccacctcctgggttcaagcgattctccttcctcagcctcccaagttacagacgcataccactatgtctggctaatttttgtatttttagtagagatggggtttcgtcatgttggctaggctgctcttgaacctaacctcaggtgatccatctgcctcagcctaccaaaatgctgggattacaggcatgagccaatgtacctggccgcaatatatattcttaatttttaaaacatgactgtttaaattaagattaaggcccggccagtggctcatgcctgtaatcccagcactttgggtggctgaggcgggcgaatcacttgaggtcaggagttcgagaccccttagcctggccaacatggtgaaaccccatctctactaaaaatacaaaaattagctgggtgtggtggtggacgcctgtaatcccagctactcaagaggttgaggcaggagaattgcttgtgcctgtgagacagagcttgagcccgtgaggcagaggttgcagtgagccaagatcgcgccactgcactccagcctgggcgacagagcaagactctgtctcaaaaaaaaggaaaaaaaaattaattaagattgattaaaattaaataaaaatttaagtcacttcatctgtagctagtcacattttaagtgcactgtagtgccacgtagctactcactaccacattggacagtgcaaatacagagcagtgccatcatcactgaaagttctcttggatagtgttggcatagaaagtgtgtttttgcacaagtcttggcattcagtgagtgctcattatgtttattaagaactttgaggttttaaagactcaggcatatcttcactcagtaggagccagaaaatatgccagggattatatgaagcataacaaaggttgtggtgagtagaggttataatagttgaaagctgcttgaaattttattgtggtgcaccaaaaaacaaaaaaacaaaaaaatcaataaaaaaaccccccagacattaggttgtgtgggatggagcatcatattaccaaatcagtgaaaaatctcaccatttgattattgagattgttacctaaaagcaatactaaatgcattatgccaggtgcggtggctcatgcctgtaatcccagcactttgggaggctgaggtgggcggatcatctgaggtcagaagtttgagaccagcctggccaacatggtgaaaccccatctctactaaaaatacaaaaattagctgggcatggtggygcatgcctgtagttgcagctactcaagaggctgaggcaggagaattgcttgaacctgggaggtggaggttgcagtgagccaagattgcgccactgcactccagcttgggtgacagagcgagactccatctcaaaaacaaaaacaaaaccaaaaacaaacaataaaaaaccaatactagatttattgtattggaaaagtacagtctggcctaactaaaatgtttaaatgaatttgcttaagtaagattaacagcagggtgtagaatagccaagcaaaatagaaaatcaaaacaaaggcagagcaattttataaatcaggawatctgtgactgaatcataggcctaggaataaacagacacttgtgaagaaaattacaggatacacaggaatacgactaggaataataggtgaaattaggaaaggtcagggttttttcccctaacaattagaccattaggttatttaggaaatagtttccaaaggaaaatttaattgctgaagactgagttacatggacgtagatcttataaggtatattaaaggaagcaattttatgttacaggaggatgtacttaatgtctcccctccctcattttatcatacatatttattttgttttttgagtctcgctcttgcccacgctggaatgcagtggtgccattttggcacaatcttggctcactgcaacctccgcctcccrggttcaagcgattctgctgcctcagcctcctgagtagctgggagtacaggcgcacgccaccatacctggctaatttttgtatttttagtagagatggggtttcaccgtgttgatcacgctggtcttgaactcctgacctcgtgatctgcccacctaggcctcccaaagtgttgggattacaggcgggagccactgcgctcgcccatattatacatatttctaattaagaaaacagactctagttagcatccatgtttctgtcattttgactccttggcattctggtcatgtgaaaatagcctcttctcttggctcactgtggttatgaattgttggtttatttttagaactggtttttaagttttcccctgagtattatttttaagccttttattttggaaaattttaagcatatacaagagtagagagaatagtatgatgaacaaccatgttcccatcacacagtcttaacagttgtcaactcatggccaatctgatttcaactctctccccatttattctcctctatcaggtaatttaattgctgtatcttcactatatatttcaaaatatgaagcctttaaaaaaaaacctgaaaaaaccttaataacaaaattgcccagattttcctgttgtctcataaatgcttatttctgattgacaattttgataattttacttaataaagctgattgggttctaacatgttaaaaaatttgacatttgtagaataaccttagaatttggattgtaaccttagaagaaggggccactggggaattatttagttccttaaagctcagtgctgtaactttttttttttttttttttttttgagatggagtttcgctcttgttgcccaggctcgagtgcagtggcgtgatctctgctcactgcaacttccgcctcccgggttcaagtgattctcctgcctcagcttcccaagtggctgagattataggtgtgagccaccacgcctggctaattttgtatttttagtggagacggggtttgaccatgttggtcaggctggtctcgaactcccgacctcaggtgttcacctgccttagcctcccagggtgttgggattacaggcgtgagccactgtgccaggcctcagtgctataacttcttaacctccggtatgacagcattttttgtcagcagtcacttgtaattgttagataaggatgataagacaggattcttgaaattcagtgatttttccatggggtcactttgagaaataagattgtcatgtgaaaagtttgcagcattttcatgaactaatagacaggtgaggtattagtcaattgaacttggctataagaaattattctctgagatcatatttcttattactttcttgagacaatcagtgtagtggtaacaaaaccccttccaaattagaaatacgataaattcttagataaccatgctttgtaacattgtcattttgtcaggatattaaagaaggtattaatatttaatgttattttacttgtaaatacacaatttatgttacttgcacagctaaagtactgttatttgttcaatttctgacagtatcacttaataaaatgtctttgactctttcatctttattgagttatactttacattcagtaaaattaacccattttaggtgtacagtttgatgaatttcggcaaatgtgtacagttgtgtaatcaccaccacaatccaggtacaggacattttcatcaccccaaaaagttacctggtttccctttgtattttcagtcacttccccctaggctaggtcctggctacctagcaaccattgttctgctttctctcactgtaatgcttttcctttttgaatttcatagaawtggaatcatgtgtctgttttcttttgcttagaacagtgcttttgcaacagatctgtgttgcagcatgtagtagtttcttcttttatattaaaagtagtattttcattgcttgacctgggaaggtggaggttgcagtgaatcaagattgtgtcattgaattccagcctgggcaacagagtgagactctgtctcaaaacaaacaaaaaaagtagtacttatttcatgactgtaccacagtttttaaatctgctttctagctgatataaatttgggtagtttactctttctagctattctctagtctttatttttttcttgtttatttattattttaattttttttgagacaggctcttgcgctattgcccaggctggagtgtagtgatgtgaacatggctcactgcagccttgaccttctgggctcaagcgatcctcctgcctcagcctcctgagtatctgggactacaggcttgcattaccacatctggctaatttttaattttttgtagagatggagtctctctgtgttgcccaggctggtctcgaactcctgggctcaagcaattatcccgtctcagcctctccaaggtgctgggattacaggcatgaaccactgtgcctcgccttatttatttctttaaaattagagacatggtcttgctgtgttgcctaggctggtctcagactcctggcctcaagctgtcttcccaccttggcctcccaaaatgctgggattacaggcaggagacaccatggctggcctgaagtttttcttggcttcaatttatcacaatgtttttcataggaaaagtccactgataataaaaacctagatttttcttgacagcaaatttttgtgttaattaaaaaacatactagtatatgtaaaaagattatattttagaattccattaaatgtaatggttgtattctagattgctagttataaagatgatgatagtggctagtcgacaaagcactgtgatgaatggatcagtagataagtttttattttcttccccatgagttcaggctccatttctgtgatatagaagtgtcgagaacctgccgtttcaagaaattggctctgctccagcatgaatctgctgttcagaattcaggcgatgaggtattccaggtctttacttgaattcagataccaggtctacctcacagacaacctggaactccagagatggccttaactgtgtctccaagactcttacttagggacatggtggaaattcatttgggtgttttccgtgacagcctccttgttatgaagtgagaagtggaggaagatggttttttaagccttaagaaaagctaaatttgagattaggaagttaatttgatggagaaagctaagaaagcccagacaatatggtagggttattttaatttctaaatgatgaaaacagagttttatatggaaggctttggggagaggggtattagattgttcagctgattatctgttctcttatgttgtagtagtggctttgtttcttgtccagaagtaattcgaacttgtccaattattgctctgtaacatcatctgcctctacaaaccctgctttaagtcttttaaggaagcatcagcaatcaaacgatttttatgaaattgtgggtgagtgtagtttataaacattcattctctttctcttttttttgagacaaggtctcactctgtcactcaggctggagtgcagtgatgcaatattggctcactgcaatctcaatctcccaggcccaggtagttctcccacctcagcttccctagtagctgggactacaggtgcgtgccaccacacctggctaatttttgtgtttttcatagagatggggtttcagcatgttgcccaggctggtctcaaactctgacactcaagtgattctcctgcctcagcccccaaagtgcttggattataagcatgagccaccatgcctggctaaacattcattctcttaataggcttatatttctagtgatgtttaaacttgtcttcatctccaggaaatccttaggtgttttccttaagtgattgtgttttttctgcttatcaggtattctgattattacatgtagattagagaataattgagtagggggagtatgggcagtgggaccttttgtttctgtagttgttttttgggggaagtacttttttttttttgcctcctatagtcgccaatagaagattaacccaaattcctgctacctgagacgattcctggtaggattttgtcactgcctaggggatgcagaaacagaaatgagtgacttctgtagtgtaggttggcaggccatggtttgcaggtcagagatgacatgtggactgattttgttggcatctgttcatctttctgctacttttgagagctgagagctactgaagagtacatacgacacttgcctgcagagacaggagtcagtactgtagtacagtacaggaattagcagccaccccataccatccctgaatgtttctggtttcatgaaactctagagtggcagggactcgaggacagttggtattttgcttttctctagggtctctctgctcttcagagggctctgggaatgtaaaagcttcttcaattgacatgtagattcagtctttgtcttcctttggtcaattttaagacattattgagaggtaatagcattttttggggatcggggacatgatatggttaagcttttttaaagtagaaggtttttcggacagttgaattgaaattattgtatgagtaacataacctagtcaaattgtagtaaaatcatggattgtggtggcttttcccagttaggaggtctcttgatttaaaacagtgcttctcatgggatggaccgtcatcaggagcagcaaaacttgaagaccactgagtaaaaaggctcttttaccctcttttctttgtcttaacattgattgatgatggcaaatagggccaaacttgccagttcttcactgcctccaaccttccttttccccttagacttacaggttttatacctgtctgtttgagaatagggtattttcctgttccttgattttgtgtgtctctctctaagctagagtagtttatttttgttcgcttctttttttttaaccacgaaattggaaaaatttagattaagttacataaattctaggtcctctacacaactgtgagatactgaaaggatagctttttaaaatgcatttcggtgcttgtaaggtcacagtctagttgggagaaatgaggctcatccatagatagtagcactatgaaagactgctacaagaggtagagtttgggctgtgtaaatatttgccatgctattgcttgcacagagtttgagaacagtgttagattagtttttcttgttgagtaaatgcttgtgtgcttctcatgtgcaaaaagtgtgctaggccagggatagctggtgtgtttcaattgccacaccaaaccgtcctgaaacttcgggttgagacgtgtttggaactttttctggctcagggagaaagcttggagaagagtgaggttatagattagcgagctcagggagtggcatcaggtgggtatgccatgtattgtttttctacctttctttttttttgagacagggtcttgctgtgttgcctaggctgatcttgaactcctgggctcaagcaaccctcttgcctcagcttcctgagtagctgggattacagacaagtagctaggattacaggtgagtgccactgcacctagcttgtttttctaaccttttattttgaaataattacagactcaaaagaagatgcaaaattggtacagaggggtaccatggatccatcacccaacttccttcaatggtaacatattatgccagatatttttggcatccatgtcaaaatactagagatagagacattttccccatgtgcatttttgatttttttttttttttttttttgagacagagtcttgctctgtcacccagggtggagtgcagcggtgccatctcggctcactgcaacccccacctcctgggttcaagcaattctcctgcctcagcctcctgagtagctgggactacaggcgcctgccaccacgcccagctaattttttgtaattttagtagagactgggtttcaccatgttggccaggctggtctcgaactcctgacctcgtgatccacccgctttggcctcccaaagtgttcggattacaggtgtgagccactgcacccagccaaaaattgtttaagataacatagatttgaagacatagtttaaagaaaactttgcctttttagatgtgattgtaaattgatgagatataggctgggcataatggctcacgcctgtaatctcagcactttgggaggccgaagctggctgatcacctgaggtcaggagttcgagaccagcacggccaatgtggcgaaaccctgtctttttactaaaagtacaaaaataagccgggcatgrtggtgagcacctgtaatcccagctacttaggaggctgaggcaggagaatcacttgaacctgggaggtggaggttgcagtaagccgagatcgcgccattgcactctagcctgggcgacagagtgagactccgtctcaaaaaaaaaaaaaaatttgatgagataatatatattatgtagtgatttaaatttttagacagtctgatgtggtggtagatagaatgtaagttggagtaagcaggatcgtgaatttgttctttgtatccgacactaactggccatatgatgatatgaccttgagtaaatgatacaactcatttgtaaaatgagagagttgggctagatcatttggtctttttttaactcctgtttccatgcccttgtgattgtggtagggaatagctttttttcatcatatacctgtttgccatttatatgtcttttgggaaatgtctattcagaccttttgctcatttttaattagattattagattttttcttgtagagttgtttgagctccttagatattctcattattaatcccttatcaggtggatagtttgtaaatattttctcccattttgtgtattgtctcttcacttggtggattgttttctttgctttgcagagctttatatttttattttttgagatggagtcttgctctgttgcccaggctagagtgcagtggcgcgatctcgcctcactgcaacctctacctcctgggttcaagtgattctcctgccttagcctcccgagtacctgggattacaggcgcccaccaccatgcccggctaatttttgtatttttagtagagacagggtttgaccatgttggccagacttgtcttgaactcctgaccttgtgatccagcctccttggcctcccaaagtgctgggattacaggcatgagccaccacgccyagcctgcagaagctttttaacttgacgtgatcccatttgtccatttttactttagttgcttgtgcttgtagggtattactcaagaagtctttgcccagtccagtgtcctggagagttttcccagttttttggggggaaatttcaaactttgagctcttagatttaagtttaatgcatttcagtttgatttctgagtatggtgagagacagaggtctagttttattcttctgcatatggacatccgattctctgagcaccatttattgaagagactgttttttccccagtatatgttcttggcacctttgttgaaaatgagttcactgtaaatgtatggatttgtttttgggttctcgtttctgttccattggtctgtgtgtctgtttttatgccagtaccatgcttttttggttactatagctctgtagtatagtttgaagtcaggtaatgtgattcctccaattttgttattttgctcaggataactttggctattttgggtcttctgtggttccatataaattttaggattgtattttctatttctgtgaagaatgtcattggtgttttgatagagattgcattgaatgtatagattgctttgggtagtatagacatttaacaatactgattcttccaatccatgaacatggaatatttggaaaagggtttttatattatagaattacttggagaaagaactgtgaatctatgattgtccatgatttcttttacttaattatgttgatgaatggaaaataagtgaacaagggaagtgggaaaaagatttttttttgtttgtttgtggtagagtttcgctcttgtagcccagggtggagtgcaatggcaatctcggctcactgcaacctccacctcctgggttcaagcaattctcctgcctcagcctcccgagtagctgggattacaggcgcccgccaccatgcctggctaattttttgtatttttagtagagacgggatttcggcatattggccaggctggtctcgaactcctgactcctgacctcaggtgatccatctgccttggcctcccaaagtactgggattacgggcgtgagccaccgcaccaggctagatttttattctttaactcagtacaacaaatactttgccagctaacctgtgtatacactggaatacaaagatggctggcctctgccctcatggagctttcagtttgatgaggagacagacatgtaaagaaggaattaagtgctaattgatatataagtgatagggaagaaggatctaatggttgtgtaggaaagactttgaagactaggttgcaggatgtggggactggtttatcctcttcagttttcttgagctgggtgaattttggtttataggcattgatggagggaagataggatatctgagccttgcagagagtctttttgctcattgtgcacaggctgggattgactatgtggcctcttcaaatgctgttctcacagagatacttaaaaatgagaccaggccgggcgtggtggctcacgcctgtaatcccagcacttagggaggccgagatgggcagatcacgaggtcaggagatcgagaccatcctggccaacaaagtgaaactccgtctctactaaaaatacaaaaaaatttgctgggcatggtggcgtgtgcctgtaatcccagctacttgggaggctgaggcaggagaatygcttgaaccggggagtcggaggttgcagtgagccgagatcgcgccactgcagtccagtctggtgacagagcgagactctgtctcaagaaaaaaaaaatatatatatayatgtgtgtgtgtgtgtgtgtatatatatatatgtgtgtgtgtgtgtgtatatatatatgtgtgtatatatatatatttgaatttagatatatctgttaagttttgtaataaaattttatctatctttggaaagtttgttttatgatattgacactaattatcaagcaattcctgcagaatttgaagagtgatactgtgtatccgaaagatactgtgtacctaccacagacaggccctatggaagacagctctgagaactggaaagactgtagagttggagttaggaggcttggtcattccactaaacagtcacatagtcattttcatgcagtgagtttcattttactcatttgtaagatgaggaggtgtatttaatgtctgaaagttcatttcagccttgaatctgtgtgactgtagagctatagatactgttttatgagttacatttgatatatgttggccagttctgccattttaaggtttgattcttatttcctgcctcagacctgctcttctgctttttttgtacttactctaataggtatttaggagtagtgggcagaaaatagagctttctaagctcttgccgtctggttagtttaactgaagaggagctcttaaaaaacatgcccaggtcttctgtattgctcccccaccccttccccctttatttgattttatttttgacatggagtctcactctgtcactcaggcaggagtgcagctttatcaagtatatgataaagcaaaagcacattgatgatggcatatcaccttctgagtttgaaaatgtttgtttacctttgatttctaatggattaagagtgttgctcttgttttttggaaatgctgtttattaggtcctagtactgccacatgctcaatgagaaactttttaacttctgttttccaggaaacccattgttctgtgtattagactgtaatagatattaccttgtgacttgacactgctgaatagaatgttttgagatgtttcatcaaaactttacaccaaggacgattttaggattttattttatagctgaggaaactgagggccggagtgcttagattagttaagtggcaaagactccaccctacattaacttagccttattgcttttcctttgaaaagggtagaggaagttacttgtttttctatgtgtgtgtgtatgtaattatatattaatgtgaacacacactgtttgtgtgtatgtatgtttgtgtatatatgtaattataaatatgaatacactgtgtttgtgtatatgtaaacaggtacgtgtgtgtgtgtgtatatatataaatagatatatgtgaaatcattaaaagagtgtttattcagcaagatttgggggcgtctgctgcctgtcagttctagtcttgggtgtctggtggtggtgtttggttcatgaaaaagagacagttacaggacagtgtgacaagtacagtgaaaagggaaagttcaggattcttcactagaagcaccagttcagtcttgggcaggggaaaagcttacctgaagaagtgttgaaaatgagaatagggattgtgaatgaaaaggaggtaggctgagagaggctggtgggagagctgtaggatgtaggacgtaggacaaggtgttaagaactggaagagctccctaggcagaaggaacagcacatgtggagaccgtgagagactgctgtgtatttgaggaactaaaagaagcccagaatgcttagactgatgartacatagagtttcaaatcagttgaataatgttcttgtagaaaaggataccttgttaattatcttcaataatgactttggtcatatcatgatcaagtaaataagatgtgctaggccataaattggccataactggttaatgtagttggttaggcttagagtaatggaaccaatgcactaaggagtgtgaattccattttccatgtaggcaagttgcttgattttgtggctacaaagaatgtacttcacctctctccagccaagttgttggtgtttgccattgttaatgaggatgatcaagcttgaatggatgattcagttcaaatgcctcactgttattgggaaaaaaactgcagatcttttggagaaaccagtagaatcacggagctgaataaaagacaatgtgtttttctatctaagaggtgaaaaagtctatgatattaactgtggtaaagactaaagtttcataagtgctaaaacaaaatgacggtatacttgcctctgggttatggttgattacttttgatatttcttgatatgattttgtattttatatacttctgtatatgagtatatattattttaataatagaaaaagaataaattctggccggatgcggtggctcgcgcctgtaaccccagcactttgggaggccaaggcggacagatgatgaggtcaggagttaagagaccagcctgaccaaaatggtgaaaccctgtctctactaaaaatacaaaaattagctgggcgtggtggtgtgcgaatgtaatcccagctactcaggaagctgaggcaggagaatggcttgaacccgggaggcagaggttgcagtgagccgactgtgccactgcactccagcctgggcgagggcgagagtccgtctcaagaaaaagaaaaagaataaatttctaggaaagtgttttagcttatttaactattcacctaaaataagaacgtgaaaatcattgaataaagaatagtaatttagtttcacctaaaatattttttcctctagaaactttttattgttattttttaagacagagtcttgctctgttgcccaggctggagtgcagtggcaggatcttggctcactgcaaccaccgtctccctggttcaagcaattcttgtgcctcagcctccagagcagctgggactccaggcgtgtgccaccatgctcggctaatttttgtgtttttagtagagatggagtttcaccatgctggccaggctggtctcgaactcctggcctcaagtgatccgccttcctcagcctctcaaagtgctgggattacaggcatgagccaccatgcctggctctagaaacttcttaaaagaaactttgctctgtccccctgactggggtgcagtggcgtgatctcagctcattgcaacctccacctcccaggttcaagcgattctcctgcctcagcctcctgagtagctgggactactggcgtgtgctaccatgcgtggctaattttttgtatttttagtagagacggggtttcaccatgttggccacgctggtctcgaactcttgacctcgtgatccgcccatcttggcctcccaaagtgctgggattactagtgtgaaccaccgcctgttgtttccgtttttacattcagaattaactttgggagaagacaacttgtaaaaaaattggagtaaaatttaagccctttttttcccctagtaaattgaccagaattttcatcataacttaaatataaatgaagattcccataagkcatttaaaaaaaattgacttaaagtttcattcattcattgttagtcaacaaataatttactgagggcttgttttgggccagacacttggactacatcagtcaggaaaacaggcaaaaatgtctgcccctgtggagttcacattctagtgacaagatgttgcatgaaacacttttgaaatatgtagcgtttaatyttcatacattttatctatttgaaatgtcttattaaaaattgtaatcagttgaaaatgatgggaaagcccattgaactactattctttgtagtatctttargtgatttattacacattcttatctttggtgcagtgctactctttaaacttgccttccttcagtttgtgcttgtgagtgtcatctgggagagctgtggggagacctctgataacaggctcattgttgcctttgcatccctagtgcctgaggtacattagcatatatctatattaaattaatttgaacttcaaaactaagcagaatcctgtctttttataaaaactagttcttgtcactatattctgatctttaggataaagaatgaatcaagcattggaagtttttgttttttgttttttgttttttttttttttggtatctaatagtcctgataacattgaaagagagcacattataactttacctttttttttttcctgtattttctttaggaggctttccttaagtggagattcttgactgggaggtgtgtgtgtgtgtttgtgtagctttagtgagatttttatttttgttttttccagtattctattgtaaacattttcaaatatgcagaagaattgaaagaatgaacaatgaattatctggataaccttttagaaggtagatagtaccttctagattcagtaaattttttttaagtgaaagcaagtttattaaaaaggtaaaggaatggagaatggctactccataggcagagcagtccccaaaggctgctgattactaatttttatggttatttcttgattatatgctaaacaatagcatataccctagtaaataatacacctgacaggccaactctcaacaatcacactggtaacatatactgatagaatgttattttttgatcttaataatagggattattcatgagtttttctgggaagggggtaggcaattactaggaactgagggttcctcccctttttagaccatatagggtaacttcctgacgttgccatggtatttgtaaactgtcatggcactgttgggagtatagcagtgaggattaccagaggtcacttacattgctctctcgattttggtgggttttagctggcttctttactgctacctgttttatcagcaaggtctttatgacctgtatcttgtgctgaccttctatctcatcctgtgacttagaatgcctaactgtctgggaacacgacctagtaggtctcagccttactttaaccagcgtctacaattcaggatggatttgctgtggtttgaatgcttctgacatatttcccccctcccttttataagaaaacatttaatcctaaggattgtagatggaggaggatgtatcttctgtaacttcttggctgagtaagggtgatgatattcctgcctaacttactaagattttgctatatttgcaaaatatgtgtgtatataaataactttgaactatttgaaagttgcagtcattgtaatacttcatttttaaatgcatgtgcttgtatcktctaagtatgaacctttttctatatagccactttaccattatcacactttataggaaattaacaaaaattccctaatatcatccaatactcagtgtatattcatttttctccacctgtcctcaaaatgtctgtgtataatagtgggaatttttaaaccagagttcagtcaaagttcacatgctgcatttggtttcatttgaattttatcgtggagtaatttttacaaacatatttgtggtttttccaagggctacatgtaatcatttgatgttgacattctatgttaaagcacaattgtcactttcagttttcttttctttgagacaggttcttgctctgctgcccaggatggagtgcagtggcaccatcactgtacgctgcagcatcaacctcccaggctgaagagattctcccwctttggcctctgaagtagaggtggggtctcactatggtgcctaggctgatcttaaactcttgggctctagggattctcccgcctcggcctcccaaattgttgggattacaggggtgagccaccacacccagcctcgatattcrttgtcttttaattggtctgtgtatatgtttctttgtttctcactgacgtgtatgtacgttttgttgaatttctcaacattgctttccctagacctcatgaagtcttgtaccttttgcaagattcgcaacttcattttgcagatattttgcgttggactacatggtattgtcagattaacatcctatgactagcagtggcttagcttcaaaagatgtggaagcaataggccagtttgtgcacttgttaaatttacagggatgttyggagaccatttttccaagagattaatggttggtgagggttttggctttgtcaacttttgtttccttatgcactctcctgactgcagggatgaggaaataacattctatcagtatacattaccgggtgtgattgttgagagttggcctgtcagttgtatatataaaagtgtggctttttttttttttttttttgagacagagtctcgctgttgccgaggctggagtgcagtggcacgatctcagctcggccttccgagtagctgggattacaggtgcctgccaccacgctaggctaatttttgtatttttagtagagatggggtttcaccattttggccagttggtcttgaactcctgacctcaagtgatctgcccaccttagtttcccaaagtactgggattacaggcgtgagccaccatgcctggcccaaagtgttgcttcttgatgctacgtaaggattggcttttattttgagcaaacatgtactattcagatgagcctatggttaaatagatttgtaaataagtatttgaaataaatgttgaaggaagttcatagatgtaaattaatagaaagtttttttgttttttaaaaaataatccttcttggctgggcgtggtggctcacgcctgtaatcccaacactttgggaggccgaggcgggcagatcatgaggtcaggagatcgagaccatcctggctaacacggtgaaaccctgtctctactaaaaatacaaaaaattagccaggtgtggtggcgggcacctgtagtcccagctacttgggaggctgaggcaggagaatggcgtgaacccaggaggcagagcttgcagtgagctgagattgtgccactgcactccagcctgagcgacagaggagactctgtctcaaaaaaaaaaaaaaatccttaatattaataggaagaaaatttgttttttaaatgtagtgcagtaaaaggaagatggtaaggaagatagtaaagatgaagcataaatgagtctttagtcatataccaatggagccagggcccaagaaaatgttgaggttctttctttgttcatcatcctgattttttattgctgggcagtaaaccaacccaaacttaatgggtraaacaacaatcatatattattattatctcttctgggaattgacagtacttggtaggtggttcttactctatgtttctcatgtagttgcagtcaaatgctggagtcatgtagagggtgtcttcatttaaagactcaaaacaactggggtctgcaacagctgggattccttaggcatctctatctgtgtagtctctttatcatggagacttcgattagccagagtccttaatatggtagctcagagtttcaaaggcatgcatcccaagaaataaaaccaggctggaattcctttttgtgacctagccttagaagttttgcagcgtcacttctgcctcattacctttgcaagaagcaagtcatcaggctagcttatatatgaggaagagtaattagactctacctcttgatggaagaagtataaaataatttatagatttcttttaaaccactgtgatcgttaagaatagtgataatagtaaagcataattatttagaaagagatttgggtactatgaatgttttagaaaagactgataccatgtatttgaaaacaaattataaggacttaacatttatggcattggacagaataatacatattatggaagtgtaactactaacgaacaatttcctgagataattattgaactcgacagttggtttaacaccacagaggcccccttaaaagcatctaggtcagaatcacaaggcaagtcaatataaatgtgtttctttgacgtcactagtattacttacagtcagttgattgattaggtgcattgtttaggaaatgtgaaatatttgatgtattctgagacttaaagattgaaatgtgagctagcgattagttctttactatgactctgctcagactcagggtgtattttctatgaaatagtattttgtaaaacctactcaggatcgttttgtagtctattataagcgtgatgattgggtgttcatatgcatatgtgagatgtgccaccctcaaatcttgttatgacgtcatcagcacgttactcttctgatacgaaaaaaagaagaaccactcggcttcatcatccgtttaattagtaagctttaggactgaatgttttctattttcagagacatgtctgcactgaaatactactattgtgtgtattcatttaatagtttgcgtgcctactgtgtgtcaggcattgtactggggactgggtatgtagtggcattctaaagaaatcttaatgccacttccaaaaggaaaactccaaaaatcttttgggtgtggggcattattgttgaaataaatgtgtagcttgccagtatgattaatacgaagaagacacatctgtttgcatgtaaagtttattggaaatagggcttattatttcatagctgtgcctaagagagtattttgatattatttgtggtcagttttcaaggggttattagtcatatgtgccatttttcttgggtattttgcagtttttattgaatatgtgatgaacttgcaggatcttttgtgtgaatgtgaaaaagagcgtgtgttttacacatgttttatacatcacatattttgtttctaatcaaaagaggccttatatctgaaagccttcttgttactcataagacaaggatgtgagactagacagtttttaagggtctgcctaggtctaacagaggggaaggaataagttctggatgggaaagttggtagaaatgttagcgaagtgtcaaattaagtagaattagtttttagattttcttgaagccaagacaaaaacaatggctaaaaaattacaaagctcagtgtatcacagaggagcttttccttccttccttccttccttccttccttccttccttccttccttccttccttccatttttttttttttttttttttttttgacagagtctcactctgttgcctgggctggagtgccgtggtgtgacctctgcttcccaggctcaagggattctcatgcctcagcctcttgagtagctgggattacaggtgcatgctaccacgcctggctaatttttgtgtttttagtagaggtgaggtttcgggttttactgtgttgcccagactgatctcgaactcgtgggctcaagtgatccatctgcttcggcctcccaaagtgctgggattacaggcatgagccaccacccctgaccaggaactttttgttaatcatggtttgatataaatgttggagaatcttttacattagagatattttaaaaacctaatggactgtgagttttataatcgatacagaagttttatttatgtgattatgtgaaatgctgatagaaactgacattatagtaaattattgttttgtggaggtctccctttggagactgaggaatgtaagtttctgggctagaattatataatatttagaggctgattaggtaaatcatgaggtttgcacattttaagtgttatatttagcattgttactacgcatgaagcactgtgttttccaaacattgttttatttaacatcctgacaatgttgttggggaagcaatttgagttgaaggaggtactgtggttcccttgctgtacagctgtgtagtggtgggtccctgagtacaggtctttttttttttttttttgagacggagtcttgctctgtcacccagctggagtgcagtggcgtgatatcggctcactgcaaacttcgcctcctgggttcaagcagttctcctgcctcagcctcctgagtagctgggactacaggtgcccgccaccacaccaggctaatttttgtatttttagtagagacagggtttcaccatattggccaggctggtctcaaactcctgaccttgtgatccgcctgcctcggcctcccaaagtgctgggattacaggcatgagccaccgcgcccggcctatatgaactaaagttttaaatatttgtagataaaaacagaatgtcatagtaaaggactgtgctccagcctttaaaaacagtacattaactgttaccttttgtctacgttaattttttaaaaaactgtattaaaattttaacctgttggcagaggacaggttcactatcatgtatcttttcttcccttttgcatggggtttgatggaggagaggagactatgtataaagtgacagtctccgtgctcatttttctttttttctttttttgagatggagtcttgctctgtcgccctggctggagtgcagtgctgtgatcgactaactgcaacctttgcctcctggggtcaaacgattctcctgcctcagcctcccaggtagttaggattacaggcgtgcatcaccacacccagctaatttttgtgtttttagtagagacggggtttcatcatattggccaggctggtctcaagctcctgacctcaggtgatccacccgccttggcctcccagagtgtagggattacaggcgtgagtcactgcacctggtctccatttgaatattgaaacagggaccactgttcatttttgaagccagtatgccattacctatttatgaagctcttgcttctccatccttacatgctagggtgtgagatggtggactatgcacatcatattagaatcatatcattaccatagtgacactgaattktttctatcttttatgtgtttgggtgagaaagtttgtgaacagttaactagtctgtggttttgtgtaagattctagtatctttagtcaatccacacagtacctactttgtacaaaatgcctggatgtgcaaaaaattacaggccttacttatccttaagggtaagcttactatatagttgggaaaatagaaatgtaaaaggtagaatagcagtatcagagatgacacttcaaagcagtaagtgattaattggaaaattgaatgggattagctgggtgcagtagcttgttcctgtagtcccagctactagggaaggctgaggtggaaggatcactggaacccaggagtttgagagtttgaggctgtagtgcatcatgatcgtgtctgtgaatagccactacactccagactgggcaacacagtgagacctgtctcaaaaaaaaaaaaaaaacagagtcaagaaattctggaagaggtcaaaagaggaagtgcttactggactgtggtaccttaattatactttttgtaggtatttttgataggtcacttgggtgggatagaggtaattctaaatgtaatttggagaagttgagataaccaggaatttgatagattccatgcttcacattatttttacagtaagtatgaaatacagaacaatttatacatgaacttcagttatgtccaggtattgagttagttatgagatctattttgaatgtctttcagtgcttattttttattggggtgtaatgatagatacttggattcacctttgatctcttcatccaaagtggtactgattataagtagtagcagttgtaataacagcatttctgcatccccaaattcctttttacgcgtctcatttaacagtttttctttcagtcagaaatggtgatggaagaaacagcaggagcagctaacattttgtactaggctctgtactaagcatattatgtgctgtaataccctgttgatgccaatgtcttaagtaaaccttgccatcattcaaatgaatttctgtttcaaattattttttggtatgtgttgagggactcagtaaccctttgttggtatttcagattaaagctcttgatttagtttaaaggtcaggcctttaggtcttgattgttatggttagagtttttcttgcttgtctggtcaagccaataacttgagaaactagtaagagagtttagagaagtaaggtcaaggcccttttagacttgctggtttcaggtggaacttggaactcctttgcagctcagcagagctcttttggtttttaaagagacttgtccctaaatttgtgtgtgtgtgttttattttggtctttgctctgttccttgctcttcttcgcctcaagctcctctcttccacctgcccaccaagtagctgtgactataggcatgtaccaccatgcccagctaatttttaaattttttgtagagacggggtctcattatgttgcccacattagtctcaaactcatggactctgtgttcctcctgccttggcctccctgagtgctgggattacaggcgtaagccatcatgcccagccacagttcagatctttagggcactcctgaagatttctgttaatgtatactaacctttaaaatattgaaagatgattaaaattgcccatatacattttaaacacaaataatacctttaatattctatcacctttgaagaaaagatgagaatcattgctgtaaagttagttggactagtgagctcttcatccaaaaaggcaggattgatttttttgtgtttgtttttttcggttaactgtttcagtgacattttaaggaattttggatctattttgattgtttagaaagttctgtgtcgttttcaaaaaggcttgtccctactcttgttgatatgccatttttttggtttattaagatgaaagcaaatttattttttggctgtacattgtattggctagatatatgatttctggttgggaataatttttcctcaaaattttgaaggcattacatcattgtttcatagcttccagtatcccttttgaggagttcagtgctgttttgattctttctgcttgacatctccctaaccctatgccttatgaactcatgccctgagatattttagggtctycctttagtcccttgtgttgagaaatttcacactgatgtaccttgatgtaggtcctttactcattcattgtattttgggtccaaatatttcatgggtccttttattctggaagctcgtgtcattcaggaagtttttcttgttatttctttaatacttttccctccccatccattttatcatttttctctttttggaattcctggtggttggatgtatgacaacttcatagctactgtgattttcttttctgccctgttttccatgagaccaacttcttaaaaaatattctgttaaatatatatatttttcttgttgggctggtttccccaaagaggaatcctggcaggtaagagcgtggctgtaagcattctgggatgggggctgattactgatttcagcagacagctttcactttttcttctggtctctgacaccccttctccctcccacgccgattctgggtgtattcccaggctattagtactctggctgaattttgctaagtaggaaatgtttagcctctggaaggggagcagtctcctgtctagagggtggggagctaggggtttaactaatgctaatttccttatgctaatttccttatgctaatttccaacagttcctgttttgcgttaccctcaggcttcagaggaatgtgatgcctccaattcctaaaaattgacctgttcattttcggcttcctcctaccacgtagggtttaggttgaaaagttttctcttgtcgtgaactcactggccacttgtctgtcggctttccagcttccaaaatttgttgaatgcactagcctcgtctttctctttgtccctgtaactttaaaattaatttgtttttcaaaatttttcatcttagtggaattgcaggaggtatttgagatacacatacacttaactagaagttacatgcaggaaaattattcctgttttctctgaatacacaacttctccatacccagtgtgtgtgtctctgtgtgtgtgtgtgtgtgtgtgtgtgtgtgtgtgtgttttaatgtgattttctctttagcacacacacttttctcataatctctgctcatgtatctgtggttcttggctgtggtcctgtttgctctcaaggagagacttaaagcctgcttttgtctttgcaataactctacattttcctcctgaaaatgagtatcccaggatatgcacatttaactaacttatcaaagtgcactcaagccttactcaagatttaattttgcgaggcttctgttgatcttcaggctttaaaaaaattattctaaagtcactgtaatcagggtttgtgttttctttttgtgtgtgtctctctctacccttgtgttatatttccttttttgaaatgtttttctacttactttgctttcacaagtagattataaactacttgagatgtatggatttgaatcagtggttctcagctttccttttttcctgaagtttaggcttcctgatgggtaggttacactgtattctgtaactgtggcccactattaagggtggtattcccgagtatgtagagacgccccctccacaggtgattctgttggtctcctctccctgacctcctcccatgctgtattttacagttcattttatttcttgtaaaaccttatactgtgggaattcaggaagtatttgttaattgaattggacccgtggcaggtgtggcatgatggcaaggatagagggaaggttttgtctcatgccttctttcccactttcctcttaactgagtaactacaagtaaatcacttcacctctgtagtcacttgttttctcaaatgtaaaacaaggaaactgttataccaaagactcactattaaatggaaatatctgtatgtttctttttcctgagatcaaaaaagttaagaaatattgaactgtacaattctttgctgtggtgccattttctaagaaaatcttcacagtccatgattagtgagaaaaagcttttattttagattgccttttttcttttttgacttttttaaatttaaaaaccatcttttcttaaatgttagtaatagtagttgttcttttctgaatctcatttgaaaaaatgaaaagttggtaaaattatatttgttcttataatttgaaggaagtttcacttatctgttaaattcagaagtcagagatacatgctttataccttaaaaaaaaaatctgtgactcctcactttggaggtaggtttctgtatattcgttagagaaaggttattaatgttctttgtcagtgtttctgccttttactgataattttgtctgcttgaactgtcagtatctgatagaagtggwtatggcttctcatcttgaattgtgatccccataatccccacatgtcaagggagggacacgatgggaggtgattggatcatgggggtggtttcccccatgctgctgttcttgtgatagtgagttctcatgagatctgatggttttgtttgttcgtttgagacaaggtcctgctctgtcacccaggcagagtggtgcagtggtggggtctcagctgattgcaaactctgcctcctgggctcaagtgattctcatgcctcagccttcctagtagctgggattataggcgcacaccaccatgtctggctgatttttgtatttttcatagaaacggggtttcaccatgttgaccaggctggtcttgaactcctggcctcaagtgataacacctgccttggcctcccaaagtgctcagattacaggcatgagccaccatgcctggtcgagagctgattggtttataaggcagttttccctgttctcgtttgctttctctctccagctgcaatggaagacttgtctcttccccttctgccataattgtaagtttcctgaggcttccccagccatgtggaactatgaatgaattaaacctcttttctttataaattacccagcatcgggtatgtctttatagcagtgtgaaaacagactaatacagaagtatatgttaactttctctgctgagcatgttggtgcttgcctgtagtcccagctacttgggrggctgaggtggaaggatcatttaagaccagcctgggcaacatagggaratcctatgtccaaaaaaaaaaaaaaaaaaaaagcatgttaaatttttcatcagagttgacagcttctcaaatggtcagtttttgttatatacattgttgaggctgtgtgttagaaactttcagattcatgaacattattcaatgttctttgtagtttgttccttttattgtaatatagtctctatccctattaatgctttttcgctactgatacctgacttttttccccttaatctttgacttgtaatatgtgagattaatctatttgaataagtagacttatttctgctctctgaattttatattttctgatccatttactttgctgtgtgtgtgttttgtttttgtttttgttttttttttttttttgagtctagctttgttgcccaggctggagttgcacgatcttggttccctgcagtctcagcctcccaggttcaagtgattgtcctgtgtcaatctcccgagtagctgggactacaggcgtgtaccaccatgtgtggctaatatttgtatttttagtatggatggggttttaccatgttggtcaggctggtctcgaactcctgacctcaagtgatgtgcctgccttggcctcccaaagtgctgggattacaggcctgagccaccgcgcccggcctctttgctgtttttttcctcttctgttagatggttagttttctgcactcctttttttccctccctcttgattcgaaagtcatagactatatttccattattttaatggttactgttaaaattttcagttacgaagttttctactaaaaatgtgggcctaactggcttctaggatgaacccagctctggcacccagtctcttttactctgtttttcttgtgtggagatactcatcttgtatctcatctcagctttgtcttttggttttctcttttttacagttgcctttcatagctacatatttagagtaggagaagtcttcctcagggtgaactcaatgcatcatctctacttcagccattctttcactctactggtttgcatatctgcacataatattcagtaaatacttgttaagaagtgtttcttatatttttttcctttttgttttagttttactcacttttttcagcttttgatggaaaggagagaaagtggagataacaggaccaaccacatctgtagaatggtttttacactgactgtcgacaatcagggttggtggagtggtcagggtaagaaggaggtatagagaatttagtctgggacaaaggaactgtatggtccaagtgtgaattgacacttattatgacaatattatggcaatattatttattgataatattctaataagactgcctccattttgttaggtttgttttctgtttttatacacaccgaagtattaaatagatgccagttatttttgtagaaaacaggagggctacactgctgtattgtagctatgatgatggcraccgcgttttacaaacatttgtgttctcctaacatagtgattaattactaggacaggtttgagatggtggcagttacaaagagcatctggctggagatgagtttagtgttcgcatatacccctactcactcctccaccatcttcccctttcagaaaccgagagaggaggtagctgatgataccaataaacttgttatgctttgagatgtatctctgtaactagcaagtgatttccaggcatttttaaaaaaaaaaaaaagcacggcaaaaaaggcagcagtattggggaagataattagggactggaaggtaggcagctcttcttcatagtctttcccaagattagctctcttactgtcatatccatgcactatctaaaaggccaagttgtcccccaccgctacccctaacccccctgtatctactgggagaagatgagagtgggcgttgagatggggtgagatgttacttggtcagtaatattagtctgtaaactaaaatattaggctgtaaactaagtcagtaaactaaaatattagtctggaaccgcttgttgagtctgttgagtcagcgtacattgagttattaggttggtgcaaaagtaattgcggttcttgcaatttttttttttttttttttcctccttttttcaagaccaagtttcactcttgtcacccaggctggagtgcagtggcgcgatcttggctcactgcaacctccgcctcctgagttcaagtgattttcctgcctcagcctccctggtagctgggattacaggcgtgcgccaccacacccggctaatttttgtatttttagtagagacgggatttcaccatgttggcccggctggtctggaacttctgacctcaagtgatccacccacctsggcctcccaaagtggtgggattacaggtgtgagccaccgcacccgacctggttcttgcaattttaatggcaaaactgcaattacttttgtaccaacctaatatttattataagacaaagaactggaagcattttctggtggatccttgaagactaaaaccaagcctttattgtggtagttgtgataccacacagagaggaatcatttatgttaatttgtgctccatagtgacaaaacacaatgatagagtccttaaatttggctatggcagttttttttaattttgatgacatttgtttgactgctttggtttagatagttgaaggaagggtttctagattagagacccattagagtgcattgaagtaggtgcagacttcaaagagccatttgatatagcctttagacccattctgattatgcagatctgtaggttttcagtaaaaaatgaggttgtcaagtggtttgattgtacagctcacttgattagtctggcttaatgggaataaagatgcccagcagggtctgcttatattggagaaggaaaaacaatactgaaatctattgctgtctcctaaaacaaggcgcttttgaatcataaagatcttttattttcacacttaaaggaataaaaatgcctactgccatatttgggttgaaaacatttatttgggctgtaggtattttaccttttttttttgtgagataagagtctcgctttgttgcccaggctgaagtgcagtggcgcgatctctgctcgctgcgacctctgcctcctgggttccagcgattcttctgccttagcctcctgagtagctgggactataggcgcgtccaacaatgcccggctaatttttgtatttttaatagagacaggatttcaccatgttggccagcatggcctcaatctcctgacctcatgatccacctgcctcagcctcccaaagtgctgggattacaggcgtgagccaccacgcctggccagtattgtacattttttaacgatatgattttaggcacagtggattattatgctctttaaaaaatcctttcagttgattaaacaataaggaaattgggaaaccatttttagacgaagagaaaagacaggaaaagcagtttgtcactgttgagctstgccttttggaggaggtttctatgttctagatacactctcttgggttctagggtagagatgactaagacttgctctacttcaggaaccttagctctcaaaccagtgtcctctggttccccaagatcttactagcgagtgttccatgttcagcttcaacttgggaagcataagattaagcataaacaggccttttcattgtagggcttattggaggcttaatggaggtgtatgaattgtgaatttctaagagggggctgtcctaagcaacagtctccaaacttgaaatagtatgcttacttactgcctccctaaacagacccctacttttgtgaatattttaatccttgtgtgtatttatggtgttttagagtgagtagtgagttccaaacctagttgagccatcagaattactgtggatgcatagacatttttttaaaaaaattttaagttggtaatatgttcatgtggtctaaaaataaaaagttgtgcccgtaatcccagcactttgggaagcctaggcgggcagatcacgaggtcaggagttcgagaccagcctggccaacatagtgaaaccctgtctctactaaaaatacaaaaaaattagccaggtgtggtagcgggcgcctgtaatcctagctacttgggaggctgaggcaggagaattgcttgaacctgggaggtggaattgcagtgagctgagattgcaccactgcactccagcctgggcaacattgcgagactccgtctcaaaaaataaaaataaataaataaataattgtaaattggcatacagtgaaaagcctccctccctcttctgtttcctggccttctacttcccttcctcataggtgattggtattattccttccagagatatttcatgcatataccaatatttatttagccagaatataagttattgagccttgtatttagagatttctgatttagtaggtttaaatggggcctaagaatatgtctttttaattgttccccagggatttcgatgatgagccatatttaggcactcttattttagagagtacacattacttttgcatgtgatgttacctatttcttaaaacaactttgtgaaacagataaatttttgacagaagtgggaacatgagagcaagagatgttaaatgaggtatccaaggttacacggtgtcagagctgggagtcaaaacccagggcttttgattgactcggtaggaccagtctggcactaattttgccttttcatgaaagctacaatgttgatgattgcccaaaccaaagaaacaatttaatgtgtatgtttatatccaattattcctattctggtaagcattaggtgttagaatattttattgtattacttgccattggaagacctccagtgatcggacttcctataattttcatgttaaggcacttcaccagttagattcctgttaccaatgtaaggcgcttagacagccaggctctgcactataataggcttttatctgtaattttgcttcctgataagctctccttcccccttgctattgcttccagcttccttttggtccctgtagcacatttccctaacaccagcccagatacaaaccgcaggggagggagagggagaggagaaagaagattgtcttcttaggcaagaggactgggagagtatcccacaactatgaagtattgagtaactttcctgtttgtctggtaaactctttctggggctaattctcagagtttcagaaattcctcatactcttatagcaccatttgaattataatgtagcctatgggggattattttgcaggacaacattcctttgttgtgttttataaaacctagtctgctaatattggtcacagcagaatgttttaaaatcacttttattttttattcattttatttttattttttgagacagagtctcactctgttgcccaagctagggtgccagggacacaatcttggctcactgcaacctctgcctcccaggttcaagtgattcttgtacctcagcctcccaagtagctgggatcactggtgtgcaccaccacccctgactaatttttgtatttttagtggagatggggttttgccatgttacccaggctgttctcgaattcctggcctcaagtgatctgtctgccttggtctcccaaagtgctgggattgcaggtgtgagccaccgtgcccggccaaaaattactttttaaacgtttaaacattttaaaagaaagactttttaaaaagtcgcaaatccaccattttgagacagtgtagggcttagagctaagacatgaatgtccgtttgttaagctcccccatccatataaataagcatttactatgtgtcaggtattgggaattttgaaattaataaaacatagttcttgccttaagagtttgtttggcagtgagggagacagatatttgattgtacaagtagtttgagtataagaactgctgttgggaaatatgtactaggtatattggaattcagagaaatgcctagtttagtctggagtgaagggtaaattaaggtttcccacagtttgtttcagtgtaggcctgagactagtagctatgtgtgcagaaggcagtagggatatagttattctgtcagtctgtctaatatctgtatgtcacctacctacctacgtacctgctttcttttttctgacagtgccattcagaagggatatggttattctaaggctgagggaatagttatgtaaacaaaaataaaagagtagtttgtgagtatgatttagttagggaattgtgtttggagtacaggctccttctggaagagagagatgcgattagagtgacggtagtgaccagaagaaaaaaaaacgctgaaataaaaactcgtgtataagaaacaaggagttacagtgtgttcacagatttctttttccaagaattcccagacttagctttcattccctggatcctcaagttcctagcagatcttaggaatcaaataaggccctatttagtttgagaaccacttcaagccagagcttggcagagttgaagtagcaatatagtgagctatccaaggatgaaaaatacatttcagtaatattgataaatggctgccatttattgaacacttaagtgcctgctctttccaaggtatattacaaaattatcttgaatccttacagcatcactgctagacaagtggtagttctatctgcatttaatagatgaagaaaccttccatgcctctgggatgttaaaataagctctaccaaagttccagagccagttcacagtagagatggaatcaaacccaggtttctgtgacactacagcgtactcttcacacctcaccaagctgcccctcacaagagagtaggtgtgatgcctggggctgatgaaatggcagcttaggacgtaaagtgaccatttcaaaggcagcaaaactgcgatttcatctttgacgttaataaaacggcaacaagaagccatctcagtaaatctcgtacaaagaaactctccagaatctaatggcatcaagatcctcgatcaggaatataaccccgattgtcttgtttctatagagaaatcagatttcatttcaggtattttatttcagtttacagttctttctcaaggactgaataacttaccaaatagcagtgtttatactatgaagtacatcagctatctcttgagatattttatttgtatgtagagttaaaattggatttgtagtaatttgaatacattatctgcatttgggagatgctttaaggaatgaagtcacaggtattcagaatgtggatggtctatggtgaagaaagcctagtatattctcttgaaattttggtcggatgctacacttttttggtcaggagccctgaagaagtctttcggtcttatctgctagcatagtttgattcttgtatgaatgtatatatagtcttactgttaaacaaatgaaattaggtaagacagaaggacttatgaaattattaagaataattagtgtataaaggccatatcttgaatcttttcttaccaaatttcttcttgtttggcatgtgcattctwttccttttcctgttkcgaacggagctgaaaataacgtgattgattttgctttaaaggtacatgactgggctgggtgcggtggctcacacctgtaatcccagctctcagggaggcaagaggtgggaggacagcttgagcccaggagttcgagagctgcctgggcaatatagcgagaccccgttctccacaaaaaggaaaaacaaaaacaaaaaaggaacatgactgattgtgtgtgtgtgtgtgtgtgtgtgtgtgtgtgtgttcagcatttcgtttttcagagatgtgtttatctttcaaatggccccagtagtttgggattttggtctccttttcacttaattaggaaaagtgttatttgtggtacaatataagaatttctaatcagagtatttttcaggttagaggaagaaattggttgtaggtatacattttaacagtttagctaatgaaatgaccatgaataatgtaatttttctctagtttgcagagcatttttctctgcaaactagagaaacatgaattttctgagtttaatagaaatctttttgacagtttcaactaaaactgataactaaggggaatagttagaagttcacattaaaaaagtttatatccctttatgaagttacaatatttatttagaaacttcattttcttctttgaatgcatcttgaaggtgaatgttcttatttagggtaacatgaatgcattatatataaactggcatttatcatcttcataagcattaataaaagtgtaagtcctccttacaaactatgattcaagaagccaacagatgaaacttacctcacaaaaaccatcttttgttttgtctttctgtgttttgttttgtcttttgtgtaatttggggtcatttaacccaagagtaaagtcagtcagatgtttgctacttggcacagatttatttgggtaggcagtaagtgagaaaagtgagaccactgatttagaaattgttgatgcaaatttaaataaaatgtggttaaggcttgtgactgagcattggttaacagggatcaatgtgcaagctgaaatctgaagtataagactgtgatcagattgcttttcaccaaagaaataaacttgtagcaattctttaattcttatatgtcaaacccggaggcctatagttgctaagctctgtgtccaggctggagtgcagtggggcgatcatagctcacttttacctcaaactcctggactcaagagatccttctgcctcagcctcctgagttgatgagattacaggcatgagccatcataaccagctgctacaccattttataatctgaacagattcaggggctgggtgcagtggctcacacctgtaatcccagcactttgggaggccgaggcagacagatcatgaggtcaggagttggagaccagcctagccaacaaggcgaaaccctgtctctactaaaaatacaagaattagtcaggcatggtcgtaggtgcctgtaattccagctactcaggaggctgaggcaggagaatcgcttgaaccagggacgcagaggttgcagtgagccgagatcgtgccattgcactccagcctgggygacagagcgagactccgtgactccgtctcaaaaaaaaaaaaacaaacaacccagaatcaggcatggacaaacagtgtactcaaagtacaggattagaccaatagatttttataacagtatgaaaaattcattgatrgggcgtcagatttaacattgtaactaatttttgaggaactatgacttgttgagttttgatgtagtatcagagaatatccaatgctggccatggtggaatgcgtccatagtctcagctactggggaggctgaggtgggaggatcatttgagtccaggagtttgaggcctgggcaacatagtaagaccttgtcttttttttttttttttttttttwaaaaaaaaggatatgcataatttaatgtggagaaaggagaactctcatatactgttggtgggaatgtaaattagtacagccattatggaaaacagtatggaggatgctcagaaaactaaaaaatagaaccaccatataatccaacagtcccactgctgggtatatgtccaaaagaattgaaatcagtatatttaagagatgtttatcgcagcactagtcacaatagccaagatagggaatcaaaacttaagtgtcccctcagcagatgactggttaaaaatktggtgtatatatacagtggaatactattcagccataaaaaataatgaaatcttgtcatttgcaacaacatggatgagccaggaggacattacattaagttaaataagccaggcacaggaagacaaaaactgcatgttctcattcatatgtgggagctatgatcccatatatcatcccatatatgatcccatatatcaaaagttgatctcatagaggtatagagtagaaagaatggtggttactaaaggctgggaaaggtagcggggaaggtaggatgaagacaggttggttaacgggtacaaaaatacagttaagaaggaataagttctagtgttcagtagcacagtatggtgactatagttatcaataatttgttgtatgtttccaaatagcttgaagagaagatctggaatgttcttatcacaaatgataaatgtttgaggtgaaatcccaattaccctgatttgattattaacacattgtatacatgtatacacattgtgtacatgtacatgttgtatgcatgcaccccataaatatatctatcagttaaaaagaatatccctgggaggctgaggtgggtggatcacctgagttcgggagttcgagaccagcctggccaacatggcgaaagcccgtctctactaaaaatacaaaaattagccaggcgtggtggcgtgtgcttgtaatctcagctacttaggaggctgaggcaggagaatcgctagaacccgggaggcggaggctgcagtgagttgagatcacaccattgcactccagcttgggccacagagggatactaaaaagaatatccataatttgagaagcatttaaaaggtatataagtaggaggttattttggttggcatttgtggctgttttagtaagaagaatgaattattactcattttccccccaatgtcgatttagtattggtcactttaatggcactgtgcatttagagtatggcagttctcggagtgtggtctgtggacctccaagagtcttacaggggctctgaggtcaaaactgtctttataataaaacggaggctttttcaccattttgacatctgtgctgtggtttaaaagcagtggtgggtaaaatactggctttttggcagaaatcaaagcagtggcaccaaactgtacaactaattgtcattgtattctttgcttttcttgtacttgtaggggaaaaagccagtttcacttcaaagtgtccttgatgaaacagtaggagttattaactgtattaaatctatacctttgagcataagatcgttttaaaacaagcccctttcttcatggaaaccatttttatttgagactgactgacaaataatggttattcagacttggatatttaacagacattttcttgaaaatgaacaagtaagcctgttaatttacagaaaacaatgaaggtatttgtttctggtgataaatttgaactttcaagcaaattttagaattttgggaaacttgtacccattactgtgagtttgacactgtagattgatagtaacattagcaaatgtgatttttgagtatctgtgtcagtcaataaatcagtgttttccaaatgaccagtgtatcctggtccagatgacaaaatcatacttgagttattcaaagttcattaataggtttcagatttccacattgctctcaacctttaagaaatcacttgctgagttttggtataatatcaaagaataatacctgtggttatctggaaaggatattaaaatgtacctcacttttccgtaacttttctatctagggccagcttttcttcatatacttcatataccaaaacaatatattgtgatagataaaggcagaagcagatcagagaaatctagtttatatgaagcttgataataaagaggtttgcaaaaatgtaaaacagccccccttgtcaaatatttttgggaaaattttttataggtaggtaatttatgtcaatatttagttagtttatttttaaaatattcacaaattttattggttaactttagtgttatcaacagatgtaacccacataaacaaaagatttttggggtcttcagtagtttttaagagtataaggtggtcttgagatttaacaagtttgagaatcaaaccttgtaagaggtgaagaaaggaagctgctgaggcaactgtgttaaataatattatatgcattttctaccacaaccaaaggttctgatttactttcagagaaaaccctcctaggctgggcatgatggctgacaccagtaataccaggtctttggcagcccaaggcagacgggatcatttgaagccaggagtttgagaccagcctgtgcaacacagcaagacacctcccccctaccctcacccaccccactcgtctctacaaaaaataaaaattagcctggtgtggtgacatgtgcttgtaatcccacctactcaggaggtgaggcaggaggatctcttgaacccaggagtttgaggctgcagtgagctatgcttacaccactgcaccaccactctgtctgggtgacagagcaggactgtgccccttggaaaaaaaaaaaagaaaacagaaaaccctcctataaagagctagaaagaaatgaacatatatggtctttgctttcttgaagcctaaattcttttgttcctggtaacatttttagttcctgtttggccatcacaacagtcttactcattggttcctcattgttaaactcttaagtttcctgtggtcaactgtgagatgaaaaaaattaaggacaaaatggggagttttaaatatagctaattttgtgtttatttattgcaagattatggccttactggcattttttgatgtgaaaatgtagtgatttttttttctgtgtgtgttgtcaaaataattatattacatctctcattttcctaccttcaccatgaaatcccaaagttggagtaccgaagatcagggttaaattcagatacaagcattaaaaaatggatttttaaaaatgtgtctgaaaattgagtgtctaattcaactttcaggcatataatgagcaagtttttcatacacagatgaagagactcatttctaacgggttggtgcttcttgcttgggctgaggcaaacagaaggctggtgtgactctttatgttagccccaaccccagtggagtgtatatatttgtgtgagattgtggttcatctgggggaaaggatacttctaaggctataggaataatccttcctggctctttgtcattcccagcctcataggccaaggtagctcctaatgtttgtcgtaatacagagtgcatgggggaaaggcattgttcccttcacccagaaacaaatccatgatgcagcacaagccgaagactcagtttatataggaggtcttataacaaagatctccttaaaagggctcccctatgaacttgccttaggtggttcgccattggcttcctccaggactgtgtgaaaagggatttggggttgggataccctttgcattgaataaactagcccaggatctcagtttgctgggggcggggctggagtggggatgtgccttctagatgttggcaccagtaaatgatcatcagaaagggctcaaagtttatatagcctttttccctagctatagtggctggcaggtgggaccaccccacgtgatagtttgaatttattgatatcagtgataacgtgaaacagttggcatgagaagcagcgtttaagaagtgtcagtgtttgtggtatggtgcaagagttgtttaaaagaactgtgtaaaaattgaggactgactgcctgtttacttaagaaagtgcatgataatttaactgcggaccatgttctgtggttagagataggttgtctttttagaaaggtgcttgtctctaccatctatatagtacacaatagttgctccaaaaaaaaaaaaatggtataggcaagaccaccactccaagacttaggctttaagatttagatggtttgcctttggagaaatgccagaaatattcttacagtatttctttttctagcagaatttatctggtcacagattttttacatgtactgcatttttgttttggcaatacctgctttctccaacatggatgacaagaggtgaatttgaagactttttctacaggagtctgtgatttagtattgtaggtaaccttcattgactgtatctgttggttctttgcatgaattattaagccctttacttcaaaataaaattgtatggktatgtaaaagttttattccatgagtggatatccagagttggggtgaggtggggtcactttataggcagtttcctaatatgattattgagttacttagtgtttttttccttccatggtaagtgatcttttaagagttatatgggaaactatcttaaatctgtatattcacactgctcacgtatttaatttgagacggaagacctggagagttagtttttttgagattaagatcaggaacattttctgcctctgaaataagttacgtaccagtaatgtactttttttcgttgttggaactgtatccagaaaagcagaggggtaaggaaagacttggcaagttgtattctgtctttgcttagagtctgtgaagacagttcggatagaaacacaaatgactagatatgagagaatttgtagacttctrtaggaaggaaattacaactaccaggaaaggttcatggaggaggtggcatttgaactgggtgggaaataagtggaatgagactgaaggaactgcactggtggcagatgatgccacttttgccattaacgtgattgctgagagtcatgaaacatgagtggatgtaccttgtttaacagttccaagtatatggaaaccatcaccttgtagagtatgtgatgtcagaaatacctttctgtctttgagaattgaaacctttgaaggtttaattatacgtttttttttttgctttagaaattctgcaagaaaggatctgtcaggtttaatccagtttaggggtatttgaacatgcagatatgttatatgttagagttaggcagagaattatgaaaccgaagaacctgtacttagtgctgttgccagttgaggatcagtgagaagataaattacctttgaaattgtaatgttaaatttggggagaatgagactgaaattagaggggatttaaagtatagcaatgaaatatgttggcttctagcaagtaccgttacactgttttcctgtctctgttaattaacatcagtttgctgttaccttactttgttgctttaaacaaaaatttcagcctctagatctgtaaagtgatctatacatttaaaggaatgaaatagtttatttaatcagaatatagaataaatgtagcaaataggagtgtagagtacccaaggattgtcagaagctttttgctaacctattcattgtgtgttacaaccacctcaccaaagttcacctgtctacctatctatccttgaatgagattaaatgctattatgaggttattttctttgtgtttttttttttttagacggagtcttgctctgtcacctaggctggagcacggtggcgcgatctcggctcactgatcctggctctctgcctcccgggttcaagcgattctcctgcctcagcctcccgggtagctgggactacagaygtgcaccaccacacccggctaatttttgaatttttaatagaaacgaggcttagccatgttggtcaggcatgtcttgaactcctgacctcaggtgatccgcccacctcagcctcccaaagtgctgggattacaggcatgagccactgtgcctggccagtgaggttatattctaatgtcatgctgtattcttaaaattgtttttcatcataaccacgtgtaaaaatttattctgaaatggaatttggtgagcttcagtgtgagtttctttttattttaaagagagggtaaacttttgttaatactgcctatcgtaaacattgtatgaagatcctttaaagtaggtgaatctctgttgtatagaataattagcaaactaaaaaaacttcagttttttttttggctaaaggaggggaacagcatggataatttagcaaatttaaacgaatgttatcacaggcctgcagtgattctttgatttgcctgtctactgaggactctctaatgtaaaagataatcaaatacttcttaaatatagtttatttttttggggtgaagatttatttgttactgttatctggattcatataaactaatttgtagggcccagtttagtcataactctcttgagatttgaaaggatgatacattttgtgtaaatctgtggactgaatttaagagttttttaaaatttgatatttggggaagcaatctaaatgtctgtataaaatccatttgaaagtttcaaatgggtacgataaaaattgaatatgatagtgctatttcattgtaaacattacgtatatatcttccattgatacacttgcttttcatatattcataagcatttcaggactgaggctgggcactatgtcccatgcctgtaatcccagcactttgggaggccaagacaagtagatccgttgagcccaggagtttaagacmagcctgggcaacgtgctaaaacgctgtctctacaaaaaatacaaaaattagctgggtgagatggtgcgcacctgtagttctgtttactcaggaggctaaggcaggaagatagattgagcctgggggattgaggtggtagtgagccacgattggaccactgcactccagcctgggcgacagagtgagacccagtctcaaaagaggcaaaaaaacaaaaaataagaatttcaggaataagaattttcagaaccggagatgactaaaagagttcttcctcacatagatgagaacttgagacctagtggacttttagtgagtccaggtagtagtagatgagctgggagtaaaccccggatttcttgctattcggtggcattgtttccagtacaaattgatgtgcatttcagacatgtatttcagatgtggttaggggtctcaccaggacttttaagattagaaaatttaattgatagcagtaaccatttgtgctatctccccagatagcctgaaattcgctgttgagttcttgagtttaaatattttttagcattctcatatcctcgaagcttactttagttttacaaataattgtctggaatatttggagacgtggaaacaacatttaattcttaatctcaggcattgtccggttttgaaaaaggccttgacaattatttttctctcccaatgctatatattttgcgagagctctggagacaagttttgagctactaacaaaggaatggaaatgaatgagtttagttgcatgccagtgaacaagttatcttctgaaagtgtcactactgtggttactcatagtaaatgtggacccggggaagtgagagctcctgctgcttcttggggtcttctaaaggctgctgttactctgcagagcagacccacccttgtttatcttctccctattttctagtcagccttctcttagagctcatgggttccacaatacattacccttaaggtgttttatcttggaacacagaagtgtgctttgtaaatgggcaaactggaattctttgaaaaagcttaactttcttgaactaatgaaaacatgttttgttaatggaagtaaatgcaaaactgggctacaaaaatgaaaatgtatttttctgggggccaaatcacaaatgatcagatgctgttctttaggagtgagaataaggtcaccagtaagtatctacttcttcagagagaaataaaatatggccgcatttgaaagttacttcaggctgggcgtcatggctcacgcctgtaatcccagcgctttgggaggccaaggcaagtggatctattgaggtcaggagtttgagaccagcctggcccaaatggcgaaaccccatctatactgaattacaaaaattagccgggtgtggtggcgggtacctgtaattccagctactcgggaggctgaggcacgagaatcacttgaacccaggagatggaggttgtagtgagccgagatcgcaccattgcactccagctggggcaacagatcgagactcaaaaaaaaaaaaaagttatttcagttactgaatgcaattcaatattagacagttactgtacgcctttgaaagatgctgttcactaggatgatagaacttataggataaagttatagaacagctgactcctaattgaatctcttactgaaataattaggttattttctcttactgaaataattaggttagattatatatgctttgtggcagtttttaagccctaaactggctttaacgtcatttatttttggagtatgtataacatttttgtctgttagtacaaatgattgaaatttgattttattcatttttgtgactctttagagagcagaattcatggacttttctattgatttaatgttctgatttttcccattgctttctaaaattctcagtttacttttacaagaattatttctggaaaacggttttaaaagatcagatcaggcagtgttttttttgataacttaatagaattgcttaaaatctctgcatttgattatatctttacattgtaaaatgactttcttaggttgacaaaatacctagtttaatttagctattatagtgttttacattcaagactgttttcttaagagaaacaacaaaatcataacagaaaatacaagttaatatctctttgttatgtagccctttggggtttttctaaatctgttcagtactgttttaaatgctgttagaaatgggaggtgttatccttactttatatagataaggacattgatgatctggtttgttcaattttgtgctataagaccgttcaagaacttgagatgataccttaagtcaattaggctttctgttttcatttcatgatatccatgtgcactcaagaatctcttgacatggataacacagttttttgttttgttttgtttttttaaacaattgagcctttggttgggcattggttcagctaccaactttatgctaccttttctataaactctagaagcttcagttttctcacctgggattaatgggaaaatgggattaatacgattatcattgttactgaggttgcaaatggggtggtgagggaacggaattgcagagtctgcttgtgatcttttcgggacaaaaatgaaaatatgaaaaacattcttaccatagcagttgttttgtgtactactattggaaattaccaaaataatggtacaagtacctgtcagaagtatttgtttacaaaagatctgtacacgtggtttgttaatgttttgttttaaaggttacgagaagtttctgagaagctgaacaaatataatttaaacaggtaagagttttaaaatatttaaatcttctgacaacaatttttctttattaagaaaaaactcatttaggcggcagcctgatatgattaagattaatgtgattattagactttaagaatcttttaatctgtcaactttttatgggttgggcttatttgaattatagattgcattcatgcttttttttttttaaatctggcatacagggagatataaatgattatggagatattatttttcaattattgctttaaagtaaatattagtttaaaaaataggttttgccaactttttttttctaattgtatttaagagtaaaccctatgatgtatttaccattaaaaaataatttaactttttctttttttatctctcagccacccccctttgaatgtattggaacaggctactattaaacagtgtgtggtgggaccaaatcatgctgcctttcttcttgaggtaaattattcactctaagatacagaaatgaaaaataaactgttaaaayagaattgtgcatcattgtatctcttccattataacaggaaaacagcagttacttgaaagttatcttgaagagctcccagttctctttcctcctctggcccagagaaagcttacatgatttgccagagtgtgaaactaattagtaacagaataggggagtctcctaaatccagtcattttcttactttgaattttgtcagattgagatgttgtaaattattttcgactggtttcttgataatgttatgtatgtcatatttccccatctcaggtgtaagcaccttttggaaggaagtttatttatcgtcttctgaattgacagtgatgggcacagaatctctttgttgaataaattcaaattttaatacacatttttacttggataattttttctgttttctttgcttttaggatggtagagtttgcaggattggtttttcagtacagccagacagattggaattgggtaaacctgataataatgatgggtaagatattatgtcctttctatttaatatgtatttagctcttaggtattatattaaacctgtgttttgatttcggtaaccctcaacttaaagcatcacagaaaattagatcttttaaaacagtgaaactattgctttctagtttaattttaatctttatgcaagcgatgattcacagcccaaagtactaacattaaaagtagcagaggagtcagttatcacttaacagaaacaggttaccagaagaatgatattacgtgtttagtaggtaccaagtcaaatctgctctttaactgaaatgattttatagatcatttccaaattaagcaatgcaatttgaaataacagggttgtaaaaaatgttggtcttcaaaaatttacctcttgctttcccccaggtcaaagttgaacagcaactcgggggcagggaggacgtcaaggcctggtaggacaagcgactctccatggtttctctcaggttctgagactctaggcaggctggcaggcaacaccttagggtaagttgtggccagttgaaggcaccatcttacagatggtctgtatcatcttcctgtgagtgctctcagtctgaatgatcatcttcaatattctatctagtgatggagtgagaaaattctcctgaactctgggcaggaagttcatattgctcagggtgagccaccatgataaaaataactcacacaggctaattacaattaatctaggctcttgacctttaaaaaatgtatataatgtttacatatgtttataatgtcacgccatttatttcatttaaaattttaaatgattttatctttggtcctctcttacaacttattcttggtacaacttattctttgtactataacagcagagatgagtaattgggacagactagcctccaaagcataaacttatttatgatttggccctttacagtaaaagtctgctcatcccaggttttgcttgtcaatttatatactggcgtttgttcctgatcctatttatttatttctggcatccaactctggtagttctttctgaatcagtttaatgaagtttgtaaatgatgtaattaaacgttatttattacttttatttttttctagagatagggtcttgctgtgttgcccaggctggtcttgaactcctggcctcaagtgattctcctgctttggcctcccagagttttgggattacacktctgaggcattgcactcagacacttttatctaaagtttatatactgttaaactaaagaaaccatatacaaatttcaagtcaggtgcttttactcattttataccttgattcttgaatggccagattttctgaaaatacccagttaatgattagattatgctacttcagtcaccacgtgtttgaaggctgatcacagaaaactagaagcaatgtaactagtttcaaaatataattaaatggaggaggaagtgtttggcttttttccctccagaccacaaattggtaggtaaagtaaaagttagatttgaaaattgggcctgggtgtggtggcttacacctctcagcacgttgggaggccaaggtgagtggatctgttgagtcccagagtttaagaccagcctgggcaacatggcaaaatgccatttttactaaaaatacaaaaatgtagctgaatgtggtggcgcatgcctgtagtcctagctacccaggaggctgaggtgggaggatcatctaagcccaggaagttgaggctgcagtgagccatgataatgccactgtatgccatcctgggcaatggaaatgagagacccccgtctcaaaaaaaaaaaaaaaaaagaaaagaaaagggttgtgggggggataccaaaatgattactttctttgcgtttgtgttttcatgctgaactaaatttattttagaatgtgaggaaagtttttagttgagtacatcctttagctatactaaatatagctcttgtctttattaaaatgttatatgtgctcttttaatggtcctaggcacacagtatatgataaagaattctgaaaatagcatgtaataacatgaaattttatttcatgtgataaaactgaaaaatttttgattatatttaagaataagtattaccggttatactgttgccaaatagtacctttcttaaagatgaacatttttttgtttagtttaaggatcagtaaagtatagcctgcatgccaaatccagccaccccagtttttattgaaagacagccatacttattatctgtggctgtctttgtactataacagcagagatgagtagttgggacagactagcctccaaagcataaactatttatgatttggccctttacagtaaaagtctgctcatcccaggttttgcttatcagtttatatactggcatttgttcctaatcctatactctatttagtttttattttttaatttttaattttttttgagacagagtcttgctctgtcacccaggctggagtgcagtggcacaatctcgactaactgcaacctccgcctcccgggttcaagcaattctccagcctcagcctcccaagtagctgggactataggcgcgtgccaccacgccctcctaatttttgtatttttagtagagacagggtttcaccattttggccaggttggtcttgaactccggacctcaggtgatccacccatctcagcatcccaaagtgctgggattacaggcytgagccaccgcacccagcctactcttatttatttttaaattttatttttcattttgaaataatttgaccttataaaaagtttgcaaaaatagcacaaataatttatgtgtacgttgcayccagcttccgtgttaatgttttacatttacataatcatattatcaaaaccaagaaattaacattgatcactgattaatatacagagtttatttaagtttctccagttgtccactaatacccttttgtccaggattcagtccaggatcccagttgcattgagttgtcatgctgctgctgctgctgctttttttttaaatagagataggatcttgttctgttgcccaggccagagggcagtggcacaatgataactcactataaccttgaactcctggacttaatgcaatcctcctgcctcagcctcccaagtagctaggatgtaggtatgggccaccaccacacctggctaactttttaaagttttgtaggtaatttttaaattttttgtggagacagggtctctcactatgttccctaagcagccatgcttctttagtttcctctaatctgggccagatcctcagtctttatctttctggccatgatgagtttgaaaaaccagtggttattttgtagaatgtttggatttgtttatcatttctcgtgattaaactcaagtgatacattttttgcaagaataccacagaagtgatgatgtgcccttttcagtgcatcatatcaggtggcatgtgatgttactgttgttttattactggaaaggaggtgtcctgtgattagttaagatggtgtttacctgtttctccactataaagttactattttcccatttttctttaatatgcattttgtggggagatactttgtgactctgcaaatatcctcttcctcatcatacttttgctcactgagtttagcatttattgatgattctttttttgtctgaatcagttgttactgtggtgttggccaaatggtgatttttwaaaaaaattatcatttcttttacatttattaattggaattcaactgtaaggaagaactttccctcctctaccccatttctttatttgtttactttttttattatttgtttattttttttgagacggagtctcgctctgtcacccaggctggagtgcagtggcgcgatctcggctcactgcaagctccgcctcctgggttcgtgccattctcctgcctcagcctctcgagtagctgggactacaggtgctcaccaacatgcccaggtaatttttttgtatttttagtagagacagggttttgccatgttggccaggacggtctcgatctcctgacctcgtgatccaactgcctcggcctcccaaagtgctgggattacaggcctgagccactgcacccggcccattatttatttatttatctatctaatttgagacagagtctccctctgtcacccaggctggagtgcagtggcatgatctcagctcactgcaacctctgcttctgggttcaagtgattctcgtgcctcagacttctgagtagctgtaattacaggcgcccaccaccacgcttgactaagttttgtatttttagtagagacagggtttcaccatgttggccaggctggtcttgaactcctgacctcaagtgatctccttgccttagcctcccaaagtgctaggattacaggtgtcagccaccgcgcctggccttattttttattctatttatttctttttctcttatgttatttacatcattatagtctcatggatatttgttttattctccagtttataacccatttctcttattatgttgctcaaattgtcttaggcttaaatcctcttaaaacttggaaataaccaattataatagaatgtatgacagaatgactaaagtaggatggtagaattttgtgactttgttaataaaaatatacaacaaatataataatgtttgaataaaacctctgtagacctactctgaagaagattagggctaattttaagactttaaaatgcagacagaatccttagttttctgagtccccttacccatttcttacactccccgtaaacccctctttgtgcctctgttctctctgccagaacagactgtgtaagcgttctttaagcattaggtccatgattgcaatactgtaaaatgtcatagtgcctcctgaccaacttgatgccagtgatttgtttacttatatttgagtttgcagatgtttacaaagtataagcagttaaattctgattgtttctcttgggctgtatgaaaaatctttgcagtttgttgaaggtgaaattgtgattaagttattttgtaaatcaaattttttttttacagtcacacatattttcctttatagtaaatgtgtttccttgatttgtacattgctctttttttttttttttcaatttctgtgttaattacaattaactttagagaagcttgcaatttataacatgtattggggaatctaggacaggcaaatcttgwgtcctcaaaggggagtctttaaaccacagatttaccaaatacaatgcaatatgaaagagactgtccccagagaccttggtcctcactcctgtcctgcagagtctaggcctgctcacttttgctgctgggagttgtcctggatcaggaagtgaatagtctctttgagagccacatttttaaagagtttgggattattggtacagttttttagcatggattttttttttttttttttttttttgagagacaggatctccctctgttgcccaggctggattgcagtcatgtgatcttgacccactgcagccttgacttcgcagcctcaagtgttcctcccacctcagcctcccaaatagctaggactacaggcatgccccaccacaccctgctaatttttgtatttttggtagagcagggttttgccatgttgcccaggctggtctttaactcctgaccttgaacagtctgcctgccccaacttcccaaagtgctgaggtaacaggcatgagccactatgcccggccagcatggataattgagaattgatcatttattttgactgattatttttaggaatacatactgatccatttaatgttttttccttagaagattttgctaattgtcagatttgtgtgctaaagatttctagctgctactgttttctttctttagtaattacttcaagtttatcctgcaaggtatttcaaaaatctcctaggtattttttttaaactcattttaaaccagcttaagggtaagagcaccagatttatttggggtagagaagggagtttatttttgtttaataaatagtaaggtgaaaatggacctgtatcgaaagttcctattctgttacttgtgaccgttgaacaatagatgataggtataagctgcttttcgttgatttgagctaccatattcctttagggtttaatctgagctaatagtacgtgaattgaaatgtataattttacttgcaaatagttgaaggcccccttcaggtgggtaagacagtttgtagcaggattctgacaaactggattccccatttttcaaggaggctgctggtaaactggttttgtctataggagaatacagggccatggttggcaaattcaaatccttgtgtccctccctgccttattttgtcccaagaaaacctgcaaatctggattgtgtgataatctcttatcttaaatgttgggactaattgatattttcatggaaataaatatacacatacacacagtcacatcattcagacttgtgtgtgcatacrwgttatgtacattttaaaaataaactattttaggatagggttttttttttttttttttgagacaggatctggctctgtcacccgggttggaatgcagtggcatgattttggcttattgcagcctccgcctcctgggctcaagccattctcctacctcagcctctcaagtagctgggactacaggcatgcaccaccatgcccagctaattatttttttgtggagactgggttttgacaggttgcccaggctagtcttgatctcctgagctcaagatctgcccatcttggtctctcaaagttctggaattacaggcgtgaacccagcctatggttttagattgacaaaatttcaaacatcatactgagagttcccatgtaccccatgtctagtttccaatattattaaaatctaatgttagtatggtacatgtgttacaattaatgagtggtgatactaaagtcatccataggttattcacatttccttagtttttcataatgccctttttctgttctaagatcccatccaggattccactttatatttagtcaccctttctcattagattcctcttgactgtgaccgtttctcagacttttccttgtttttgatgataaatacacattttaaaccagccacctatatggacaagacttggcccatgggctttaagtttgcaagctgtggactaattccatactaggtatgatatccttagttcattttgagtcattctgtgtaccttgagaactgtataacgggatcaaaattgtaggattaatttgataagcaaaccacagaaagtagaaacaggttttcccagtacttgttagtttaatattaaaaattatgttgctcactgtaattatagataaaaggaatcaactgattccagtactgtcttttgtgactaccaatagacctctattagaatatgcttagtttaacacattaatctttatatagatagtgagctggttagaggaatgttaatggcgattgacgtacggggactggtaggtggtttggattctgataggagaaaacactgcacacagcaggccagagtgggaatacctgtattctctatggtaacagtcaggtgaatggagaaactggagagatattttgacggttgtctttaaactcaatggagggcttgtgtagcagagattgtaaactggcagctgctggtggtgtaatggattaaatcagcagtgcttatagaaaagaatttgagtgtttttagataggcagatagtctcctgtcttccctgttatcttggcttcccttgtttacgtagcttatctacctctcatggagatatgagtttgagatacttgtaaggtctgcccaggagcagatgtgtacttggatactatttctgatcaggcttgtaatagtacttgcttgtggaaaaaaatggtgatgcatttcttagtgaaaatatggagtcttccctttaatctgtgatggccatataatttattgtctgaacagggacgtttttgagtgaaattaatagttaggcttagccaataggcttaaactggcactatcataggcaaactggtatatatagttayaattatatcattttaaggctctttaatgtggtttttcctgttttcacattgaaataatttacatatttagctcttgaatgtttttaaaaatgactgaagatagtttttcctgaaagacttagtttttaaaactcataggaaactatgaagtaaaagtgctgatttaatagttgatttttgttgttgttgttggagacagagtctcactctgtcacccaggctggagtgcagtggtgcratcttggctcactgcaacctctgcctcctgggttcaagtgattctcctgcctcagtccccccaagtagctgagactacaggcacccaccaccaarcctggctaatttttatatttttcgtagagctggggtttcaccaggtaggctaggctggtcccgaactcctgacctcaagtgatccgcccatctcagcctcccaaagtgctgggattacaggtgtgagccaccacacccagccaatagttgatttttaattttaaaaacaatttaaaaacttattttagagacagagtctcactctgccacccagcctgtagtgcagtagtgtgttgatagctcaccacagcctcaatttcctgggctcaagcagtcctcctgcctcagccttctaagtagctgggactgtaggcgcacaagtagttgattagtagttgattttattccctatttgtgtttcattcgttctttgttgttttctgatgcataattgttttaatatataacttgaaaagaaaacatgtctactttctagagtagtactttaatacaacttcagttttaagtgaatttaaaatttaattgtaaaaccataaaatttaccattataagcatttttaagtatatacagtttagtagtgttaagtatgtccacactgttgttgtgaaacagctttctagaactttttcatcttgtgaagttggaactttatacccgttaaataacaagagctctttttttctctccctctagtccctggcagccaccaattctactttgtttctgtgaatgtctatttaagatgcctcatataagtggaaccactgaggttttktktgtgtgtgtgtgtgtgacaggcttatttcagttatcataatgttttgaaagttcatccatgttgtagcatgtgataggatttccttttaaaagctgaataatattctattgtatgtatgtatcaccttttgttggacatttgggtagcttctaccacttggcaattgtgaatgatgctgctttgaacatgggtttgcaagtatctctttaagaccctggtttcaattctttcgaatatataccagacatgcaattgctggatcatatggtagttcttttaatgttttgaggaatctccatattgttttccgaaagtggttgttccgttttacaatcccaccaacagtgcacatgggttccagtttctacacatactcgcaacacttgtaattttttttttcttgatagtagccatcctaatcagcattagttaatctcttgttgtagtttggtttggatttctctgatgattaatggtgttaaacatcttttcatttgcttgttggccatttatatatcacgtttggagaaatatcatttcacgtcctttgcccattttttaattaggctatttaatttttttttggttgagttgtaggagttatttatatattctggatattatcctcttatcagatatatgatttgcaaatattttctctcattctgtaggttgtctgttgattgtgtcctttgatacacagagttttaaagtttgatgtgctgtttgtttatttttgcttttgttgcctgtgtttttttggcatcatatctaagcaataatcaccaagtccatgaagcttttcccttatgtttccttctaggagttttatcgttttaggtctttaattcattttttgttaatttttgtatataatgtaagataagggttcaacttcattcttttgcatgtggatatccacttttcccagcaccacttgttgaagagactatttttttttcccctaagtggtcttatcacctgtgtaagataatttggcgatatataggagggtttatttctgggttccattttgtttcattggtcttttttgtcgttatgcccatacccatactgttttaaatacttcagctttgttatatgctttgaaattgtgaagtgtgaatccttcaactttgttctttttccaaactgttttggctgtctgggcttgcctcagattccatgtgaatatttagggacaaacttttcaattctttttttgttttgttttgtttttaagacagggttttgctctgttacccaggctggagtgcagtggcacaaacatggatggctcactgaagccttgacctattgggctcaagctttctgcctgcctcagtctcctgcatagctgagaccattgacacgttccaccatgcctggctaatgttttgattttttttgtagagacaggtctcaatgtgttgccagggctgttccagaactcctgggctcaagtgatcctcccgccttggcctccagcgatcctcccgcctttgcttgccaaagtgctgggattacagacatgagccactatgcccagccaatttttttatttgttaaagaagaaaagccattgggattttgatagggattgtgttgaatgctttgggtagggtagacctcttagcaatattcggtctttcaattcatgaacccaagatacttttcttatctgtgtcatctttaaatttctttcagcagtgttttttacttttcagtgtataagtcttaggttttattcctaagtagtttgtttttttttgacgctactgttaagtggggcttgttttcttttttctttcttctcctctccacttggctctctctcccttcctgtcctctttccccctttgctcttctctctcccctctcccctccctttctctcctcttgtctctttctgtgagacagagtcttgatctgtagccaaggctggagtgcagtggcacaatcatggctcactgcagcctccgcctcctgggctcaagccatcctcccacttcagcctccctgctgggactacacgtgagtgccaccatggctggctaatttttttattttttgtagagatggggtcttgccatgttgcctaggctgatttcaaacttctgggctcaggtgatcctccctcttgggccttccaaagtgttgggattacaggtgtgggctaccacgcccagcctggattgtttttttaatttcctttttttgttgatgtaatgtgcttttaatgaagcccctttgtttttcatctggcctatgaatagttatttaaacatgacatttactagctgaaataaatgctgtttcatactgcagccttgaggatgcattatattgcttttctccaaagttatcttgggcagttcttaggctatagatacagatactgcataaacatgaattggtagtgtgcatcagcaagtacagaagctcgtcaaaaggatgacaacagcttttctaggtttattttttcattttactgaggaaactatttaaacagttttttatttagccagagattgggctttccagtcaagtgagaggagaaaccatggaaatttgatgtatattgatttgagaatcattattggttaatgtattccaaactttttaaggggggaaatggtttggaaaatcaaattgaaatgaaatctgtttgcattgggagtttgaaggtttcagccttaggcgagtacggtaggaactgagagtaaaatacctctctctaggtcatatgatctccaattattagattcattttgaagagaaaagacactgccctaatttaaaaagctgaagtgacttgtgtgaccattttctttaagatgtgattaagtacagaaggcaatcatggttatctagatgacttgatttaatcttcttgatgttcatgtttggacagtaagagaagatgtagatgtcatgccctttctaagttgttttctcataagaaaaaattaacttatttaaatagcagctttctcttggacaaggtggttgatagtgctgaatattaatgcagtactatctcagcaaatgaatgtttatttcatgtgaagcactttgaattctaaactctgaattttactttttgtgtaacagtgttggtagttaagtctgataggtctttcatgcaaaggcaagatgtgttcattttatttcatttaattaattaatttatttatttttgagacagagtctcgctctgttgcccgggctggagtgcagtggcgcgatctcggctcgctgctacctctgcctcctgggtcctggttcaagcagttcttcctcaacctcccgagtagctgggattacaggcacgtgcaccatgcccagctaatttttgtatttttaatagagacagggtttctctatgttggccaggctagtcttgaactcctgacctcgtgatccacctgccttggcctctcaaagtgctgggattacaaggcatgagccaccatgcctgaccaatgtgttcattttatagttgtgattagaaatacataggtggctttaaaaaattattttcgcagcgctttgggaggccacggtgggtggatcacctgaggttgggagttcgagactagcctgaccaatatggtgaaaacccatctctactaaaaatatgaaaattagccaggctatggtggccctcacctgtaatcccagctacgcaggaggcagaggcggaggttgcagtgagccgagatcgtgctactgcaaccccagcttgggcgacagagggagaccctgtctcaaaaaaaaaagtttttttaaggatccaaaagtgtgatgtttatctttataaaaagtgaagttatatttaagcattaaaaaattggaattgggcatggtagtacacacctgtaatcctagctgctcaggaggctgagacaggaagattgagcccgggagttttgagactagcctgggcaacatagcaagacctcatctcaaaaacacaaaaaaattgggacacttgtcaggtatggtagtgcgtgcctataatccccagctactagggaggctgaggcaggaggatcacttcagcccaggagttctgggctgtagtgtactttgtacttgtgaataaccagtgctctccagcctgggtgacatagcaagaccccatttctttaaaaaacagtattattattttaaagctcagttctattaccttattcttttgtcacaacactatgtaacatgttatgtcaattagacagataactttatcttagctgaaaataataataatgaaaaccaagcaatcagaatgattgtttaaaatgctaattttataaattctccaatatttagaagccgctggagttctggagtgggtggaagtggtggaggatcctctggtaggtcatcagctggagctcgagattcccgccggcagactcgagttattcggacaggacgggatcgagggtctgggcttttgggcagtcagccccagccagttattccagcatctgtcattccagaggagctgatttcacaggtatggatctcgtagaacacttaatgtcagacaacaggacaaggtgaggttttactgaatatggtgggttgtagtcatgactcatatcatgagttctgaaacaactgttttcctattttgatcctagaaaactttttttttttcctttgagagggagtctcactctgctgcccaggctggagtacagtggcatgatctcagctcactgcaacctccgtcccctgagttcaagcaattctcatgcctcagcctcccgagtagctggaattaatgggtgtgcaccaccacacccagctaatttttgtattttttagtagagacggggtttcaccatgttagccaggctggtcttgaactactgacctcaggtgatccgcccaccttggcctcccgaagtgctgggattacaggcttgagccaccacatcctgtcctagaaagctgattttgataaagaatttaatcaaaagaaaattaccatagcacttctttttattttttatttcaggcccaagttgttttacaaggcaaatccagaagtgtcattattcgagaacttcagagaacaaatcttgatgtgaaccttgctgtaaataatttacttagccgggatgatgaagatggagatgatggggatgatacagccagcgaatcttatttgcctggaggttggtggatcaccgtcatgtttttctcatttctggagtgctctttcgactggggagtggaatttaaagcacaatagacttttctgaatattcttttcaaggtggtagatatttttcactgtagagttgcttgattttattgtaaagtttcttttatttttttcttttcttttttgagacggagccttgctttgttacccaggccggagtgcagtggcatgatctcggctcactgtaagctctgcctcctgtgttcatgccattctcctgcctcagcttcccgagtagctgggactacaggcgcccgccaccacgcctggctaattttttgtattttagtagagacggggtttcaccatgttagccaggatggtcttgatatcctgaccttgtgatccgcctgcctcagcctcccaaagtgctgggattacagatgtgagccaccgtgcccggccacaagtgttatatcttaacgagtgatctttcttgtgattatgtagtaagtagctcaggcgacatttatgcatttgatgttctttaaaatctttgttaataatgtaggttgttgtgtttttcctcaggcgatgtcattccctagtttttaaatgtatgtgaatttttagagctctttcagcagtctacagttgctctttgtgtgtatgctgcagtgatgtttgtttctgtttatagaggatcttatgtctctccttgatgccgacattcattctgcccacccaagtgtcattattgatgcagatgccatgttttctgaagacattagctattttggttacccttcttttcgtcgttcatcactttccaggctaggctcatctcgaggtaattttgcatttatttatatatttattttggtcacaggctagctgtatggaaagatagtggtagaatctactgactgtatttgaacttctaatattacagttattattagttttttatgaatgcattagcattaaaattaattattttttattttgaagagccacaatagtattttagagttgatcctatttacgttgtggaattgatgtcaaggactatgacttcacctaaatgtatttttaattaggaatatggattctgaactaaaagcagaattctactttacagtgacatgcagcattcagaaaacaagtcttagtttatttggttaaaataagtgatctgtttattttaaatcctggttagataaaataatgaaatgtgaaaaaacttactagaatggatttaggaccaatattaaatgaatagaaatgtttagtttattagaatgccttttttttttggggatgaagtctcactctgttgcccaggctggaatgcagtagtacgatctcggctcactgcagcctccacctcctgggttcaagagattctcctgcctcagcctcctgagtagctgaaattacaggtgcctgccaccatgtccagttaatttttgtatttttagtagagacggggtttcaccatgttagccaggctggtcttgaactcctgacctcaggtgatccgcctgtctcagcctcccaaagttttgtgattacaagcatgagtcactgcgcccagcctaaaatgctattttcaaaagtttgaggccggtgcagtggctcacgcctgtaatcccagcactttgggaggccaaggtgggtggatcacgaggtcaggagattgagaccattctggctaacacagtgaaaccccatctctgctaaaaaaaaaaaaatacaaaaacaattagccaagcatggtggcaggcgcctgtagtcccagctgctcgggaggctgaggcaggagaatggcatgaacccgggaggaagagcttgcagtgagctgaggtggtaccactgcactccagcctgggagacagagtgagactccgtctcaaaaaaaaaaaaaaaaaaaaaagtttgaaatccttaaaagttaacagtacatggtagaggttagaaagattttgaaataattaatcctgcctttctctgtatatgtttgtgtatggcttgtttacattataattgtcaatatttttactttccagaatgtaaaactacttgattcagataacagaaattggctgtatttactgatctttaaactggacagtgtgtcatgttatattaagagcttgctgcatatacttttagtacttaggaataaagttttaaaataacagatctgtggtgatcttttaatatattgaatgcactatgtaatagygttatgaatttaaaaataaatgcatactttactgccttaaatgtgtcaagtaatatattttcaaatattccatatctaacataaataactcctttaaakgtctcttcccatgttctcccccctgcccaccccccccttttttttttgagacggagtttcgctcttgttgctcaggctggagtgcaatggtgtgatcttgggtcactgcaatctctgccttcccggttcaagtgattctcctgcctcagtctcccaagtagctgagattacaggcattcgccaccacaccaggctaattttgtatttttagtagagacagggtttcaccatcttggtcaggctggtcttgaactcctgacctcaagtgacccacccacctcggcctcccaaagtgctgggcttacaggtgtgagccaccatacctggccaaatgtctcttttcctatgttcatcctatgtaggcattacttttagtttgaaccatatggaatagctaatacttgaccacttttgacctatatatggtaattttgtatagttcaatttattgtttctaatccttatttatcctagtcttagagagtttatttggattacgttctttaaaaagtaatgtatgagcaacttcagaaaaactggctttagatagtttgtaggccaatagccatgggaagcattttggtaaggaaatcattttataaagattatttttaaaaaaaagcctgtctggttcctcagtaaaatttaagacttattcataaaaattcatcctataaaaattactctaaacaagggcttggatttttaaaaactttataattagcttatattaatggattcatagtttaccctttttagggttttttctatgtgtgcatttttcgagtttgcttatatacgtaacatgttgaagttctaaatttatgtgctttttaaacccaccagtagacaaacgaggagtgtatattttctgatatgtaaattgaatttatagtacgcatttctaatgaaagccaacaatttaaaattctttaaaaaagaaccaaatatacttcaaaataaagcagttccactctaaaaycatgtagttgaaatatacaaaagtctgcctctaattttttaaaatactagttataatttttatacattcacttgaaagggttgatgttttgaatgttgcatgtcagccttattagatatacatttacataaatttttatgagtagataaactgctgttagttgcatcctgaagggtctttactagagagtggcttacttttatcccactggtgtgacccaattgcataccagttctccttcttcccttagagagagactctgagctgttgcgtgaacgtgaatccgttttacgtttacgtgaacgaaggtggcttgatggagcctcatttgataatgaaaggggttctaccagcaaggaaggagagccaaacttggataagaagaatacacctgttcaaagtccagtatctctaggagaagatttgcagtggtggcctgataaggtatttggaaaaaattcacactgcttccatttaaatggatccctgacaacccctccctctaaggtttccattttatttattctggtttttgtactatcactcaaggaaaaacacaaatatataaaacaatatttttgttttgttttaaaatatagatagaatatatctttatttggcactccatgagtcatctcagtgagatgtattcagtggtgcaacgtatcttactacttgataaagtaaatcagagaaattaggatgttagttctagataacacatcagcatgctattccagtacttcttttctggtaataattactccagtaagtggtgttacattccttggtagaaatttgttttgtcaaatttctaaagtcaggtggacaccagtttctgcagggcatgtttttagtcattgatacagcatgtatatcatgacaagattagggatctgtgttctttgattagttaactatgccatttaatggcagtgagttctgacagattctttgcggtgaatgctgtgggagacaaagctgactgaacaggaatgggctaggggagttatgctctgtatcctgaggaatagtgcaatgactggattctagaaagcatctaggatttggtaattgatttgaatctttaaaaatccatcactgccataagtgaaacagagttgatgtatcctgttgatggtatgtatgtaattgatagttcatcttcagaggctcctattggaacccatgtttttcgcttgttttttactgcgtctgtttcttcttatttccagaaccatttgggtaggaaattttctaaagcagaaataaactaaaagaagatgggaactttggggccccactagcagataaagagagcctgatatggatttcttttctttctttgatttagaacttgaatccgggatattgaaggcgaatattatttaactttccaaatttacgtttccatrgttactgtgagtcttgttgtagttcatttattttcctctgcattcagctcatgtggcaagtttgaatgcaagaaggaacatgaattttaatcagtctctttggaagcaaaaggttattctgttttctttggcaactgccaaactttccctgaattgcattcttttacttatttccctaaaactagaaatgtcccaagttctacttttacttcatatggtagggactgatttaaaccattgggcttttactttttttttctttttgtacatcaattaccgtttcctatttctcttgtctggatcatgttagagttgtgtctatttcatatttgcaggaagtaaaagagactcctgaattatgttttaatagggccaccacgtattattaatctaggtttgtcatgtattatttttgattaatgaaagtatttctgaatagtgtaagtttagcaagcctagccattgtaccctctgttagatttagctagccgttgttggcctggctaaaaatatgatagatatgtttttaagtataccttgtttttagagacagttgtaagtgcatcatgaaatcttggcactgtatagacttttagtgcattattccttggtttgtttagccaccgagtgaatggaagaagagcggtatgtgaaacaaagtatatcctacctatattcttttttccattaaataccaaatttaaaatagcaacatggaaaaaactctttttactagcacatgatggaaatctagaaattcatacttgaattctgggaaagaaaacagcttaagcctttaattaaactgttaagcattatcatagtgatcagtaaataccattaggtgcttgtttgcagggctgaatgctacaagagaatgtagagagctattaaagggaaagaagaccttgtttttatgtaactttaggaaaacaaagtattatacaggggcgcaggataaataccatgtgaagaaactggtaatatgtgagacttatattggtttctcaaaattagttaggggtagtgattcctgaggagcaaaaggttttgggggaaggcttgatagggaatagagaggtaggtggagaatgcagggagatagggtgtcaggatgcacttggtatttaccattggtgagaagaggtaccagcaccagatgagagtggtctgccaagagtaggggcttgtctaatgaggggtccattaggaattcctagctcaagacagtttgaatgtcatgctaaggctaacactggaaaaccagagcagttgcagagcatgcatctatcattttatctcctccatgccacagacattgctgctaattgcctagtaccttgctacttatgggggctatattaatcacaagatcggatattgagcctgtcttatgaaacttgtgaggtttagtgcaggagacaggtggtgattagtcatccaaagtaatattcttaaaatgtgactttccttataatcttgattggggtttgctttttaaaaaaaatcttggtaacttgcattattttgactgaaagtgttatttctacgttcttgacataccaggctgctaaaggatagtctcaattttgtacacaatagtaaacttggaattggcttgcctctgatccattcatttttatggagaaggaaacttcatgtctttgcttatttcaaatgtcttgtaaatggcagatgcagcaatgaagttttttttttatacgggaaggagtagcttttttaggagtgggggcaatcaaaatatgcatcctagtttaatttcagaaatgacctaatacaatactcttaaatattaagtatggttgttagtgtccatagtaattttcattttgtcttttgttagggtacaagcttaattctgttggtaaaggaactggattagtacctactttcccagcatccatttagaggaacaaccagttcttcaaaattttaccytttttttttttttgtgatggagtttcgctcttgttgcccaggttggagtatagtggtgtgatctcggctcattgcaacctctgcctcctgtgttcaagcaattctgctgcctcagcctcctgagtagctgggattacaggcacctgccaccacatccagctaattttttatatttttagtagagatgggtttcaccatgttggccaggctggtcttgaactcctgacctcaggtgatccaccctcctcggcctcccaaagtgctgagattacaggcgtgaccaccgtgcctggcagttttacccttttgtaagccaataaaattattttaatgataggatgttctcttttctttaaggttttgtggtatagtattgaactgaaaatatttgaggtgactgtaaaatacacatatttcccaaaattattcttgaattaaatgtcaaaactaatataaaagcataattgaaaattataggcatcttgaaagttccataaagacagaagtaagggtcattcagtcattattactttagaaaccttgattaaatatgtgccatgtgttaggccttttgttagatgttagggtgagagattttataggaagaagaaaaataatgttaatttgtttgaataagtaccataataggtttccatacatacatacgtaatagctacacartagcacaggaggcattgggaaatcacaggaggctgcacagaatgattacaaagagtgtggactctgaagtcaaactgctggatttcctatcctaatcctaccactgtctagttgtgtgatcttgatcaagttctttaacttctctctgccttggttttctcatatagatagatatagtaatactttttacattatgggtttgttatgagaattaaataagttagtttatgtaaagtgcaaagagcaaggagaagcatggtcctgtcccaggaagggagaacgggcagttcctgcaggtcatgggagggtgagagagcccagttgggtatttcgaagtacgtttatgtggcacttgtgtgttaygtgccaggttctctgttagtagtgaattggacacagaccaaaaagatacagatcatgcatgccccctttatctgactggactagaatgaattcaagttatgaaaacattttattatagtaataatttagtgtaataggaaattaagggcagcctatatgtaccaaagtgagaaggggagggagtgcctaagtctgtgctctaagttcaaggttatgatgttcacagtgaaaccagccaagttgatactggtttctgaaggtttttaccccaaaacatcaactttcttattatgctatccctactccctaaaatctatcctttcttgcttcccctccctctcttcccccatactccccgccgactcctttttcccgctccctttactcacccttctctagccattctttccatccttccgtccatccacctttccatctaaccatctgtgcacctactgttttttactgtttttctggcttgtatgactgcttattacattttgcatttctggaatagctttgataattcatttactttggtgagaagaggtaatcttttaattaggtggttgtataacatggctccattttctcttctcagtcatttttgcaatttattttttctagattagaaatttcataatatgttgctgaatgtctgcatgtaaattgtaattatatatgtgtttataccaacctacttccaacaagaatctaaaccaaacacattttacaaggcctaagccagacaaagacgccagaggaaaagaaaaccataggctaataatatctttgaacattgatgcagaaatcctccaaaaaaaattcaggaaactgaattcaacacatatcaaaaagatatacatcacgaccaggtggaatttattcctggcatatgaggctgactttatatatacacattaatcaatgtgatagatcatgttagcagtatgaaacctgaaaatcacatgaacaccttgattgacgcagaaaaagcatttgaagaagttgagcattctttcttgataaaaactctttaacagtttagctgtggaaggaaagctcctgcatataatagaagccatatatgaaaaaacccatagctaacaatcaacagggagcaactcagagcttttccaataatatttaatgcaaggcagggatgcctactcttgccaattccattcagcatagtactggaagcactaatgaacatcaaacaagaaaaagaaataaaagacatccagattggaaaggaagaagtacaattatctgtatttgcagatgacatgatcttatatgtagaaccccctccaaaatttcacaagaaaacctgttagaactaataaattcattaaagttgcaggctacgaggtcaacatacaaaaatcagtagtattcctatacacaaataacagcctagccggaaaagaaattaagaaaataatcttggctaggtgctgtggctcatgcttataatctcagcactttgggaggctgaggcgagaggatctcttgagtctagggagcttcatggatgggaagaattagtatttttaaacttatactgctcaaagtaatgtacagatttatacataatctctatcagaattccagtggcattcttcacagaaataaaaaagcaatcctaaaatttgtaaagaaccataaaataccccaaatagtgaaagcaataatgggaaaattggaagcaccatacttcttggtttaaaatagtattacaaagctataagcaatcaaaaccatatggtgctggcgtaaaaacagaaacatagaccaatggaacagagtagagagcccagaagtaaattcaaacatatattattaactaatttttgacaagggcaccagtggggaaaagatagtttcttcaataagtggtactgggaaaactggattttcacatgtaaaattggattcctatcttagacaatacataaagatcgactcaaaatagacaaaagacctaaatgtgaaatatgaaaccttaaaaactatgagaaaatataaggaaagctccttgacattgctcatggcagtgattttttttggatttcacaccaaaaactcaaacttcaaaaggaagaataagtaaatggagctacatgaaacaaaaaacctttgtgtatagtaaagaaaacagtcwacaaaataaaaaggcactctatagactgtgaaaaaatatttgcaaaccatgcatgtcataaggagttaatattcaaaatttataaagcacacttgaagtcagtagcagaaaaataacctgattaaaaaccgggtaaggaccttataagacgtttcttcaaagaagacataaaaatggctaacagatatttgaaaaggtgcttaacatcagtaattgtcagggaaatgcaaattaaaaccactgtgagataccatctcacacccattaggatggttgttatcaaaaagacaagagatagcacatgttgacagtgatgcagagaaaagagaacccttgtatgctgttgggaactagattggtatagctattatggaaagcagtatggaagttcctaaagaagttaaaaatagagccaccataggacccagcaatccctattatgtacgtacccagaggagatgaaatcatgcatatctgcacttgggccaggcgcggtggctcackcctgtaatcctagcactttgggaggccaaggcgggtggatcacctgaggtcaggagttcgagaccaatctggccaaagtggtgaaaccccgtctctactaaaaatacaaaaactagctgggcatggtggcacatgcctgtaatcccagctacttgggaggctgaggcacaagaatcacttgaacttgggggacggtggttgcagtgtgccaagatcacaccactgcactacagcctgggcgacagagcaagactcttgtctcaaaaaactaactaamtaaataaataaataaattttattgtgtatatttgaagtttacaacaggttataggatacatgtatttatattgttactataatagattaacacatctatcatctcacagttactattttgtgacaagagcagctaaaatctacttaacaaaaatccataatatgataccattttattaactgtaatcctcatgacataacaattgcagctctagatttgcatcctacatgtctgctgtgtatcctataaccccattttccctccctcacacccccacactgcttgtcagcccatggtaaccactgctttattctctacctttgtatatttgacctttaaaaaaaaaaaaagacttcacatataagtgagatcacacaatatgttttttccctgtgtctatcttatttctcttagcataatgtcctctaggtctatccatgttgtggcaaatggcaagatctccttttttaagctgaataattatcctttttttctgttgtgtctgtgtgtgtgtgttttcttcatccatttgtccatgaaggacacttaagctttttccatatattacctattataaatactaccacagtgaatatgagagtgcagatactttttatttttttattttatttatttatttatttatttttggtgagagggagttttgctctgttgcccaggctggagtgcagtggcacgatctcggctccttgcaagctctgcctcctgggttcatgccattctcctgcttcagcctcccgagtggctgggactgcaggcacctgccaccatgcccggttaagtcttttgtatttttggtagagacggggtttcaccgtgttagccaggatggtctcgatctcctgacctcatgatctgcctgcctcggcctcccaaagtgctggaattacaggcgtgagccacggcgcctgactcggtactgttaattaacattaactggcagggcttggtggctcatgcctgcaatcccagcactttgggaggccaaggcagacggatcacttgaggtcaggagttcgagaccagtctggccaacatggtgaaacctcgtctctactaaaaatacaaaaattagccaggtgcggtagcgtgcacctgtagtcccagctacgtgggaggctgaggtgggagaatcgctggaacgcaggaggcggaggttgcagtgagccaagatcgtgctgctgcactccagcctggccgacagagtgaggttctgtttccccgctaaaaaacattaatattccttactgttctggatctatttctatctagtctagaggaaacaataagtagaattattcccaccagccctttatattgtagagttgtatgttactctgtttctttgaatggtgttgagaggaaatggatccatttcatttgaccccttgtttaagctctttggagcaacctccctgttggaaccagctgatcagacttgtgggttatattgcttcaccttcattgtgcttccaacactgaggaaaatgaaggcagaggattctaaaagtggaagttggctggggaaggtctttgttttgtttttattgacatctggaaacttccaggattaactagatgtgtcacaaatgtaatttaatatgaagtaagaacaaaatgaaaaatgatcataaaaaggaaaagaaactcggcagaaaaagcatatggaaaagcggataggcagagagagatgaagtgtgaatggacacagttggccaaattgcagtgtatcttgtagttgccatcattccaatcatgatgtgcagtatattgtatttagtgataggagttggagctgctacctaatgataaaaccagtgtttgctcatagtaraaaaaatgtgaaaaccaagttttgtggggcaaaattcaggaatagagatgccaactttttcacaatatgaattagtaaacataggtgtggccagttaatagagttggtgttgctgggccaagtgttttttaaagctttggccgctatttcatgtctcatatttttaacagttttccttccccctttgaggaaggatttctagttaaatttatgacccatttatgttggacagttgcagatttactgattcaacttctttttgttgaaaaatagagctacaaactactgctctttaaggaaacatgcatagccactttctctagttggattgagcagatgtcagcttgctaagaagcagcaattcgtacttcataaaaacaataaaaacattgttttctatgacttatgaaatgaatgagctaaaatactgtccttgtgtatgtatttgattgttttgtatttacatacagtaaatttctttaatacagataaatctgaagcaggcaagaagtagtaggtgatttttttgtcctcttcctgtgggttcatagttgtgctattcatcttcatttgtccatagtgggttttcagggcctgtaggggtgtaattggctcatccaggccttatcaccgtgggggacattgccctatctctgaaagataaaggcaagtcagttctgagagggcctcatgcaccatgctcttgctattgggctggtttgttcaggattgtactgctctagtaaggcatttacccaaagaagctggagttaagattcatttgttcattcaacagttggtcagtgtgttcctgctttgtgccatataccaagctggcatatggtaatatagtcatgagtatgatattggcctttctacaaggaattcagtggggaacacaaacatttacatagaatgtaatgtgatcataatgtgatcagtgctaggctgaaagtatgagtaaagtgctataggggttctgagtggtaaatgaccaataccacctgagagatctggcaaaggcatcgcagaggagatagcatttaagcagcatttttaaggtgaggtgggcattgaccaaggcacaaaggyattccaaacgtatctgggcatgggcccagagtcacaaaaggtcatgatgtgtttgaggaaccatgaaaaattcagaattgctgctttgtggtggggagtaggagaagagatgggatggagatgactagacagtttgccaagcaagaagttaggatattgttttgcagcaattaagaagtcaacagagtccgtagagaagtgacttgatgtgattggtggggttttgctttgttgtatttgatttgttttaaggaggtgaacattactggcatgatgggagaaagcaacaggaaaaatcaaaagtcggttatgagaatgctacagttgttcaaggaaattgtgaggatctcaaccaaagcaggggtatggggagagagaaagagaagaatctgagaggaatttgagatcagtttagacatgggaacctgggagcacgcctcatctcttccttttctctcatcagtcaattcgattgtcgtgtctcccattaccaggtgggtggtgatgtcattcatagagataggaactacagggaaggcacagctttgcaggagatggcggattcattttagggatgtcattgtgctttttaagacagctgtaggtaagtctggagatatgagatttacacatttaaaagcatgatgctctggtagatgaagtcactgaggctgaaggtgaagcacaatttgaatacagggagaaacacagaatcagtggcagggagtgcatggtagtaccagggagatggagggaagaccatgcatggtagtgccagggagatggaaggtaggtggaagaccagtagagaatggtgacctatgaattagggagagaaggatgggttccagaacagataatgaacagaggcaaatcatttgaagagtttaaagagaagatggactgattacgtacattgagcattgatttggcagttggaaaaaatgtcatgtccatcactgaaaactggtaaggtgaaacatatgccaggcagtaattcactttaccatgttaggactgaaggagagatttgtttggatggttgttgggggatatgggaaggagttgcatccagtgtgtctgtgggttatctttaaataggaggggaggaaaacacttctttctctgagatggggagaagggaggaggtgagaatggtgctttcattaagcaaatctagagctaggaatattgaggaagcccctgcctgagagctatcattttctgggtgagtcagagatgaagtcaggggaggagattagtcatagtcgaatttgattgagtgcttatttgcactgggctctgtgctgtgtactttatccagctgacccttgaactatgaaggggttaggggcacccactcctcatgcagttgaaaatccacataactttgactcccccaaaacttattatagcctcctgttcactgggagccttagcaacaacataaagttgattaacaacatattttgtatgttatatgtagtatatactgtatttatacaataaagtaaattagagaaaatgttattaagaaaatcataaggaaaagaacatacatttagtattcattaagtggaagcggattaccattaaggtctttattctcattatcttcatgttgaataggctgaggaggggaaggaagaattagaagaggaggagttgcttttgctgtctcaaggatggcagaggctgaagagaactataagcagaccctaacagttcaaacccatattgttcaagggtcagctatatatgttactccgtttggtttttaccctgcactcccctctcccttaccatgatttgcattaccttaatacccattttagaaatgaagaaatggtttcagagaaattgtatagtttacctgaagtcacatacttaataagtgttggatctaggttggggactcacttagtctgattccattatagttaattcttaaccgtaggattgagaagagaatatgaagtagaaaggtaaaatttgatgcagtttctatggagaaagtcagtaatggtttgtagacatccatggtaaaggtaagggaagaattgctaacttggagaattccaaatttggtctcttttccatcccccaataaaagtgacttgaaaataggaaaataggtttgactggtacaggtaaaatagacgattaaaattagtattatttctgtacaacactaaggcataacctgttgttattgtgttatattaataaatcttgtagactttacaagttttagcactataacgttaccatctgaccaaataaaattgaattttgacagaaaaaccagaaagacaccatttgtttatcataccctggagccagaatcccaaagaaaatggagaagtactgtgtatagaccaacagcatttttgcaacctaaaatccgttactggcaatttttgctgtgagatttctaggtagctttgtggctctgatcatttgttttatgttaaagaaaattatttatttacatttattagccaagctttttataatttaattgcattccaaatcattgcatgtatgtcaacataaaagtgaacgaatgattaycttaaatatgggcacttgtttccatagcttgaaagagcttacagggaaagaatcttttgatttgacatcgtttttctctgtttcagctccgtattctgtttttctttttttcccttcactcattcagcacattsattgagcacctacttgtacgctaagttcttaagttacagtggtgaataagacaaagcttatacttgagtgagatagtgtataaacaaataaatatgtcaagttgtgaagtgctgtggattaaaaagaaagcagtgtaaggaactaatgtgagagtggtggttctgtacatagtgtcatcagagacagtctcttgagggagtgtcacctgagaaagagtaacacagacagagggaacagcaaggacagtggtccgagggtaggaagaagaccactgtgacaggaagaaggccagtgtgaatggaggtgagtgagttaatggagggagccagggccaccttaattggataccttgtaggctgtgctaaagacttcgtatagttgtggtttatgtgtttacataattaatctagatctgatgaagtgattaaagtgacagtgttcaaatcagtagatttggcaatttttatatttatagtattgtattttactttataggatggaacaaaattcatctgtattggggctctgtattctgaacttctggctgtcagcagtaaaggagaactttatcagtggaaatggagtgaatctgagccttacagaaatgcccaggtattttattttatgaaatcttgcattgaatagctctacatatcaacatataaaatagtaatttttttttatgctttcaaagaatccttcattacatcatccacgagcaacatttttggggttaaccaatgaaaagatagtcctcctgtctgcaaatagcataagagcaactgtagctacagaaaataacaaggtatgaaacactttgcattgattaacatttcatgctttaattcttgttttctttttttcttttttgctccttttccatcttttcatttttgatctatgttaacataaatacaaagtgtctcaagccttagtaatctaatgtatatttttgttggctagtttatactgtaactttaaaaatagctttctgtggctgggcctggtggctcacgcccgtaatccgagcactttgggaggctgaggtgggtggatcatgaggtcaggtgtcgagaccagcctagccaacccatctctactaaaaatacaaaaccccatctctactaaaaatacaaaaaaattagctgggtgtggtggcaggcgcctgtaataccagctcctcaggaggctgaggcaggagaattgcttgaacctgggaggtggaggttgcagtgagctgagatcgtaccactgcactgcagcgcaggtgacagtgcgagactccgtctcaaaaaaaaaaaaaaaaaagctttctggtttaaggaaaggcaaaaatattcaagaaaattgctaagaaaagatgttgagaagctagaaaatacagattgacaaagtatggatattatgtctcaaattatcgatttggctttaaagtcactaaattgttttgttttgtttttttgagacagggtcttgctttgttgcccaagctcaagtgcagtggtcgtggctcactgcagccttgaactcaagccttccaagtagctggtactgtaggcacacaccactgtgcccagctgatttttaaaacttttttctagaggcagagtcttactgtgttgctcaggctagtctcaaactcctggygccaagtgattctccctccttggcctcccaaagtgctgggattacaggcatgacacctggcctaaagtcactaaattcttttaaaaattggtagagcaaatgtttacttctgaccttaaagatggccttagacattcatttgaataactgctattttgatttgtgtgaaaaagtattwtagtttctagtcttactaagaacctctctgaattacttatttttatagcatttaactcaaaacattttagaactccagtctttaaagtatatatgccttgccctagtttttaccacaatccttttgaaaagatggcttgattttatttaaagttctaatattttattctttaggttgctacatgggtggatgaaactttaagttctgtggcttctaaattagagcacactgctcagacttactctgaacttcaaggagagcggatagtttctttacattgctgtgccctttacacctgcgctcagctggaaaacagtttatattggtggtgagtctatagggaggaggaatttatcggtgaatgcttgtgtatgtatagaaagatgctttgagtagtggaataccaacatgagaagktcaattaaaagattatgccttatggaagggaaatttcactttggaacaaagtaacattttaaaaaactttaacagttaaatttataaaaatacatacttagtgaatataattaataagttttatgaaagtataaagtagaaacaaaagtcatttagaatcctgcaacccagagataactacagttaacatttggggtattttaaatctttttttcctctrcataaacatgtactttgcttttacataattgaaagtataggttatagagtatttttttcatttcattgtatgaatattctctaccttatttaattatagctttactgttagaaggtgaccttacattttttctttgttgtgttttaaggagttaacagcaaaattgcattttggaaacaatatataggggagtttcctaatgaagtataattatttggaagaaaatatgtctgttaggcccaggcacagtggctttcggargcccagcactttcggaggccaaggccagaggattgcttgagcctgggagttggagaacagcctgggcaatacagtgagacctagtctctacaaaaaatacaagaagtaactgggtgtggtggtgggtgccttgtagtctcagctacttgggaggctgaggcaggaggatctcttgagtccaggaggtagagtgcagtgagctgagatcagccacctgcactgtagcctgggcagcagagaaaggccccgtctcaaaaaaaaaaaaaaaaaaaaagcaattgatgaatttcccataaaatttaattataaaggtttaataaaagtagatccagttattaatctaatgcacaaattataattaagatgaaattgtacacattaatagttttctgaggcgaaaatactggagaaatgccagaaatgcttaactgataatatgtgtaatttcagatttatttagtgggctgttttactgcttatttgaccaatttatgttttttgttttcaggggtgtagttccttttagtcaaaggaagaaaatgttagagaaagctagagcaaaaaataaaaagcctaaatccagtgctggtatttcttcaatgccgaacatcactgttggtacccaggtaagtgatggatttagcctgtcttaagggacctcgtttctcttcagaatcactttcttcccttgtaagcagttttacagatgagcatcatttgaagagtcggtttccagtaacgtgtatgtgtcacgtcattcttccttcattcagtagagtaatactgtatagattgtggttcagtattagtaggtttccctatggggcaaggttccctggctttaagaatcacttgctacttttaaaatgcagagtctggaaccccttacctgaaatgtttaagtttgtttggtggtagggccaggcatcgttgtgtttaacaaacatcccgggtgattcatatgactaacccgtttgaaagatactgctctatgaggatgttgtcagcatgaggcagggggctttggcaaatccccatttctaccactttctggtttttgactctgagatggttttaggcttctacgggtactattttctggaagctgatattgttaatatctcagtggttctctaagtgtggtccagagacccctgccttctcctcaaccctttcagggactctgaaaatttccttcatttttctattacatatttgtgtcaggctgaattagcttcctattagctgaattagctttgtcagaagaaggtatcaacagattgaatgcagaagcagacgtgagaatacagctgtcttttattaagtctgacattaagagatttgctaaaatgtaaatgatgttacttttctmgccactatttttttgaaaatctattttccataaaaattgtttatatgaatgtggggttttatcactattaaatatttaaaactttctcaatttcaattactaatacactcgatttactcagttttaatttactaattattaaaactagatatgacccatataaacataaggtttttgggatatgcagtaatagttaatagtgaaaaaaggaaaaaggtcttgagatcaaatgagtctgagaacttctaatttattacattctggttgaggtttatcttctgggtaaaacttaatgcttgtattcattacagcaaatgctgttatgaatgtttaaaaacttaatccttaaaacttagacaaaatggtagttttttattatagaatgtggtgttaatttcttcatctagcactttaaatgcaggtatttttttttttcattacaaggaagtaaaatgtacctattctttttcttcatgataccttttttcttggtcttcctcatgttcttctgcctattggtcttcgaaccagaaaactttcagcgtttacccactattttgaacattattgatcggccttcattattyatattagtttctttggacagggtatgctctctctttttccccctgctcctctctttgcccctccttccctcctttgtaggatcccttctttgcctatttagtttaaatactgatttctgatgttctggacattatttttcaattgcactcatgtactagcaggatgttgcagcagctgccatatcagcaggtaatatggcattactgtagacagggagaacagaaaaaatattggagaaaagctttaaataaaaaagcttgacactaaattgccgaaagataacatatgaaaataccttggtatataaccaaggttgtgttttaaacctgtagaatactggaggctgagggcagttacagctgcagaacaagtaaaatattcatgtcttaacattgaaaagaactgttggtcacttattcagctgcatctgtatttatagatcatcttaagaactattcattttatgccacggagttatagttaatgatacacaactattctttggtagaactgtacctctaagccaatgtttccagttcctgcacttttcaaatgtaccaccatcttcttttgtttcttacatttaattataagccacaaaaaatcatgatcttcgtgtgtacctctggtcatctaccacatagtaagattgggatattggataaataaaagatatctccagaaaaaatgttcctatctaagatggagatactgttggtatgtttaacagtgctgtcttgaaggccattggttttcggagcatgacctgaggttagtcccctgacagagtttttttttttttttttctctgtaagttatttactcctaaacccagttaaacttcagacactaatgtctacatattcttttttaatttaaaagaaaaattattcatggaaccttctggctagcaggaaacagtagtcttctgggataaagaaacatctataaagttatggagcctatcatgaattaagggaaaaagttatttcagattgtaggaaacagacaagaagtgtaattttttttttcacattttactttttaaattataatgccttttagtttcttctctgctgtttctgctctgttttttgtttgtttgtttgtttgtttgtttgtagcagaatggatgggatatttgctgcatgaaaatttaaagttaatgctaaatttttagcaaacatgttgaaattattccttttccttaatattagaaacaaattttcttttctttttcttttttttgagatggagtctcactctgttgcccaggctggagtgcagtggcatgatcttggctcactgcaacctccgcctcccaggtttaagcaattctctgcctcagcctcccaagcagctgggataacaggcgcatgccaccatgcccagctaatttttgtatttttaatagagacggaggtttcaccatcttggccaggctggtcttgaactcctgactcatgatccacctgccttggcctcccaaagtgctgggataacaggcgtgagccaccacgcctggcctagaaacaaattttcttaatgaagacctttaaggtggtgctttttcagccttattgattgggtaagattatactgggaaacctaggaagcccagtactttcatatattgtatttcatccatttgaaataaatattatatatatttttaaagttatgtcatcttgatggtggttttcttttgtttgctaggtatgcttgagaaataatcctctttatcatgctggagcagttgcattttcaattagtgctgggattcctaaagttggtgtcttaatggagtcagtttggaatatgaatgacagctgtagatttcaacttagatctcctgaaagcttgaaaaacatggaaaaagctagcaaaactactgaagctaagtaagtactatagcttaactaatcgtgctttgacaccagttccttgtttgctctgcatatgaatgggaataatcaaggaagacttagaggtgtgaagttgtaaactcctaacatgatagggtcttgttaaggttcccaggaaatttgaaaggaagtgctaaattttactgtttgtaactttgctaatatatatctattaattaattaattaatttattattattatactttaagttgtagggtacatgtgcacaatgtgcaggttagttacatatgtatacatgtgccatgctggtgtgctgcacccattaactcrtcatttagcattaggtatatctyctaatgctatccctccccctccccccaccccacaacagtccccagagtgtgatgttccccttcctgtgtccatgtgttctcattgttcagttcccatctatgagtgagaatatgcgktgtttgkttttttgtccttgcgatartttactgagaatgatgatttccaatttcatccatgtccctacaaaggacatgaactcatcattttttatggctgcataggattccatggtgtatatgtgccacattttcttaatccagtctatcattgttggacatttgggttggttccaagtctttgctattgtcaatagtgccgcagtaaacatacgtgtgcatgtgtctttatagcagcatgatttatagtcctttgggtatatacccagtaatgggatggctgggtcaaatggtatttctagttctagatccctgaggaatcgccacactgacttccacaatggttgaactagtttacagtcccagcaacagtgtaaaagtgttcctatttctccacatcctctccagcacctgttgtttcctgactttttaatgatcgctgttctaactggtgtgagatggtatctcattgtggttttgatttgcatttctctgatggccagtgatgttgagcattttttcatgtgtcttttggctgcataaatgtcttcttttgagaattgtctgttcatatcctttgcccactttttgatggggttgtttgtttttttcttgtaaatttgtttaagttcattgtagattctgaatattagccctttgtcagatgagtaggttgcaaaaattttctcccattttgtaggttgcctgttcactccgatggtagtttcttttgctgtgcagaagctcttkagtttaattagatcccatttgtcaattttggcttttgttgccattgcttttggagttttagacatgaagtccttgcccatgcctatgtcctgaatggtattgcctaggttttcttctagggtttttatggttttaggtctaacgtttaagtctttaatccatcttgaattaatttttgtataaggtgtaaggaagggatccattttcagctttctacatatggctagccagttttcccagcaccatttattaaatagggaatcctttccccactgcttgtttttctcaggtttgtcaaagatcagatagttgtagatatgtggcattatttctgagggctctgttctgttccattgatctatatctctgttttggtaccagtaccatgctgttttggttactgtagccttgtagtatagtttgaagtcaggtagcatgatgcctccagctttgttcttttggcttaggattgacttggcgacgcgggctcttttttggttccatatgaactttaaagtagttttttccaattctgtgaagaaagtaattggtagcttgatggggataccattgaatctataaattaccttgggcagtatggccattttaacgatattgattcttcctacccatgagcatggaatgttcttccatttgtttgtatcctcttttatttccttgagcagtggtttgtagttctccttgaagaggtccttcacgtcccttgtaagttggattcctaagtattttattctctttgaagcaattgtgaatgggagttcactcatgatttggctctctgtttgtgtgttattggtgtataggaatgcttgtgatttttgtacattgattttgtatcctgagactatgctgaagttgcttatcagcttaaggtgattttgggctgagatgatggggttttctagatatacaatcatgtcatctgcaaacagggacaatttgacttcctcttttcctaattgaataccctttatttacttctcctgcctaattgccctggccagaacttccaacactatgttgaatrggagtggtgagagaggacatccctgtcttgtgccagttttcaaagggaatgcttccagtttttgcccattcagtatgatattggctgtgggtttgtcatagatagctcttattattttgagatacgtcccatcaatacctaatttattgagagtttttagcatgaagtgttgttgaattttgtcaaaggccttttctgcatctattgagataatcatgtggtttttgtctttggttctgtttatatgctggattacatttgatttgcgtatattgaaccagccttgcatcccagggatgaagcccacttgatcatggtggataagctttttgatgtgctgatggattcagtttgccagtattttattgaggatttttgcatcaatgttcatcaaggatattggtctaaaattctgttttttggtagtgtctctgcccggctttggtatcaggatgatgctggcctcataaaatgagttagggaggattccctctttttctattcattggaatagtttcagaaggaatggtaccagttcctccttgtacctctggtagaatttggctgtgaatccatctggtcctggactctttttggttggtaagctattgattattgccacaatttcagatcctgttattggtctattcagagattcaacttcttcctggtttagtcttgggagagtgtatgtgtygaggaatttatccatttcttctagattttctagattatttgcatggaggtgtttgtagtattctctgatggtagtttgtatttctgtgggatcagtggtgatatcccctttatcattttttattgcgtctatttgattcttctctcttttcttctttattagtcttgctagtggtctatcaattttgttgatccttccaaaaaaccagctcctggattcattaattttttgaagggttttttgtgtctctatttccttcaattctgctctgattttagttatttcttgccttctgctmgcttttgaatgtgtttgctcttgcttttctagttcttttaattgtgatgttagggtgtcaattttggatctttcctgctttctcttgtgggcatttagtgytctaaatttccctctacacactgctttgaatgtgtcccagagattctggtatgttgtgtctttgttctcgttggtttcaaataacatctttatttctgccttcatttcgttatgtacccagtagtcattcaggagcaggttgttcagttttcatgtagttgagcggttttgagtgattttcttaatcctgagttctagtttgattgcactgtggtctgagagacagtttgttataatttctgatcttttacatttgctgaggagagctttacttccaactatgtggtcagttttggaataggtgtggtgtggtgctgaaaaaaatgtatattctgttgatttggggtggagagttctgtagatgtctattaggtccacttggtgcagagctgagtttaattcctgggtatccttgttaactttctgtgtcattgatctgtctaatgttgacagtggagtgttaaagtctcccattattattgtgtgtgggaggctaagtctctttgtaggtcactgaggacttgctttatgaatctgggtgctcctgtattgggtgcatatatatttaggatagttagctcttcttgttgaattgatccctttaccattatgtaatggccttctttgtctcttttgatctttgttggcttaaagtctgttttatcagagactaggattgcaatccctgcctttttttgttttccatttgcttagtagatcttactccatccttttattttgagcctgtgtgtgtctctgcatgtgagatgggtttcctgaatacagcacactgatgggtcttgactstttatccaatttgccagtctgtgtcttttaattggagcatttagtccatttacatttaaagttaatattgttatgtgtgaatttgatcctgtcatgatgttagctggttattttgctcgttagttgatgcagttttttcctaatctcgatggtctttacattttggcatgattttgcagcggctggtaccggttgtgcctttccatgtttagtgcttccttcaggagctcttttaggtcaggcctggtggtgacaaaatctctcagcatttgcttgtctgtaaagtattttatttctccttcacytatgaagcttagtttggctggatatgaaattctgagttgacagttcttttctttaagaatgttgaatattggcccccactgtcttctggcttgtagagtttctgccgagagatcagctgttagtctgatgggcttccctttgtgggtaacctgacctttctctttggctgcccttaacattttttccttcatttcaactttggtgaatttgacaattatgtgtcttggagttgctcttctcgaggagtatctttgtggcgttctctgtatttcctgaatctgaacgttggcctgccttgctagactggggaagttctcctggatattatcctgaagagtgttttccaacttggttccattctccccatcactttcaggtacaccaatcagacgtagatttggtcttttcacatagtcccatatttcttggaggctttgttcgtttctttttattcttttttctctaaacttctcttctcgcttcatttcattcatttcatcttccatcactgataccctttattccagttgatcgcatcggctcctgaggcttctgcattcttcacgtagttctcgagccttggctttcagctccatcagctcctttaagcacttctctgtattggttattctagttatacattcgtctaaatttttttcaaagttttcaacttctttgcctttggtttgaatttcctcctgtagctcggmgtagtttgattgtctgaagccttcttctctcaactcgtcaaagtcattctcyatccagctttgttccgttgctggtgaggaactgcgttcctttggaggaggagaggcgctctgctttttagagtttccagtttttctgctctgtttttccccatctttgtggttttatctacttttggtctttgatgatggtgatgtacagatgggtttttggtgtggatgtcctttctgtttgttagttttccttctaacagacaggaccctcagctgcaggtctgttggagtttgctagaggtccactccagaccctgtttgcctgggtaccagcagtgctggctgcagaatagcagattttcgtgaaccgcgaatgctgctgtctgatcgttcctctggaagttttgtctcagaggagtacccggccctgtgaggtgtcagtctgcccctactggggggtgcctcccagttaggctgcttgggggtcaggrgtcaggacccacttgaggaggcagtctgcccgttctcagatctccagctgcacgctgggagaactactgctctcttcaaagctgtcagacagggacatttaagtctgcagaggttactgctgtctttttgtttgtctgtgccctgcccccagaggtggagcctacagaggcaggcyggcctccttgagctgtggtgggctccacccagttcaagcttcctggctgctttgtttacctaagcaagcctgggcaatggtgggcgcccctcccccagcctggctgccgccttgyggtttgatctcagagtgctgtgctagcaatcagcgagactctgagcgtaggaccctctgagccaggtgagggatataatctcctggtgtgccatttcctaagcccgtcagaaaagcgcagtattcaggtgggagtggcccgattttccaggtgctgtctgtcacccctttccttgaccaggaaagggaactaactccctgacctgaccccttgcgcttcccaagtgaggcaatgcctcgccctgcttcggctggtgcacggtgcgttgcacccactgtcctgcgcctactgtctggcactccctagtgagatgaacccggtacctcaaatggaaatgcagaaatcacctgtcttctgagtagctgacrctgggagctgtagactggagctgttcctatttggccatcttggctcctcccccctcatatttatatattaacagttgattttgatggccagatgacagtgtagtgttctcttttgatgccctcgttttgttattagattgtatcctttgcaggtgttttgtggcagtaataatatgtttaagccttgctattaagccgacattctctctccttgtttaatcatcttaaatttctacctaacttcctgccctacatcttgattattgaaagggttttacagattaatgtactcaagagggaaatatctgtaaagaattggtaaacgttttttgggttgaagggatttgtgaatagaaacaccgctgaattttgtatagccccatgttctggggctgacttctgtttggagcgtagtacagagatcttaacacctgtgcttttagaaacatctactcatctttaaaaataatcgtttgtactgtaatttggttgtttggtacatgaactttaaaactttagtaaaattgttaaataacattttttcttaatcttataaaaataggkgaccagtatagatatgtgggagagtagtaatatcacattctagaaagaacatttaacacatcaatgtattttctttttttctaaatgtattcaggcattgaaaaacgatagggattttactgtacatacagatttttaaggttccaaaattgtttagtttgctttccatttatactcagatgttatgattataaatttactaagtttactgctgtaattcctcagtgttaaaagtgcaaagttaaatgtgaaaacagtgattactgttaagttaaatgtaatttttaacaaaccaaagctattgcactttatacctcattaagkttttgcttttagttttcgtgttctttctctgtcttggttttttaaaaaagatttatagactttctaattacgttggattttgtactaaaaatagaagtaataaaacattttcattgtcttatgaactttgtaaagaacatttgaaataattttgatgtgtacaaatacaagattagaatagaatatggaatttaaagcctgtaattgatgaagtttttcaagatcttccttgaaatcagccatttcaaatattagcaaaagagctaagtgaaatttaaatgttaagaacatagtctttttcatgtcagtagtaccctcgtttgccagtcattgaaatgcattcactttaaaggtatgctagtgattaatcagtattggcttccccccaccatcacagcatttgtggagcagccaggagtatttgctgtgtacttattgagatcactcatgttaagatcctggtgaaaataataccagttttcttttagattatttctaaactcaggtgaaatttctgatgagagtaataggagacgagggttaagatgatggtccagtttataataggtatataaataacaaatttgtgaataatcagtgacttttctgattaaaaactgatttctaccctttaatatataaaaatatttatgtttgcaccatctgtagaatgctgtttagttgctgtagttattttcttaaacagagtattaaataactcattaaagagggctagttttttaatcctgtcaccagatggtttaagaataaatttttataaaccattgtgagtagagtttcttcttggaactctatgaaattaatggtctaatgggctttttacttacttgcctttacccttttttttttttcagttaaattgccatatccaaatcttagcagtgttgcagtgtgaaacttgtttgctcaagaggctttgacaaagctgtgttgataaattaagtgtaaatttcgttatttctagataaagcttatctgaatcattgtctcaagttgttgatagcttttatatttttccttcccatattaaaccactatttgaaagcatgcattgtgtaccttttattcttgagtcttaaaaatatacaatgaaaaaattaatataaatacatagtttaataaaaatgtttttaatattcattcttttataagaaaatacttgtctttaaaaaatactagtttccatkatttcatttatctaattataaggagaatcttatttcttatctcaggcctgaaagtaagcaggagccagtgaaaacagaaatgggtcctccaccatctccagcatccacgtgtagtgatgcatcctcaattgccagcagtgcatcaatgccatacagtaagttttatttgttgtatgcatttgtgaaaataggtctcatgcagacagctgtgtttagtttgtttctgatttaaggcaactcatatcattttttacatctttttatataatttgtatctctattactttggttttttttttttgcataaccttctttgaatagaaagatggtatttacagtgttgactatttctgttgtttttcagaattagagttttaaaaagatatgtgaarttcatgatagtaatagaaggaaataattgccactagctagtctatctactcacttttgttgagactcttattattgtaaattgattatgtcttggtcacaacttttgctcaaaatttgtaaatttataaacctagacttactgccacaccatggatagaattttttcaaaaattccttaaaataaattttatggtgttaattgctttgcaatttaggaaattaaaagttagactttaatagttatgtgatagttttcttaaaactatctggcagatcttcctttttaaactctggttagatactataattttgggagtacaaaatacattttacgctatttctttgtacttgtttatactggtgttaatacaattaaacattaatggttacagttgttcttcactgtgaatttatttgaagtacagattgatcagaaaactccaattcataaagcagtagcttaggaaattgttgagaaacttcacttatgtatccctttraagatagtctttcttataaatttagatgaaatctataaagtctcttttacattttctttttggtacttaccattttgttgttgtctaagaacgacgacggtcaacccctgcaccaaaagaagaggaaaaggtgaatgaagagcagtggtctcttcgggaagtggtttttgtggaagatgtcaagaatgttcctgttggcaaggtttgttcaagatatctaaaacttaattactaacagaattataatgatattggttatccagggatttgtggttgatatctgagtcctttcttcagggctgttttatttatcatcttcagtggtatctttagttgcacccctgcatctgatgcagatctgtcttctcagtcgctgacagatgaagagattatgcctctctttgagcatttgtgatgatatgttgctttttaaaaaaactattatttgggaatagttttagttttgtagaaaagttgcatagagatacgttactttttggtacagcccatttgttggatctcttagttctagttgagatcatcttccatgacatttaaaattcttccagagtactgaaaaaccttattacaagtcaccttccactttttctcctctcttctgttttgccttctaagaaaccatcaatttgagtgccattaatttcactcttctactgacacatatttaaaatgcacttgcagttgtagaatgtctgtaaagtaaaggttttcatgattactcagtagtttctgaaacgtgatagtctttcatttatacttaaaggaaagagcagatataccagtttctgcagcttacaaaggtctttctcatataccgtttcatttgattctcaaaatagacctgtagttcatgggtaggtgttttcttctgagaattagatacgggcttaaaataaaaagcatcaagtagcagaagtgggacccaaatttgtcctggtttcaaattctgtgcttgtctttctgtgcattgctgaccctatccctgtgttgagtgtattgtagccactagctgtatatgtggctgtttaaatttgttaaaatcaaataacttaaaaaagtcagcaccttcgtcacattagcttcatttcaagtgctcagtagccacttatggctaatggctgccrtattggacaccgccaatatagaacgttgccattttcaagaaagttctgtcagaccgaaggctgctttaatttaattaggagatgggaggatttcacgggctatatacttaagtttttcagttgattactgaaaacattcactgactgtaatcactggctgtgtgggtcagttttctctagcaaatgagcctygaatatagatgtcagtagcaaagctcagagtctgtctgggttgattttataacttggtgatcattgaagaaacatacaaagaattggattcctttaacattaaattagttcagtgaatagaatttgtatgttgattttatataagctattgctaatgttcattgaatttgcctatacttccaggtgctaaaagtagatggtgcctatgttgctgtaaaatttccaggaacctccagtaatactaactgtcagaacagctctggtccagatgctgacccttcttctctcctgcaggattgtaggttacttagaattgatgaattgcaggtaagtgtaaagaagttattcagcaagtgaatattggaactgactccgtgagtttattatggagtttgaaagcaaaattccttttgtgtcatgcaggttgtcaaaactggtggaacaccgaaggttcccgactgtttccaaaggactcctaaaaagctttgtatacctgaaaaaacagaaatattagcagtgaatgtagattccaaaggtaaattttgaaacttcttcagctggcatatcctatattccattaatacttgttcaggaaatgggaatatgataaaataattcagggcattggcatttttttgttccctatctgtaacattatggaatggcatgtatctgtttgaattgacttacaagtgtggccagagaagttaaaatattgtagatgtttattagagataagatgtataacaatttttcttctcatttatgtgcttctgaaggtgttcatgctgttctgaagactggaaattgggtacgatactgtatctttgatcttgctacaggaaaagcagaacaggaaaataattttcctacaagcagcattgctttccttggtcagaatgagaggaatgtagccattttcactgctggacaggtagaggctcatttttgcttttgaaaagtgataggacaacaatggcatttttgtgaggttagggggtctggctctggttagcttatcaattattcaaaaacctagaatatttagcacatttgaatactaggtttcttattactattactaaaatctaatttggaaataaayatgcctgtaaaaatcagatacattttttgattaggagtcaaactttaccattttcccattattataggaatctcccattattcttcgagatggaaatggtaccatctacccaatggccaaagattgcatgggaggaataagggatcccgattggctggatcttccacctattagtagtcttggaatgggtgtgcattctttaataaatcttcctgccaattcaacaatcaaaaagaaagctgctgttatcatcatggctgtagaggtaatttgagtattgaaactactgggcattttaattcacaaaacaccactaaatagtcttgaatagatcttgcaacaatcttaaatagatcattcattgcccctttcttccctaaaagagctaatggtctattaaaactacatagacaagtacatcagtgattatcgtgtaatttaagtgtttgagcaaggyatgcataatgttgtaggagcacaaaggggagagatataaatcatactgtgactgtaccaaagacttctttaagaagcgatacccggacagatcagataggccccttagacacagggatggasttgggaggtattatcccaggcaccaagagcaacctttgtgaatcttattaataagttgggagaaagtacttttttttgatatgaccagaattctggtagggatcctgtgggtcagtgagtagcaactgaaaaggctggagaggggcactagggtgtttgtgtgttcacctaacgctacctaaacttcagcctgaaagcgaggaggaggaggaggattataagccagtgaatgacgtgcttttgattttttaaaaaagatcagcagtggctggtgggtgtttagagagcagctgatagatatcagaagtttagagatcagataaaaaggttaatgtaggctgggcgtggtggctcacgcttgtaatcccggtactttgggaggcagagtgtggggtggatcacttgaagtcaggagtttgaagccagcctggccaacatggtgaaaccctatctctactgaaaatacaaaaattagcccggcatggtggcgcacgcctgtaatcccagctactcaggaggctgaggcacaagaatcacttgaaccccggaggcggaggttgcagtgagccgagatcgcgccactgaactccagcccgggcaacagagcgtgactccrtctcaaaacaaacaaacaaacaaacaaaaaacattttaaaaaaagggaaaaagtcaggcaataatccaggttagaaacaaagtaaatgtcaacttttggaaatgaggaaggaggggatggatttaagagatcttaagaaactagaacctgtaaagcttggtaactggattttagcagtgaatgaaagaattaataaagcttctgatttgggcatggttgatggtagagaagaaatataggagggggaacaaatgggataagggaaaaggatgaatttagttttaaacatgttgtggtttgttgtgatagagtatttgttagatgtggagacagtgcattagaagctattggagcaatttcagccgagattgacctgatatcagtgaacattttaaaaggattccttatgacgtgctgagagtactagggtgaaagtgagtaaataggagtgccagttaggaggatataataataatccaggtgggagatgatagtgacttacccagggggtggagttaggagtgaaatgtgactagattctagttacgtagtcatgtgttgcttaatgacagggatacattctgagaaatacattgttaggtgatttcattgttgtacaaacatcacatagtgcacttacatgaacctagatggtatagcctattgctcctagggtataaacctatatagtgtatttctgtactggataccgtaggcatttgtaacacagtgataagtagttgtttacataaacataggaaaggcacagtaaaaatacggtctaaaggataaaaaaaaggtgcacctgatagggcatttagcacaaatgaagcttagaagattgaaagttgctctgggtaagtcagtgagtgagtggtaggtgaatgtgagggcttatgttattactgtacactgctgtagactttataaacactgtacacttaggctacactaaattttttttaaccttttgatttgtttgtaataataatatgcttaaaacacattgtacacagtcgggcatggtggattgtacctgtaatcccagcattttgggaggccaaagtggatggatcccttgaggccaggagtttgaggccagcctgggcaacatagcgaaaccctgtctctacaaaaaatacaaaaattaaccgggtgtggttgtgcctgtaatcccagctacttaagaggctcaggcacgagaatcgcttgaacctagtaggtgaaggtggaggttgcagtragctgagatcatgccactgcactccagcctgggcgacagagtgagactctgtcttacacacacacacacacacacacacacacacacattgtgtagctatctaaaaaataactttctttcctatatccttaagggttttttgggggggaggggcagagttttcatttctttctttctttcttttttttttttttaaaaaaaaaacttttaggcttgggagtacatgtgagattttactgcagggtaaactcatgtacagggttttttgtacagattgtttcatcacccaggtattaagcactttttctatatttaaaattttttactgcctttttaaaaaatgtgcaatttacaatgccttcttctgtaatacctcctgaaggacctgccttaggctgttttagttaactttaaaaaaaatagatagaagaagtacattctaaagtaaccaaagaaagtatagtaaatactttagaaatcagtgacctagttttatcattatcgaatattatactgtacataaattgtatgtactgtacttctatatgattggcagtacagtaggtttrtttatgccagcactgccacaaacagtatgatttaacaacagctacgatgtcactaggcaataggaacttttcagctccattataatcttatagtaccacagtcatatatgtggtccatcattgaccgtaatgtttttatgcagcacatgactgtactaggtatctttttaaggtagaactaatagatttgctaatggctaaatgtagggtatcaaatagacgaagcaagagggttaatggttttggaagaatgaagttgtcatttaccgagttgaagactatagaagtgaagaagattcaagggtttggttttagacgtgaagtttaagatgtctcttctgatagaggaagtgaatgtgaagacattttaatagatgtctcttctgatagaagaagtgaaggtgaaggttcaggaatttggttttagacaggtgaaatttaagttgtctattagaagattatctgacagattcctggaccaagaggagatggcaagtagaaagttagatgtgtaagtctgactaagagagaaaggctcaagctggagaaatttacttgggagttgtttatttagaggaattatattgaacaagatcatggaggtggtgaggagaaaaggtccaaggactaagtcctgagaatagtctcaacatttaaatgttagggtgataaagaggaacgagcataagagatcgagaaggaacatccacagggttggaggaaagctagaatgagttgtgtcctggaagtcaaatgaagagcacatgtcaagcaggatgttgggaccaactgtgtcaagtgatgtggtaggtcagtgaagtgaatactgaatattgactgttggatttagctccatctaggtcattattgatagtggggatgaaagcattagagtgaacttaggagaaaatgagaggtgaggaactgaagataaatatcagcaacttttttgagcagtttttctataaaggatggaaatggagtttaatatgggagcatattcaccctccattagattggaggtgagaagtactttttagaactgcatctaaaatagactgaatccaggtgcttatgagcactatctgtaagcttttatttagacacccagactcattcttagcttagctttgcttgtaacctactgcactagtggtttcaaactaaaggaggtgatgatacagaggtagctgtggtctgaacttgatgtctagaaatagccttcatatcattttagaattcttgatgggttaccaatattgaaaaatcacaggatttacatttaaaatccagattttaattttagaagatctggtgaaattgggcctcgtaatctacatcccaaaaacattagactggtctttacaattcattgcagttctcactacttagagtttgttgctccaagtgctagtgatgccatttagtatacagcttctgttatctcttttacacacagcctccttcattcatttatattacttcaagtgtaggcatttgattctgtgacctcttcactttgtcaggatctgacaggtagagtcatcatcccgcaggtagggatgaagtgtgtcatgattagtctttatacctacctcagtgactagggcctaccacacagtagacccacaagaaattttttattgaactcactctgccttttgctataagaataactgacagatgtaacatacaatgatgcagagtaaacttttctgcttgtaacrcaactaagtagtattgatactctcagtgtgagagcccatctactatagtctggcaggttggagataagagtttcctgtagagtagtagctgcttctaactaaataatttgctgttacttgaaaccagtgtatatgacagcaccgtacaacagaatatcttgattttagttgccctttgaaagtactctgttctttgttcttcagggagactttgacattttctctcaacacatattttgtataaatttccctatgttttggaaagtttagtattaagctcctcatgaactggagcttgctgttgatgaggtgacttcagagccatagttagttccacaatcaaagtggcctgtctcaygtgtagtggatagtgaaaatagttgtttaggtgtgttttcttgtgtggacatctgttctccacccgctctcaagttggggataggggagagcttattttgacagttttccagaaggtggcaagttgttcaaatgcagtttttttttttcctttatactcccacatgctcttttcccacctgcttttttctagttatagttaaaatgaacaactttgttttataaaactaaagctttatattcgattcattaaatattccacaactacagttttccaatgtgaaagaatgaacttcttggtatattcatgctatttgtcagaaagctaatgatatgttctataaatacttatcagtaccactgtgtctttgttaattaaattacacctgtcatgatccctgcagaattgaaggtatcggttttcatataacctttaatagcataagagggctgggtgtgggttgctcatgcccagcactttgggaggctgaggtgggggcatcacttgagcccaggagtttgagaccagcctgggcaacatggcaagactgcctctacaaaaaatcagcctgctgtggtggtgcatgctagctacatgggaggctgaggcgggaggattacttgagcccaggaggttgatgccatagtgagctgtgttcacatcacygcactacagcctggaagacagagtgagacactgtctcacacacacacaaaagcctaagaaggtgggagtaagcctggaataaaatttatatcctttgcttaattggcyatcattattaaaagggttctaattagatagataacatgaagtaaaaaccaaggattggcagactatggcccaaaggccgaatccagccactcctattcatttatgcattgtatgtggctgctttcctgtttcagttgyagagctgagttagttgagaaagctaaaaatatttacttgtccttaacagaaagtttaccctcccttctctattcctgtcgattgtatgttctgcttaaagtgtacccttaagttctgtttcttttggtaggccacctgaaattgtctctactgatttgcaaatctgattatatattattgtgttggccatgagaaatttttaatatatgtaatgtgctactcaaattcattgaggtttttttcccctaatttgtctgagcacagaaacaaaccttaatgcaacacattctgcgctgtgactatgaggcctgtcgacaatatctaatgaatcttgagcaagcggttgttttagagcagaatctacagatgctgcagacattcatcagccacagatgtgatggaaatcgaaatattttgcatgcttgtgtatcagtttgctttccaaccagcaataaagaaactaaagaagaagagggtgagattaagaactatagcaaggtctttaaagggagttttaggcaawtttgaaaatgtaacagttgttaaagaaaagcaaatcactataaagaatttgtgtgtccttttttttttttttttactttctcagaaggtaaagatgggtatgtaagaaaaaaaattttgcaccagtgtgtttttattgtrtttaatactatatgatatatacaaactggatatgtaatgctaaatgaactttactgattttataattgcagatgacttattacatgagaattatttagcaggttaagccaagttacattgaggcaacttttatctaaatttttagaatgtagaggagaaaaatcamttagtgaggtgttatatgtttttggaaggtaaataagctttttttgccataaagtttttaattggctaaatgaagggagaaattgaggacaaagtgttaatatgtaattcataatgtgtttttttttttgaatttgctgatgatactctggtagctacatttttgaatagtggtttgcaggtttctgacctttatgtcattatcattgaatcagtaaggattatacatagtacataaactgagactgaagtactggtaagtaggtctttttctattttaataagtgaaagctaaatttcagtcttcttattaatgaccttatttttgcccttcgtggattgagaaggaaggcggaataaggaaataaatcacatgtgaaagatcagatagttcagtctgtctgaagtgttagttgctctaaggaggaaaaattgaacaattggttatctagtatgtgaattagartactaaatatatagagattagtgtttagtggactatacatactcagtgtattagttytaaaacttaaattgatcttaattttttctcatttttcagaagcggagcgttctgaaagaaatacatttgcagaaaggctttctgctgttgaggccattgcaaatgcaatatcagttgtttcaagtaatggcccaggtaatcgggctggatcatcaagtagccgaaggtaatgtgatttttaccaggaaactttaattggaggaaaaaaccaagtacagaaagcagtatatctcttacctgtcgtgtacatgaattggtgggtccttttttgtttcatttttgttcctcccaataacaccctgggaaaaataatctgataacaaattagagtttaaggtagagctgggacacttaataaatttgaaataatttagacaagtagtttaaatttgtttctttcaatttgttctaaattcatcattcttgcttcctaggaagttagtgtgttatttggagaacaagtagtataataattgaaggaaccttaatcttttcagattgcttatttaggtcagtttctcagatatcttgatctgggaaaaaaatgaaagggtgatgtgtattatggatgtctgatgtttaaattttcaggctgagttttgggatggacaaacttttataacacattaaaaattgctaggtatttgactagataatgaatatgaagaattcaggatatagttttctttctgtaggaaaaaaatttattgtctgcttgacaagatcattaatggaagcactgctcactatgtgctaatgtggcaggttgcaaagtctacttaaaatgaagattctccttgcctattttctgttccatagttaactattcctttaaaaatgtgtattcttaaattggcaacaggaaggctaccaagttgatccaagttgatactttaccaggttcaaaaacatyctgaagtgagatttatcaaaaagtattcrtgggtgwccaaattacaatttaaaacagtgcaaaaactttacgtagactraacaaaatggaaattatcaccagtttatttattcaggactatgctaggcagacaaagtgtttggtctaaagtgrgaagcaacttaaattcttcatgaagaaattagtgtctgaattatttcaggtatttcatttcctcagggaaattacaggtgcaaatcragttggactctgatatggttggtccaatgccagtgctgccatctttttttcatgtcaggattattttgaaggcaaagactaaaaggagcttcaagagtgggtgatgtgttgctcacagaaataatttgcagagtaagctcctttgaggaatttgccgaagatttcactgcagtgctcttaaccagttcaaactcagggctgccggttgaacagatgaaagcacaggagtcttattatccacgccgggcagtaggaagtccacagactgcttcattgaagtgaaaccctcctctagcctccaatggattttctaggcgatgccccttgatgagtatgcaggctgggattcatgagctgtaagctcaaaactgatgcaatttcaatattgaatggaatactgttaaatgccttcagatgatgatttgactcagaagttttattatgtgaactcaatagttcctgagtacaaagggcagatttagtggaaagcttgattgatgcatctgattgcaggtgtatatactctagagattgttaatctggaagacacatgaccttcgcttttttgtcacagtgttatgtttgaacatgactggattctaaggcttctgtagcatggatataacgtgcttacaaagaggaaattacatcatccttgaattcttccatattgtcagaaaatacgatgactccaggcaagcctttacgaagaaatgtcaaaactctgaatcttagcagccaaggtggtatctcctcagtattgtcctcagccactgaggatacaggtgaatcttcatgaattgtgtacaacatcttgaagaataattttctttttttgttttttgttttttgttttttaagaatctatatgaggagctgggcattgtacttaaaaatgttcccaagacctaatgaagaaaagaggttaaggacaattttaaaaatgacaaggaatggccccctcatttaatattgaattgactacatcacagcaacaaagttgggagtttgcaagttcaagatgagactayggtctcaatttatcttcatttattcttaatctgctttaagctagaagttggagaatagcccacataatgttttttgtttggcctgcgcaatgttaaaatttttttttcctttaatttgaatgccttcagataagcatgtgtgcctctagcttgtcactacccccatttcttacacctgactgcccttattttacctttctgacccattagccattgagtttgtgactctggtgtaagcattcttaaaaaggccaaaacatgcatttattttcrggttatttgcagtgtctcccaattattgctgattttttttttctttgtgctttgagtaagacacattaggtaggataccaggtgtctgttgagcttaattaagattgtataggagcatcacagtgtgaacagtcaccatggtgtgtgctgttactggtaaggagtcttccttttcctctgggtgatatctttggacagggaagtgatctggactgaaacagtcactgtgccatgctcccatccacattataaaaactcttaaactcaaatttctaaattggaaaaagaagacattgatactataaaataattaactatagttattttttaatagtgaatactataatggcaaatatattatttgagacagtaacatttacattgcagaatcttctagagtgtttttattccaaaaaatacatcataaatcttataaaatagatawgctcttgaacatagcctctaaaagtaatttttgtgaatgactttttaaaaaaggttccttataaaattaaaaatgtattgacatggaaaaacacatttatcctcaattaaataataattgcaattagagatttaaacattaataaaacttgaaattatttctagatgtattatgcgtatctagtaaggtgttaggtctttcacatgagaatgtcatgtctgagattaattctacatgggagaatgaagtcccttatgcgttttctggccctcaaaatgaaatttttactctttatccatttacaagctctaaaattgtggctgagtgaagggatttgccttttgtgctctcttaaatcattgttagttctaaatgtattaattttgtagccgttgtaaggttttattcaaaggtaaagtatagattttcatacagatagttcccatttcccctaacgagttctgtgtttgtgattatttctttttctttttagtgatgtgtacacctgtatagtattttttttttatagcaggaggaaaaaaaccatgcccatacattaacaacacattttataaactctagtttcattcattaatttctttgggatgcaagttgtactgttaaaaatttttttgtgtgtaaaaatctaaattggtctttgttttaaaactaatcattgtgtggatattagttcagatgcttttgagattataaaagggatttagtgttgaacaatactggttttgtgctaatcagtatgattgctgatgtctactattaaacttaattattaccgattataaacgggggatagaaactttttttgttttaatgtttagctgttcttttatctgaactgtatgaaagattatttctaatcttacttcaccgcagctttcgttccctgtgcttaagtttgtgtgggagcttaatatagtgattttagtgctgaacggtgtactaggagcccccagttttatttctatccctcactgacttattctgtgattccagaattggcatttgtacttcacttcccttgcctggagtgcttgcttgtaggacatactttcatcttctcagatgagaarttctgtacaccrtttcattatgtgtagatatggtagtgagctctgattttgttcatgttcttttagtttgagattacgggaaatgatgagacgttcgttgagagcagctggtttgggtagacatgaagctggagcttcatccagtgaccaccaggatccagtttcaccccccatagctccccctagttgggttcctgaccctcctgcgatggatcctggtaagagctgttatttaatttcatttagtgtttaacaaaaagagcargtcatgaaaggaaataattttaacattttaaagggatatttagaaatttgaaatatttgaaagtagtatgatgaatattataactagtttagctataaaaattagatttaagggatttatattttaaaaattaaaattccagaactcttgtcaggtattccacttttactgaaatatttatttctataccagtaagaataatccctttattagtaatatatcaagataagtcaatagatttgcctagtggattccttctcttgtagtttggaaaagaagtttcacttaaactctatccaatttgacctttggcttgcagagaaaagccttaaggccagttaagagaacatgttaggaatatgttgcctataatgatatacatcctactgttctgtttactgaaagatggtgacattgattttatcctggcccccgctgtgggatctcttaccacagcagcaaccggtactggtcaaggaccaagcacctccactattccaggtaagaatctgtmctctttgtctgcctagtcatctggaagaaaaaaggacacactttggatatagggttctacagatctacactttatctcaaggagactgttctttgctgaaaaacatctaactctgaattacattcgtcgactttctttgcttgaaaaacatctaattctctgaattacattccatctgtcagtgcaaatatgtggtgtctgtgtacatacatttagaaatcagatgagatttgtaaaatsgtgttcataggtttaaattatttgtgatgaagttaatttattactgatactagaatattgttctggtagcttatgcctgatatattattccagaatattcttttaaaaaaaaattgtaactgctccttgcagagcagggctagataccccataggcagtgtaccctattgtctatgtgcttatgtgccccataggcagggtagcccagaatattcttttactgtgtcttcttcattgttgttttgtaccaaatgaatctgcttaattacaggtccttccacagagccatctgtagtagaatccaaggatcgaaaggcraatgctcattttatattgaaattgttatgtgacagtgtggttctccagccctatctacgagaacttctttctgccaagtaagaggatttgatatatttttcatgtgaagatttagcttagcttagcttttactattaaagtttatcttcttacactatatggacaatagttatgtaaatttaaaacaatttatcagaatccagcatgatattccctctactgctaagctctgttgagtgaaagaggctgtctcaacatcatgtagtgtacactaaatgaatacaaactagcttttatgttagtttgattgaggtgtatatttatatgtgaaagactaaaacaaaatttagttttttgttttatcatgaacatttataatcaggaaggaaaataagtagtaattaatatttttacatataatttttcttattttagggatgcaagagggatgaccccatttatgtcagctgtaagtggccgagcttatcctgctgcaattaccatcttagaaactgctcagaaaattgcaaaaggtaatttatttcagatcctaaatgagttacattcagtttggatagattctcttctgtccatatattataattattcagactggatttctatwtatgtaaatgatacaattggttggaartgatcaagatttgtgtgtgtatgaaattcatgtgtttrttattccttcaagtttactgtatcttccaactttccatcaaaaamcagctgatataaatttattgatttaagaataaacactcygtaatgaacagtgtaaaatctttggaaaayaagatggattactgatagaacctcttggtagttaattggtgttaagtgatataactttacagaataatagacagatgtcttgttatttctgacagaattcctgctaaatagaaagcattaaggaatatcaattcttaccttccagcctttgaaagattaaagtagttatctttttaaaacactgataaatagtttatgagatggtctataatttgctaaatagagccaggagttgagtcttaactgcctgaaacagagctaaggattcagatggctgatgtatagtgtgtttgtattggcatcatatgtgggtatgatgtaattatgctttactttatattgttccagagttggttagatttctttgcatgtcatctttgtatatcactttttaaaattgatatataatttctggtttatattgtgtgtatgctaaggctttccagttgaagaaaatggatggctaattaagtcctttcctgaaagrtgaactgctatgttcttacttttttagctgaaatatcctcaagtgaaaaagaggaagatgtattcatgggaatggtttgcccatcaggtaccaaccctgatgactctcctttatatgttttatgttgtaatgacacttgcagttttacatggactggagcagagcacattaaccaggtaagttatttctacattttcctgtrttaatcatatctttgtgtcttttttcgctatgactatcactagacttacagttttcagctttggaattaagtctgatatgaagaaagttgatttaattcctaagtaaatgaggcaaaagagctgattgctcagttaaatatggcataccatgaaaattggaaattttcactgggtagtataatctgatccacaaatcttgatacagattttataactacaatgcctttttggggatgatacaaattatttttttctactggtaatatttctatttgtatatcataaactgtatatttgctgtagccctttataagttctagttttccaaagcacattaattttgtttgttgagattgaattgttctagaaaataccagaaataattattatgatgagatatatgcatacttataattattcctttaaaagtacactcttaattttaggatatttttgagtgtcgaacttgtggcttgctggagtcactgtgttgttgtacggaatgtgcaagggtttgtcataaaggtcatgattgcaagtgagtacaattctagttttctttagtttaatattataagctgtttagatttatattgctgtatggaaataatctgtactaagtcatgttttacttcagaaagcatgaggttacttacgtttcccttgtttaagtcagtttatgtataatagtgtgattcttgatttaaagtatactgtgaaatgtttggtttctttgctagttcaaacattgccctccttaaataaaagtaggtgattatacattgtaactaggatcagattagtcttttgagaagtatatctacagaatgttcctgagtgtattatgcagcggaggtctcaggycccctgtagtggggtatactaggagaaaattgccataggcctagagggaatcatggtgaatgtttagactgtgtcttaaactaaatgcaacagtctttcattcagcaacagttaccacagctagttctgttggttttcagagacctgagaagcaatgaaatacctagcactaacatctgtggtgttttaggattatggatagggacttcagtataaatggctacaaatgttataatagagaattggactgtaaaaaccatctaccgtaccaytaagtaattgtataggacaaatgaaaaattttaatagatattaaaagaattctggttggtattttttgttttccttattttaagyacctaaaggtgtgataatctgttgttattgattgttttccaagtgtactagatgccagggtggtggtgaatagtcctgacagtgttcacatccctatcagaagcaagaaatatctgcccatagggttacagggttcattaggtcatataggaggaccacttgaacaggactgggaattagggaagagattccaaaagtgattgtaccttagagtacctcttctcataggaattctgtgttgctttatagatgtcattactaccaagtaatccttcttgttatataagctttgacagttatactttgcatttagaaattaacaagggctctcyctggtttcagtgagttataccttcataatgtcaacataaacctttgtatgtttaaaaaatttcagtttttgtacttgtgtataaattctctatagactcaaacggacatcaccaacagcctactgtgattgttgggagaaatgtaaatgtaaaactcttattgctggacagaaatctgctcgtcttgatctactttatcgcctgctcactgctactaatctggttactctgccaaacagcaggcaagtgggatttttagaacatacagtaagttaaatcaaaagagcgcagcacagctgagtagcttttcagcctccctcctcacgacaacattctgttttgcaggggagagcacctcttactattcttagtacagacagtcgcaaggcagacggtggagcattgtcaatacaggccacctcgaatcagggaagatcgtaaccgaaaaacagccagtcctgaaggtgagttaattagacatttatgacacttgtgggaagcaatatgttttatttttgttttggtcactatttctttttcattttagattcagatatgccagatcatgatttrgagcctccaagatttgcccagcttgcattggagcgtgttctacaggactggaatgccttgaaatctatgattatgtttgggtcgcaggagaataaagayccgtacgtattcattaaaacctttttagatttatgtatttcctacgttagtgtagaccttttacagttcattctgtctttcgtttctcctcaagtcttagtgccagcagtagaataggccatcttttgccagaagagcaagtatacctcaatcagcaaagtggcacaattcggctggactgtttcactcattgccttatagttaagtgtacagcagatattttggtaagttctttgaatgtgtattacaagtacatgaaaagtatgtttttcaagtactcttctttgctgtgaaactagaaaagaatttaaaccttaagatccagtgcgaatgaggttatggtaataacacactcagatagggatggggtggcattgcatcgttcctttctctggaaaacataaaactatcagtgcsctcagaacctgtcataaataaataatttacgatgtgagaaaaataaaggcatgtcacagaataatgtaaaatttaaaaacagaaaaatatcagcctaatactagtgtaatcttgaatcaaattatagcctgaccacttactggaatatgatgcagcaatttaaaaataaatcgtattgtaaataacgtaaaaaawaaaccaaacaaccaaactgtgaaaattgggtgttctctgtagctaacatttatacaagaagctgcacacagaaaagagactagaaagtaataatggttccatgagggagatgggattatgaatttattcatataaatatttgagtctgctttgctgttttggaaagtgccccagactgagtttatgttttcttcttctgatttcatatatttggtattgttcttctaaatattagttgatataccaaggactgtgggacaaaaaataagaaatcgtacatttaggactcactgtatgtcaagcacattggcaggtatatttcataaactgaccttgtaaatgttttggttaaatttgttttgagattttattataaaatgttaatacttaaaaaatgttagaacttataactttatgaatgtctaaacatcttatgaagtatcttaacattaatagagtgaatataattttttaaagcttttagatactctactaggtacactagtgaaagaactccaaaacaaatatacacctggacgtagagaagaagctattgctgtgacaatgaggtttctacgttcagtggcaagagtttttgttattctgagtgtggaaatggcttcatccaaaaagaaaaagtaaggcatcctttttgattttggtttagataccattttcactctgtttttgtgatagtgatttatgtatatgaaaagatagattgctgatatttctctttttgttctagcaactttattccacagccaattggaaaatgcaagcgtgtrttccaagcattgctaccttacgctgtggaagaattgtgcaacgtagcagagtcactgattgttcctgtcagaatggggattgctcgtccaactgcaccatttaccctggctagtactagcatagatgccatgcagggcagtgaagaattattttcagtggaaccactaccaccacgaccatcatctgatcagtctagcaggtaaattgctaccaggtaacagattctgattaatccttctctggaaatgtcgtgtttgacttcctaaaacctttgcataagcactcaggtggtgtacatgatcatttgtgtaayataaataacaaccagaaagccggaattttaaatatttttctacaacaactgtattatcaaggacagggctaaaataactccattataaatgtttctaattataagattatttgttcttaagtttcatttatcttttctatttgtttgatagtttccctaattacactgtaagcttgttgaatcaggatgttgagcaacttaaaactttccgatgtcctttagcacactgcttctcaaactttaatatgtatgaaaatgacttggggctcttattaaaatatagatgcccactctagaggtcttgaggtkgggcctccaacttcgtatgcctttcaagttctcaggtgatgccaattctgctggtttaggggtcagacttttcagtaataatgctgtagatctttggcaaatatttagtgtattttgttttttcaagtctgattttataaccatgtgcatgtgtgatgatgttttaataaggacctttaggatctaaagacccttttcctccttttstggaaaacatctctgttaataaggatggcctgctttagtgtttgggatagttcccargttgttacgcttggatttgrtctgggttggtgttgagtatctgctctcactattctcctatatgccagtatatgtgtcccaatttttcctttaatgtcaggtgtccctttaatctaaatccagttttgtctgacagagctctcccatagtatccttgatactgatatacatccaggacttgttgaaaactgttacaaatcaagctgtgtatcttcagacttgtcaaatctatcccatgattaaataattctgcttgtgagatctgcttggactctgtatgattttcctgawcttgataccctgtgaggaactcattagttacttaagtggtattactttgtgaattcttagtatacttcccttgatcttgttctggaacataaaaaattgatggctgttgaacagattttgggatcgtctcatctctaaacactgcccttgaaactgttcctactaagtttcaagattttgtgtcatcttgttcttagtctcattattaaagtattacatactcttaaactctctttattccattccctttgcttgtttcttgagacaacttcctaaatcttcccagaaggagatctcatgtgataatcaagaaatagtgctaatgttttcttcaactgttaaaagttctttattatagtacagtacattcttacccataaagggtgtattttgactagtgttccaaggatgtcttaagttgaaaaacacagaccttgaccattctctgggatttcacttgtcttggattatagaaggtgtatatcaccccattgagtgtgaagtcttaagagtagctttttctgttgcttctttccacctcttgaaaatgttcttgttatgttcttaataaataatctgtttctactttatttccatgtctctcatataacagtaactaacagttactgaaattttagtatgtactaggaactttcctaagtattgtagacagattacctgttttaattttcccaatatgtcatagataaccactatcattctagtttgtcaaatggggaaactacggctcagaaaagttaggcaacttctccagtgtaacacagctaattaaagtttagacgctggacttaccttgacagatacttccttttttttttgtattctcctgaatartagatggcagagtagagaggaagactacttggtgcttgctcatagtgttgagccaccacacagttaaccaacactgaaccaggctttatagtgtagagtgcagtccaaaactctccaaaatgcagacttgtagttagaagttctcaaaagagacctttttccattctgcatctattcatggctgagataggtaaatctctcgaggtatgatttttctgtttcactccttcatggtgttgcccttttaagatttatgtttagctttatatatgtgagggggacagaagaggagattcctgtgatgactttctattctttgcttagcctccagactctcatgtgaaatctgtggttccttgaagcccttctagcccaagagacatcagtgggtccctttgggataaatggtggcacttgtctctccaagctttatacagtacagtcgtttctctttatcacctgcacagctgtccttttttttttttttttttttaatatctagcatatatatgtgttccttaacaagagtggtttctctgcacagtctgccaaattgctggaactagaagtccccaaaacttagtagtgtattaacggggctttttagactaggcttcaggactgttgtgcttcattgtgccagcaagtctgttgggaaaaaagttgaagtcacactaactggggagttacacaggttgagtattcctaatctgaaaatgagaaatctgaaatgctgcaaaaccggaaactttctgagcaccaacatgatgctcagaggaaatgctcattggagcattttggattttgggattgaggatgctcaactgataaatatatataatgcagatactccaaaatttaaaaaaaaaaaaaaaaacccaagatcaaaacacttctggtcccaagcatttcaggtaagggatgttcaactgtaatacgttttatgtattggtatttttaaattactctttttaaattttttgtwgcgtttgggtctcgctgtgttgcccaggtcggtcttaaattcctgtcctcaagcaatcctcccacctcagcctcccaaaacattgggattacaggcattagccactatacctagtctgttttggcagtattatacatactaactgcataacttcttaaagtaaccactttgaggggcctatagttcttgtggatgtttgttctaggatgtttgttttaaaaaagaaatactcattagttgtggcttcacacagtgcttttatgttttaatattgaaatctctttagtggttggaaataccctttttcatctctacagattttctcttagcctttcccacttttgtaatccacgatctctgttttaccagttacttatagttctagtgttaaacatcatattgagactacttatctgttttgtttgaaggcatggtgtttcagtcaactctcaggtctaattggtttgattctcatttctcatagcaactgagataggaaagaacctgtcagtgcaatcacttaaaggtcttttgacttcaacatcttttaccccgtttcataatctataaataataggtgacagggttatttagccaccagtttcagatttctggcctgtattttaagctgtattttctggttccccctttttgttttataatccagtcaactgtcttttcttggttgtctccaaatcaggtgtttagggaagtgaaacttttgccactttgcctttggttatgactactttaaaatcatgcttttgaactgatgttttccccacacacatcagcaagtcattagttaataagctcattcaaaatagaaatcatgtcagatctcttaaaagttagatcacttctattaaacacttgctgttaatggacagatggtgctaccagagtttttagaaatagaactgctggtggaggaggaaaaatcttcctgtagaatttttcgatgggatggactcatacaaataatgtgcatcaacacagatttgaaatgacttaaaaagaaaaaacatattctgagatttatattttctgatatatagattaagtattgttggtttctaagaattctcagctcagatttaaagtcacatcctagcaagtgtctcacatgtaataaatgagttaaataaaaatatgtgttgcatatctgagctgtggcaggagcccactcataagcttctgattctttacagctccagtcagtctcagtcatcctacatcatcaggaatccacagcagaggcgcatcagccagtcacagcccgttcggggcagagatgaagaacaggatgatattgtttcagcagatgtggaagaggtgattttaattgtggtagatttaaaaagcttttattttatgagaaaagaagagtagtcagtagaaattacattaatagtagcttgagactactatatgcgtttgcatccagtttgtagatgtttrttatatattctcatttgtggttatacatagtaaaattattttaataatttgtgacttactggatattaggaaattggacacaaacttgtctttaaggattaagggtggagatattctcagtgttaacagcaaagatattctgggtttttttttttttttttggagacagagtctcgctctgtcacccaagctggagtgcagtggcgtgatctcggctcactgcaacctctgcctcccgggttcaagcgattctcctgccacagcctcctgagtagctgggattacaggcgcgcaccaccacacccatctaatttttgtattttttagtagagacggggtttcactatgttggtcaggctggtctygaactcctgacctcgtgatccacctgcctcaacctccctaagtgctgggattacaggtgtgagccaccgcgcccagccaagatattcgtaatgttagaaaaatttagtagttttgtacaatgtatttgaaagaggatactacatatttatgaggtaaattctctcctccctgcccctagtataatttttatacttctaacttgagggttctgtatatgctcagtaatgaactttgggatctgtgggtataatttttttatttttttgagatggagtcttgctctgttgccaggctggaatgcagtggtgcaatcttgcctcaytacaacccccacctcccgggttcaagcaattytcctgcctccgcctcctgagtagctgagactacaggcacgcaccatgcccagctaatttttgtrtttttagtagagtcggggtctcaccatgttggccaggatggtcttgatctcttgaccttgtgatccgcccatctccgtctcggcctcccagagtgttggaattacaggtgtgagccaccgtgcccggccaggatataatttttgatagcaaattgtcactaacaaatgaagattttcaaaactgcttgatatatgatttcaaattctctatagttagtggtcttcgcattttagttaactagctttgattgtctacaaataagattctggatttaggttgaggtggtggagggtgtggctggagaagaggatcatcatgatgaacaggaagaacacggggaagaaaatgctgaggcagagggacaacatgatgagcatgatgaagacggtatgcaggttatttgagaaattactcagtatgagtaaatcaggtacttttaaagggagatattaaatacagagagaaacctcatttgaatgtatagtgaaatggtcaaacttattttttgccaagggtttctgtagcatctatttagaaaatttaggcgctatatataatacatatataaaatagtttcccttttttctttttaagtcagtttcttaaaagacttttaaaaactaaaataatcatagtcgcattatgaaacatttggaaattagagaaaaggaaaataaatcacccataattacacccagatgctaatagcttgtatatttactttcagtcctcccctgcactgccctgatgtactagtctgttgactaccataatttccctagccattcttctaaggttgagtagttacttagtcttattttagtagttatcccttctctttcacaccattccccttctccccaactcctaccccctatgccttcttagttyccacccttacgatattctggcttatcagaccctgttttaaaccatagtgagtttgtgcttttttcttatttaaatgtattttttagggagtgatatggagctggacttgttagcagcagctgaaacagaaagtgatagtgaaagtaaccacagcaaccaagataatgctagtgggcgcagaagcgttgtcactgcagcaactgctggttcagaagcaggtatgttgccttatcccaactactttcttgcttatgctaaggctgtgtgtgtgtattcagcgtggattgggtcatactttgtgtgatatacgcaagggtagctaagcatttttataacttcatccttgttctctgggtattagaaaagaaagtattattttaataactctttctccagcttttctggtcattaaataatgaatgaattttaaagtttctttaaaagatttttattttcttgcctttttttttttttttttttttttwaawtgggtctcattctgtcaccaggctggatattccagtggtgcagtcagagctctttgcagccttgacctcctgagctcctacctcagccccctgagtagctgggtctactaggtgcaagccaccacatcgggctaatttttttttttaaagagttgggatcttactgtgttgcccaggctggtcttgagctcctgagctcaagcagtcctcccacctcagcctcctcagttgttgggattataggcatgtgccaccacacccagctaaaagttacttattcaggaggctgaggcatacaaatagcttgaacccaggaggcagaggctgcagtgagccgacatggtgccactgcagtcctgcctgagccacagagctgggcttgaaagttattttctaataaaaactattttatggtaggttttgtggattattgaatacaatctggcattctgtttaatatgtatgttttcctgaatgagggggtacattgtaattttaattattaaactcacaatgtttttggttttaaaaataaaaattttaggagcaagcagtgttcctgccttcttttctgaagatgattctcaatcgaatgactcaagtgattctgatagcagtagtagtcagagtgacgacatagaacaggagacctttatgcttgatgagccattagaaagaaccacaaatagctcccatgccaatggtgctgcccaagctccccgttcaatgcagtgggctgtccgcaacacccagcatcagcgagcagccagtacagccccttccagtacatctacaccagcaggcaagtctgaaaacttagtattgctaagaatacttagatagattttttaaattatgcatgttcatctggggataaaattagttttatgatagttcctcattgttttgttgagtttcaaatataaaaaatatgtacatatgattatagcagggtttcccagtctttgcattattgcatctttggactgggtaattgtgggaggctgtcttgtgcattgtgggatgttaggcagcatccctagcctacacccactagatgccagtgaaacccctctcacccttcttcccctccccttggctcccacagttgtgataaccaagaatgtctgtagatactgccaaatgtgtagcccctttggcggggggaggtggcgtgggggtcagatttcccctggttgagaactttatattaattcttgtcccctccatactcctctccccaaaatagtgtggtttaggcaaagttttttgcttgggtaccacaattgaccatttagatttacgtaagtatatataatcccagagaaacacaattagcaactgacattagctcattgtggttgtcctttttccttatagcaagttcagcgggtttgatttatattgatccttcaaacttacgccggagtggtaccatcagtacaagtgctgcagctgcagcagctgctttggaagctagcaacgccagcagttacctaacatctgcaagcagtttagccagggcttacagcattgtcattagacaaatctcggacttgatgggccttattcctaagtataatcacctagtatactctcagattccagcagctgtgaaattgacttaccaagatgcagtaaacttacaggtatgaaaccactgaaaagtttcccattccactrtttttttttggctgtcaattatgagaattccagtattaggggaattaaatgttagaaacgtttayatattgacatactgctgctgtatcgaatttagctctatttggatagttttaactattttagtttggtcttcatagaactatgtagaagaaaagcttattcccacttggaactggatggtcagtattatggattctactgaagctcaattacgttatggttctgcattagcatctgctggtgatcctggacatccaaatcatcctcttcacgcttctcagaattcagcgagaagagagaggatgactgcgcgagaagaagctagcttacgaacacttgaaggcagacggtatgaaattcttcatatatacagaacgtccccaacttaaaatggatcctcaacttacaattttttgtttgtttgtttgtttgtttttttgagacggagtctcacactcttacccaggctggagtgcagtggtgccrtctcggctcactgcaagctccgcctcctgggttcatgccattctcctgccccagcctcccgagtagctgggactacaggcacttgccacccacgcccggctaattttttgttttcttagtagagacggggtttcactgtgttagccatggtggtcttgatctcctgaccttgtgatctgcccrccctggcctcccaaagtgctgggattacaggcgtgagccacagcgcccgacccccaacttacattttttttttgactttrtgatgggtttattgggggtattaaatgcgtttagactttatgcgtttatgatgagtttatcaggacataaccacatcttcagtcaaggagtatctatacttgcatgtttagatagaatctttgtatcctagaaggttaaagctttttagttgctattatgtaagacctcatcttactgtgaagggagaaagaaatgacttgcttgcattacttaaattgttgaggcagaataggctagttatcatccaagctgtttttaaaaatccattcatatcgtaggaatctgatactaaagcctttttatttttgaagttattggtctatatctttgtctcattatccccaagacctccccctctcctcttaggaagttattttgactataattggttatgaatgtactttgtactcaggagggggaaagtatgtgtgattaccagtgctgctctttttttctcaaatcacatttctttttttctgcctcccctagtctgttgaattaaaataaaatatatatctatgtatttgttatgttctttctattcagttataaagtgacctttttcaggagtaggtatcagctcaaatattgaacatcagagcaatagcagtaatatagtaaaagtgcctcatacctgaagtcaaaatccaaggatttggttctgtctctacctcaggataaacaactttgttactctgggcagatcataaagtgaggaaagacaaaggtctaagagattacttagaaagacagtgataggcatctacagtagaggtaatagttactaaagtagggcagtgaagaccaaaaggaggggagagaagcattgaaataaaaaacagaatttagggccttgttgagggattaagtagcaggggcatcatttatatttaaaccttgatcctgagtaactaataggaaaattaaagagaaaaacctaagagtagtataatggacaaacttgcttttgaacatgtgagaactgggggaaaaaaaatggtagaaatgtcaaatgtgcagaattgaatgcttggcaaagatagctgtactgaagatagtgatttgagaggtagcagctttcctgtcctaggaacgctgcttcacaaagacgaaagccttatctttgttaggctgtagttgttaccccagagaacacagaattctgatagcggatcttgattggtggcagtgttctctctcccttctctctgtcagctttaatataataattcacatatcacatataattcacccatttaaagtgtccaattccatagtttttcagcccttcatcataatgaattttggaatattttaatcctctctacagaaaacctattagcagtcattcttcattttcccctactcccccccccccgccttccccttcctaagcaactgttaatctgttttccctctcaatagattctggatatttcctgtaaatggaatcatacagtatgtggtcttttgtgactgggttctttaatttagcataatgattttcaggttcatctatatttagcatacatcagtacttcattctttttcatttcctagtaacatttcattgtatgagcgtactatattttgtttatccattcatcagttggacatttgggttgttttcacctttccactattatgcataatgctcatatgaacttttgtgtatagatttttgtgtagatgtgtgttttcagttctcttgaatatatacctagttatggaattgctgggtcatatggtaactctatttgtaactctttgaagaactggcaatactgttttccaaaaaggaagacagtctcagtagcagtgtgtgtatgagagttttagtttttctacatcttcaccagcacttattatctgtcttttgttataaccatcccagtgggtgtgacctagtatctttgatttgcatttccctaatggtcagtgatgttgatcatcttttcatgggctaactggccactcgtatatcttcttaggagaaatgtcttatttggatcctcccgtcgccaccaccccctccatctttttttttttttttttaaatagagtttcactcttgttgtccaggatggagtgcagtggtgtgatcttgggtcactgcaacctctgcctcccgggctcaagtgattctcctgcctcagcctcctgagtagctgggattasaggcacccgccacaatgctaatttttttgtatttttagtagagacggggtttcgccatgttggccaggctggtcttgaaccctgacctcaggtgatccacccaccttggcctcccaaagtactgggattacaggtgtgagccactgcgcctgaccttgcccattttttaaattggtttgtcttttaaaattgaggtgtatgagttctttattctgcatgtaagcccattatcaagtatataatttgggaagattttgtcccattctctgggatatcttttcactttcttggtggtatccttgaaagtacaattttaattttcgtaaattccartgtatatctgggtgtttgtttgtttgtttgtttgttttttgagacagggtctcgctctgttgcccaggccggagtgcagtggcgtgatctcggctcattccagcctccacctcccagtttcaagcagttctcctgcctcagcctcccagctagctggsattacaggcacccgccaccatgcccagctaatttttgtatttttagtagagacagggtttcaccatgttgcccaggatatctrtgttttctttagttgcttgtgcttttggtgtcattttaatgaagtgattctcaaagtatggtccctagaacaacaccatcaacctcacctaagagctatttagaaatgcaaatcctggggctttaccccagacctactaaaactctggggattagaccagaggtctgttttaataagccctccaggtgactttgatggaccctgaagtttgagaatcactgtcttcagggaaagaattcattttgccattccaaaggatactggaattccttttctatacaaagtataaggctgtaaatcatgcacagtggttatatttctaaagctgagcagcaggcttaactactttgtatttatgaatattctcagctcctaattttgcatatttatgatagtgaatttcacatttgtattcttctaataaacattttcctttctgttcttatagacgtgccaccttgcttagcgcccgtcaaggaatgatgtctgcacgaggagacttcctaaattatgctctgtctctaatgcggtctcataaygatgagcattctgatgttcttccagttttggatgtttgctcattgaagcatgtggcatatgtttttcaagcacttatatactggattaaggcaatgaatcagcagacaacattggatacacctcaactagaacgcaaaaggtatccattcttgccatgaggttgatttaagaaatacttgcttggtatggtcttctttagtacattgtcaacatttggagtaaggagaatagcattgcaaaagagaactagcacaggaccatttcatataggaaagtgggcttgaatttatccaacctttccccattgccactcttcacttaaaataggaaacctaagaatctggttaaacttcatgcttgagatagtttggcctggcctgattatcatctttattttttccttttttttttttttttttaaagagacagagtctgactctgtcacccaggctggaatgtgatggtgcratcaaagctcactgcaaccttgaattcacgggctcaagtaatcttcctgccttagccttctaagtatataggacttacaggcgtgtgctaccatgcctggctaatttcttaatgttttggagagacagtgtctcatgatgttccccaggctggccttcaactcctggcctaagtgatccccctgccttagtctcccaaagtgttgggattacaggcatgagttaccatgctcagcccatgttttctgttagagtttgtgtaggtgctcgttatttcttaggtgatttgctttttcttctgttgagtccattttgtaataatagtacctaaacctgttcactctaccatttcccagattctgaaaatgtttgaaattggttagatacattagcgacctttttagtgtgtttttgcttgtatttcctctgacttttgctcctgttcatattatacaaatayttcamgtaaaatgactcacttgtctttttaaaggacgcgagaactcttggaactgggtattgataatgaagattcagaacatgaaaatgatgatgacaccaatcaaagttagtgcacagaaaatctgctaatctacttcaagaaatggctgcctcagtagttccccttcaagctttttaacttcattattttctgtctgggtgggaatttctcttttcttctctatgtctcatttcttacattttctgtccatttttgcttacacattcttgcgttatacatttcacaactaaggatgtattaaagaaatgttataaactttccaacaatattttttcttctatcttttcttgtatttgtcttagtattatgtttacctttactcttaatatactcttattacatttaataaaatcttagcaaaaccgttgttaatattgatgcaaaatagatttaatcaagaaaatgagaattaccagttacagctcccaaatatcagaacgctagcaattaatasaatgaaaagagaaaatatcccaactccagacttttctccaaaagttttaatatcacactttggggtctagtggagtttatttgtgggttgcagttatttcaaatgggactaaataatgcattctccagtttcttattatcaactagtacttttattcagcctatggaaagacagttggcctaattgctgttttttgagaacccagccatagctcactgccgtttatacgcaaacaaggtactgccaaagttttattccattaaggagatttggtgctagtgtgctgacttactattgagatatgtaaattgctcagacattactctgcttagcaaatgctcaggtttcagttcctgatcatctcctctgtttggatttgtcagtgagttgggtcctgagtatactcatgaatctaactgtatttgggtggtgggtatctcaaaagataaagaggaggatatgggaaacctttgtccaatacaaaatggcacaatattattaaatgctgatttttattttgcattttttattgtaacatacacataacgtaaaatttgcacataacataaaacttacattgtaaccatattaaactgttacatttactttaaaaaataccaraattttggactatgaacttgtttttgtgtggcattaaaattttataaaagaggtagtaggaattttggattgagcaggttaaaggtctgttaccctaatccagtaattaaataattttcctaaaaaacaaaacattttatctttttatgtttaggtgctactttgaatgataaggatgatgacyctcttcctgcagaaactggccaaaaccatccatttttccgacgttcagactccatgacattccttgggtgtatacccccaaatccatttgaagtgcctctggctgaagccatccccttggctgatcagccacatctgttgcaggtgaattaaacaagttagtcttaaggtttctttctaattgggtttattttctttaaagtattcaatgtaactagaatatttctgttaaaattccagccaaatgctagaaaggaggatctttttggccgtccaagtcagggtctttattcttcatctgccagtagtgggaaatgtttaatggaggttacagtggatagaaactgcctagaggtaagacagtaaaagtttttttgcaatataacatttattaaggacaacttgtcccagcatatagatttttagaaatgcgttaattcagaataytatattttctgaaatgaagtgtcagaaattcctgccttgtggtataatgtaggaagaattccaacactgtcattaacttgctgtcagatcacttcatccataaaataccagcctccatatgtgctttgtctgtttcacagagctgactgctgtatgtggctgaaaatttgaatttttcatgtataataaaaatatatagatgagcatgtgtaattttggctacaacttttacttgctgaactaattttaatcaagactgtagataaatagcattaataatgatacctaatatttgttgactaattctgtttcctgggcattggtctccatctttataactatgtttggtagaatgcattatcaccctgatttttygggtgagaaatagagtcttgaagagagtaagtaaatttcacgtgggaatgtctgtgtcacacaactagttaagtggtagatctagttttcatatatagatccgatttgggagcctaaaattatactcttctgtttgtccactgaaaaagtagtaaaacattaaaaagcaggtttagaagacatgtagttgaatagaatattttttattatctcagtgataaaaaggagaatgcagtactgaaaatattaaaaatatatgagacttaagtaccaccagtattataaagatttctttaaaagttctctgaagttccaaggcaagaagtgaatttatttatttatttatttaattttattttttgagacagagtctcgctctgtcacccaggctggagtgcagtggcacaatctcggctcactgcaacctcttcctcctgggttcaagcgattctcctgcctcagtctcccaagtagctgggattacaagtgcccgccaccacgcatgggtaattattttgtagttttagtagagacagggtttcgctttgttggccaggctggtttccaagtcctgacctcaagtgatccagccacttcagcctcccagagtgctaggattacaggcgtgagccaccgcgctcaggccaagaagtgaatttaaagggggggggtgggtaaggctggttgtgctggcttatgcctgtaatcccagcgctttgggaggctgaggtgggtggatcacttgaggtcaggagttcaagaccatactggccaacatagccaaaccccatctctactaaaattacaaaaaattagctggacgtggtggcgggcgcctgtaatcccagccactcgggaggctgaggcaggagaatcacttgaacccaggagatggaggttgcagtgagccaagaccacgccactacactccagcctgggcaacagagcaagactccgtctaaaaaaaaaaaaaaagtagttatctgaggttggtttggtaatgcgttggaattggtggtcagccagggccatcagacaaaaggaccattgaagctccagaaagggaaaaaaaacttgcgtatgattcctgtattactaagttgaggacaaaatctaattagtttttttcccttcatttgtaacttttaaatgtaaatattcataggttcttccaacaaaaatgtcttatgctgccaatctgaaaaatgtaatgaacatgcaaaaccggcaaaaaaaagaaggggaagaacagcccgtgctgccagaagaaactgagagttcaaaaccagggccatctgctcatgatcttgctgcacaattaaaaagtagcttactagcagaaataggacttactgaaagtgaagggccacctctcacatctttcaggtatttgctaagaccctttgtttttattgttcagtacagcgttaaaaatatatatccatgtctagttaccatttatagacttgctattagcagctcagctraggggaaactgaataactagaaagagtagaactttctagatttgtgattcacacttatctgtgctccttttccaagtttgtaattctcttacaagaggtaggttctttgtttatctaacaaatatttgttagtatatactgtggctcagtatgatttgttgactctgttttttggttacatggcataataatttttttgcttagatgggagttaaaaagctagtttgaaaataagatacactgtatatacgttgtctaataacgatgtaagacaggggagaattgtggacttgagtggcccaagcttcctagaagcaatatggattgaattgagatggttagaatgtgcagaaacagactggagagaattagaggtagggaggccagctaaaaagctgtttgttattactaatagtttcagttagttgggggaaagatgctgaggcagaatgttggctttagaaaggacatcatggaaaggaagagaaacttaagatggacttgatcactttgaaggaagaggaggaagaaaaatyaaaatctggtctaagtcagggcattagggaaagagatgttactactgaaaaaaaatcaggagaactgtcattgtggtgaagaagccatattaagttttaaccatgctgagtttgaattgagcatcgttgacgtggacatatttatttaacaaatggagattctggttcatggtgaaagtttgaactagaggtggatctgggagtcacctaaatggagatrgacattggactttaaggagaggaggtaaaatgaaagacgaagataagacatagcccagggatttatccgtatgtagaatacagaaggaataagggaggaaaaataataagttgtcgggaacaagtagctatggaaaagttctctgttaggacacagtttgaagaagttaagacctcagaatattttttwaaaaaagtaagttactaccattgaacaaaaaccaatcagtctttgaaattggctaaattatttctcccccccaccccttcccttaaacttcttacaggccacagtgtagctttatgggaatggttatttcccatgatatgctgctaggacgttggcgcctttctttagaactgttcggcagggtattcatggaagatgttggagcagaacctggatcagtatgtattttgtgcaccttaaattccattctgcctgataagcatgtatttcagggaataatctgtcatrcatttttttttttttaagatcctaactgaattgggtggttttgaggtaaaagaatcaaaattccgcagagaaatggaaaaactgagaaaccagcagtcaagagatttgtcactagaggtaaaggtatttagattttcttatactatacctgtagtatgctatttatataaattttaaaacatgcaaaataacaatagctttgcttagggatatgtacttataattaaaaatttaaagaaaataaaaagaaatgttaactaccaaatttattttttcgtgtgtgtgtgtgtgtgtgtgtgtgtggtttctttttatttttttcttattgtaaccaccaaatttagaatagtagttttctctggcagtttggttccctagcatcctctatgaatttttttgttttagtttttaagtatcattatgcatgcattgatttaaactttttttgatgtatttaattccattgagattattattcatattgatgctcagattgtgtcttctttggctaatgggagtcttgagtcagttttgattcctgagttcttttgacatggccccaataatttttgataaactttcttactttctggtatgtttcatcttgggtatttcctgtcacagaccttaaatcagccatttcttaaagtagctttgattccttttagtaggaaattgtgttatgagattacagtctgtgctctaaggttgcatattgctactgggttgatcatggtttctaggcctttttaattgataacagtttgggaatgcattttttttgttctttttaaaaaatcaaataatgaattaatattgatactcccaattcaaattcaggatttaggaccacaaggttgtttttgttatgtttgcttcttagatttctttyttttttttttttttttttttggagacagtcttgctttgtcgccctggccagagcatagtggcatgatcttggctcactgcaacctccgcctcctgggttcaggtgactctactgcttcagcctcccgagtagctgggattacaggtgtctgccaccatgcctggctaatttttgtatttttaatagagacagggtttcaccatgttggccaggctggtctcaaactcctgacctcaagtaatccacctgccttggcctcccaaagtgctgggattacaggtgtgagccaccacacctggccttgcttcttagatcttaagtctttatctcctttctttcaaactgaatagccaacttcccaacaacattaatcaaattactcatttgttttaatgccacaacatacacagtagcagtcttagaattacatcactggaatctgaggtggaaggatggtttgagtccaggaattcgaggacagcctgggcaacatagtgtgagagactctgtctcttacaaagaattataacatcaacactaccactaacaaaatgattattcaaaataattgaagatttatttgcggatgtttgtccttaggtcatatgcagttagagatacacagttaaattaggtttgttttaaagtcacttgaagtaattcttctttgtaggttttgctaccagctctatataattagggccttttgtttcattttgctttcagattttagggattcgtttttcctcttttggttttattttgtaatcaatgtaaaatatctacagtgtggcagagtgaactctacaaaagaatggatataagtccattcttgtctcttttaccattttttcaagtttatttccttccctcccttttaaaacatataagcatatgtatgtattaattacatacctcctcccacctccccaaacatactatacattttattccatcttgcttttctcacttagtagtatatcccagagaaaatatgagatgttctaccttccttttatagctgcttaatgtactgcactttaatggttgttatcgcagtttttgcagctaatcccttacagactaggtatttgggcttgtttccagtcttttgctattacagatagtgtgatgaatggcmtcgtgtttttttttgctagtgtgtccctgagatagattcttagacatggaattgctgggtcaaagagcatgtgcatataattttgctagacattgacaaatacttctgcataagcagttgcataattttgcattttcaccatcaatgtgagaatgcctgattgctcagtctcgccagcagttgttaaatttctagatttttgctaatctaataggtaagaaatagcacctcagtatagttttaatttgaatttatcttattttgagcaaagttaaacattatttcatatagttaggatagttatatttaactcagttgatatgcccatttttctaagttggctttctctcagatttcagaggctttttatgtagctgtaggtgatagacacactcattaattaatatgtatctttgtgacaaaaggtgcaaacaatttttccagtttggttagtccccctccagcctcccgcccacttagcttgtcatcaaggaatctgttttttttctagtattttttttttaacatctctgatcatttggtattttggtgtatcccaaaattgaacaagattattgttttccaatagacctttgaaagaaagtgttagaattgaattaaattctgttgtcctgatttaatttgcaagacattcttgtatgctttaaagtattgtattttgtaatggataagcttctgagaactccaattactttgttgttttttaaactctcaaggaaaggctaaaactagattttcagattgtacatagaaaaattcaagctactttccaacattgaatttactactttttgacttcttgatgtgttttaataggttgatcgggatcgagatcttctcattcagcagactatgaggcagcttaacaatcactttggtcgaagatgtgctactacaccaatggctgtacacagagtaaaagtcacatttaaggatgagccaggagagggcagtggtgtagcacgaagtttttatacagccattgcacaagcatttttatcaaatgaaaaattgccaaatctagagtgtatccaaaatgccaacaaaggcacccacacaagtaagtactctacaaataacaagcagcttaaaattctttccttgttcctcaaaccaacagtggtaatcatggtttctatatgtgtgagtgcataaatttgcatttttacatacttttattctagattgatttaatcttgtttaaactattctaatggacaacaatttgctattctacggacacatttattttgataaatgtttgtgattgtactagtttttcatctcaattgttacatgttgtgggwgkgtaagaggttgtaaaatacatagtgatataaaaattcaccgatcaaattgcagcatttcctccacttcaatatttaacccacagggatatttgagaagaaaatgctattctaagagcagtgctgttcacattatgatttccaaacttgctcctggtccccagtgagataaggactttacaaccaaatgcaaatccactgtgtcactaagctcactgtttagcaagacttaaaacaaaaaatcctggtgcaagcttattaccccactgaggatcaacactttggggttaggactcttagctaagttttaagattacaaggatcaaattttaaaatttgtgaaaattacaaaagccttaggagattcacatcaagtaggagcagaagattatcagacttgtaggtggatggagactractgagctgtagaaaggattgagggtgaaaaaatgggtgagagttcctcagcttttcatcagtttcaccatttcactttctataatgttataatgagaagaaattaggagatgtgaatgaggaaactgggaagtcttaacatttccaaactatctgtttkgtacacttataggaaaccatactctggcttgggcttaggaatttaaaaataataataggtaatattctggtggcctttaatgctttcatgccaaaaactaagaacagaggatatttaaatgagtctagtcatgtaagaaatttcagcgttatttatagtgacactatcataaccttacttgctatatattatttcacagctttgacatgacaagggagaaaattgattaacaaatattgagtgaacatctatttcgtgccaggtatattctacacaatcacctccaaccctgaaaacccatagggagagaaaggcattaacracacagatgctagggaaggataatctttagctgtcatgttttcttacatttgtctcatttctttgcattgactttgaaatttaaggtagttgaatttgcattcatctaaatacagtatatttctgattttcttctaggtttaatgcagagattaaggaaccgaggagagagagaccgggaaagggagagagaaagggaaatgaggaggagtagtggtttgcgagcaggttctcggagggaccgggataggtaaattttgtatctttgattcaataccacctttttggatgaattagarataggcctgtaaatgaaagaatcttaattatggattattttttagaaaagtaaagttttaattttgaacataygtatagtaactaagaatagtctgttaataaaatacaataactaagaatagtctattaactaataaaaagttctgctttaaaaacccagaggcggttgaaattatattctttttatctgactcaagttcctatttgaatttttttacccatatcattctctcctaagtttatcttaaaaagtcttcatttttcaggccacatgcggtggctcacgcctgtaattccagcactttgggaggccgaggtgggtggatcatctgagttcaggagttcaagaccagcctgaccaacatggtgaaactctgtctttcctaaaaacaaaaaattagccaggtgtggtggcgcatgcctgtaatcccagctacttgggaggctgaggcaggagaatcctttgagcctgggagacagaggttgcagtgagccgagattatgccattgcattgcattccagcctgggaaacgagcaaaattctgtctggcaaaaaaaaatttaattttggcagattgtgctatttagaatctttgaagttttctcttgttaagatggattgcattttacttttgactaaaatttccagaattatgtgtggactcttgatatctggtatgttaaggtcctactcccttacaataaaaattttaaattaagtaacaaaatctagataatctttatttcctaaccatcatctgttttggcactctaccacctaggtaccataacygaacaacctatatgctctggttttctaacttttttactagttgtgctaatmtttttacttgttagtcaaaggaaatgaagtcataatagttttccttctmttacagagactttagaagacagctttccatcgacactaggccctttagaccagcctctgaagggaatcctagcgatgatcctgagcctttgccagcacatcggcaggcacttggagagaggctttatcctcgtgtacaagcaatgcaaccagtgtgtactstgtacttrgttacctcttaactggctgtgttatttttttgcttttgaattaaagatggtgtttaaaaaaaattgtcagctactggcaaaaccacatgattgaggactctttttagctctgcagtaagaaggaagctcaggagagaataaggcagtgtttactgaagggtaactgtatagcttgaatttattttttcctccacccaccttatgttgggacactgtctccattctaccttccttgcatgctaaagaatttgctgtgcattatatttattgtatcttcatttgaacaaattattactacttttggagcagactttatctgttagcaagctgtagttggaacacattaatgctgattagtattgcaggaagaattttattttgaatgttctatcaagagtttttctttatatgatatgaaacacaaattmgttatgttttttgtctttatgcataactgtatgtacacattttatagtgaaagaataacagaaaactattatttcttccagcaagtcctcagccttaaacataggtatatttttctctaccctacccccttctttttttctaccctaaataaaagatatttctggctctctgatgaagaaaaaaatatggaaattgagtatatgtatgtttaactcagagatataaaaaaacctaaaaagaaaacttgtcatacaaatattataagtagccttaacaagatgtggtactgcatggactgtttattccctgccaagtttctctataattgatcttccagtttcataaaagaccttactggttctgaaattttgtatttgttacccaagtttcttattttattttttttttaaataaaagattgtagatgtaattagacaagaggttttagagagtagtcaagtaacatttgttcatcatttacaggcatttgcaagtaaaatcactggcatgttgttggaattatccccagctcagctgcttctccttctagcaagtgaggattctctgagagcaagagtggatgaggccatggaactcattattgcacatggacggtaatgtgtacaattgggaaggcatttcagtttaaacatcagctacttactttcagtatgtgggtgccatcatatcttaaaatttatgtcataaagtataagactttaaatgcatttttatttattttttaaatgatagcttaaattccatgaatgagacagcttagtttcttctcatgtattagaaaggtagggttttaatagttaccaaggttatttggaaattacttgaaagaaagtacatctcaaattcacttatcagaataccctcctggcaaaggccatacatattatactgtgttcttgccataaccatgacatttcttttaggcttcctgatttgtcttaaaaattcatggaagtttttgctttctattctgtaaagtatgaatttaatataaaatctaaaaaatatctaacagattacatatcccyttttccaaggtgacaagtaaaagtgacttaggaagataaggccgggtgcggtggctctcacctgtaatcccagcactttgggaggctgaggcgggcagattgcctgaggtcaggagttcaagaccagcctagccaacatggtgaaaccgtatctctactaaaaaaaaagttaaaagtggctgggcacggtggctcatgcctgtgatcccagcactttgggaggccaaagcgggtggatcacgaggtcaggaattcgaaaccagcctgaccaacatgatgaaacccgtctctacgaaaaatagaaaaattagccaggcatgatggtgggcgcctgtaatcctagctgctcgggaggctgaggcaagagaatagcttgaacccaggagggtggagcttgcagtgagccaagaccatgccattgcactccagcctgggcgacagagcgagactccatctcaaaaaataaataagtaaataaataaataagctgggtgtggtggtgagcacctgtaatcccagctactcgagaggctgaggcagggagaattgcttaaacccgggagacagaggttgcagtgagctgagattgcgccactgcactccagcctatgtgacagagcgagcctctgtctcaaaaaaaaagaaaaaaaaagggaagataggtcacatttatgctgtagtttctatcctggggctaatctgatacccagtttgaaactttgaagtgtttattattttagatgaaaagttgtatttttttcttcctaatgagttaggaatttagattagatacactcctagagatgtataagctggtaggctgggcactagagctaaacagccacttcyagagccttttaatggtccaagccaaagactgttgagagaactgtattttctttgctgatgctcttttcttctctggattttatgtactgttcgtttattcctctgccctgtctctggagctactgcatactggtatagcttagtccattatagaaaaatcaagaacaatgtacatttttggtgaaaagatttttgtgagtatatgttaagagttgcgtatttartcatgttttctgttgaatgcaaccartgtacaatattgacagctttcacctggctttctggagtaaacagtgaatttattggtgttctagaatcattaaattcgctagagaatttgctagtgaatttggattgctttctgaacatttttctgttcttctgtagtgctccctctgagcattgtagaagtgttccagcacccctatgaagaccacattcattttgtcagggagcctttagtccactatcttgaatcatacatgaaggatctagtgatacacttttttaaagatttgtattaccaacttctctgctcatactgcattagtactagcaggtgcattggatatttattgactccaaaacttgaatgtattttgtaagtaagtccttttaaatttaaattatacgctaaattctagaagtctccgttatctggaatgtgaaaggctttttgtttttagggaaaatggagctgatagtatcctggatcttggattagtagactcctcagaaaaggtacaggtaaggaacattttattcatgtgctgataatcacagaatttaaattacaaggaaatttcaataaaggggatgaaagcaggatttctgaagaaactgtctttataaataaaatgaatgtttacagtagagagacagaagcaaagataaatatatcggtattatgcatagaatcaaataataagcttggcttaattagggctcagtataatcccacccattggttggcatccatttgagcacagcttgaattaagctttactttgaataagtaacaaattgaagaacagagagggaaagatgtatagaatcctaggactaattcaccaggtgtggtggctcacgcctgtaatcccagccctttgggagaccgaggtgggcagatcacgagatcaggagttctaggactcctgggactcattcttcaaagaagtagctggtgccaacattgcaaaaacaagtgacatatcatgctatagcataaggaagsctttttagttggcattgaaacaattgcacatagaaggtgagacttccaatttgaacctaagtaggttgattgcctactaaattcatattaatttactaagactcagagttttcacaactaattcacaatgcccaggatacactctaaaattactcagcctacaaagaaccaggaaaaactggatccacctctctcaggaaaagaaccaatagatggcaaccacgagatgacccacttgttggaattatcaaagactatcccatgttctgcaagataatggtgaacactggtgaatggaaagacagaggttctcagcagacacacacaggaacttcaaaagagaacaaagggaaatttttagaattaaaagggcaatatctaaaagaaaaaaattcacaggatgcatcaatagctgaatgarggtgttggaggaaagtgtcagtcagcttgaagatagatggaaattaccctttctgaagaacagatagagaaaatattttaaaacaaaaggacagtttcagggagacctgtgggacaacttcaaaagatctaacatatatgtcactgaaatactcaggggaagagaagaaattgctatagaaaaaatatttgaagaaataaatcatggctgggcacttcctaaatttggtaaaagacatagatttccagattcaagagtcagtgaactcaacagaataaactgaaagaaaactatgtccagatacattataatcaaacttctgtaaaataaagaaatgttattgaaagcagccaaagaatggttctttacctatagggaaacagtgatttgaaagagtggatttctcactataaagtatgraagccaaaagtcaacaaactcatcaaagtgatgacagaattctgtatccagtgaaaagaattttcaggcaataaagtgaaagaagcttatccgagtttcattaaatgactttattttaacaacagagacgttaaagacctaataatacacaagctttgtgtgtcacattctgaaagggcaaattaaaagttcatttacctttaatattgttatacacatatatttaaatatttatgttgctcttcctacctgacttcattwgaatgatttgagagaaccatttcatatgttttgttttttcagtgaatcttggggcttactctctgatattctctgttagcaggaaaaccgaaagcgccatggctctagtcgaagtgtagtagatatggatttagatgatacagatgatggtgatgacaatgcccctttgttttaccaacctgggaaaagaggattttatactccaaggcctggcaagaacacagaagcaaggttgaattgtttcagaaacattggcaggtaaaagaactttaatcttgggtttgaattttttaaaacatttcaatttatgagattttctaaaatatatttgttttaaaatgtatgtacgctgggtgcggtggctcacacctgtaatctcagcactttgggagactgaactgggaggatcacttgagcccaggagttggagacctgcctgggcaacatggcgaaaccctgtctttactaaaaataaaaaaatactagcgggcattgtgctgcaatgcctgtagtcccagctacttgggaggctggcgtaggaggatgacctgactgtggcactgcacttcagcctgggttgacagagtgagaccctgtctcaaaaacaaaacattctcaggctggtgttcctgtttttttttgttttgttttgttttttgaaaaagtgtatgtgctgtactttatgctgaatagaaaggaggctgtagagaatttctcaaaatattaatacgtatkatgtgtggggggatatatgtattctagaattatttaaatcttatttctctgtgtttgtttttaggattcttggactatgtctgttacagaatgaactmtgtcctatcacattgaatagacatgtaattaaagtattgcttggtagaaaagtaagtgattttgatgaacctaattgtattcacaattgcaaaaattttcttttataaaataatcaaacgctagcatactgtttataacattcatttactattaaatcttaaagcattacagccattataaataactttaaaacatttaattatacaattatggtcaacaaaaataaaattaataaattaatgacagaaaaagactatggggagatggcatagcagagtagataacacaagtggggctggggggtctgacagacctacgtcctgttgcaaacaaatatgctgacatttctgccatgtttccccatttataaattggtaagaaacacaacatcgtaagtacctggcaaatagtaagtgattggtaaattgtatccactattattagttgtacctggtgttagagaaggtagtggtattgaaaagagccttccaggccaggcacggtggcttatgcctgacacctgtaatcccaacactttgggaggccaaggcagaagcatctcttgatcccaggagtttgagaccagcctggacaacgtacgagactctgactctaccaaaaatttwaaaagttaactgcgtgtggtggcatgcacctgtggtcccagctatacttgggagactgagataggaggatctgcttgagcccaggagtttgaggcttcagtgaggcatgattgcaccactgcactccagcctgggtgacagagcaagaccctatctcataaaacaaaacaaaaaaaaaatagagcattctaacttcaaaaatacctataagaggtacatgggggtggccaaagaatgtaagaagtacaacacagcatgctcagtattgatctctggatgatggaattagcttatctttatgtgttttgatagtttggtagcctgcacctccctttatgatggcagggggaaaagaaaaaccgtttgctttaaaattaatatacaatgctaattatgcagcttttgatttaaaagaaaactacccacgttcctaaaaatattttagagaaattacttgacacaaaacaaatggaatagactaagtgcctttatttttttcttttttttttttgagacagtctcactctgtcacccagggtggagtgcagtggcacgatctcggcttaccgcaacctccacctcccaggtttaagtgattctcatgagttagcctcccgagtagctgggattgagtaagttcttattgtcgtcaataggttcttggaaactgcaactctaattgaaatgaaaccagttttttcttatcaacattataatgaaatgatgttatttgagaacctgcygtttgtcatttcaaagttacagctaagaacctatcaacggctttaattaattaawtttttttttttttgagatggagtcccgctccattgcccgtgctggaatgcagtggtgtgatcttggctcactgtaaacctccatctcccaggttcaagtgattctcctgtgtcagcctcccaagtagctgggactgcaggcgcatacaaccatgcccggctaatttttgtatttttagtagagatggagtttcaccatattggccaggcttttctcaaactcctgacctcaagtgattcccccagctcggcctctgtgtgagtcaccacatccagccaatggctttgaggatttatgttatagttttttccggaggtacatgtcacacatctgataaataagcatgttaaagctgtagcctcctaataattctctttaatcagacctactgatgaatrattttctattagtacaagaatatcatattatgattttttctttttaactctgaccctattaaattcttaaagtgttccagctaaaatgttcttatttaaagaactagactcaaagcttggcaacataaaattgttgatatattgagtcttcagcagggtttaggaaacagctaattaaatagacccaagtttaacccaataaagtgaccttggggcaagttactaaatttccttgagtgtcagatttatcatctggatttaataatctatattttatgttactatcaagaattaataagatgtatattaagttcagagccggctgctccccataattggtgtttaataagtagtgcaaagttttgcagttttggaactttaaaactattatgcttttggctttatattttttcaaaatataacccttcttatactttgaaaagcaaatattgtcagagccaaagatttattaaacttatctctttaaatagttatatacccagtgggaaattattctatatcaatgtatcttcaaattagataaaattctttatcagattttaatttactaattaattgaatgaagatgctgtttctttcataactgagtttcatatgattacttttttaggtsaattggcatgattttgctttttttgatcctgtaatgtatgagagtttgcggcaactaatcctcgcgtctcagagttcagatgctgatgctgttttctcagcaatggatttggcatttgcaattgacctgtgtaaagaagaaggtggaggacaggtaaagcaaatatacacttttctgattctggcaagagaatttggttaaactgctgtgcttgtcttatgtatagacagtttagttagggaatgaaagagatgaacgtgtgtgtacacataggagagatggatactgtmggtgttaaagatggatcaagagttagtgagacagactgmggtagaagggcttgtactttttgtgtgtgtgtgtgtgtkagatggagtcttgctytgtcgccaggctggagtgtagtggcacaatctcagctcactgcaacctcttgactccctggttcaagcgattctcctgcctcagcctccccagtagctgggattacaggtacgcgccaccacgcccacctaatttttgtatttttagtagagatggggtttcaccatgttggccaggatggtctcgatctcctgacctcatgatccacccaccttggcctcccaaagtgttgggattacaggcgtgagccactgcgcctggcggcttgtcctttttttggcctaaaatgtttccatctcttagattctggtcaaataaataattgtgtttatatttaaaaattttaggaactagttttataaacagtaatgttttactgctttgacaaaattgcctttaaatagcactggtaaatttttcacaggttgaactcattcctaatggtgtaaatataccagtcactccacagaatgtatatgagtatgtgcggaaatacgcagaacacagaatgttggtagttgcagaacagcccttacatgtaagtgtttctagaaagtgttgtgtgatccartgaggctatttgtgtcttaatgtgtggtaaactagctaagtatattcagcttrtttataaaaggacaaattttttaaaccaaaaggaatttatttacaatgtaaattacacctaagtttaagaatccagaccaagtactcattttctttttgataaaactacttggaaaaaccacgtcattgtgagaaagtagctttggcaaacaaaagtgtggaaagggtgcttatggtaccaaaatgactgttttagggtcctactgttttagtggtagagttattgagacagactgagaggtacaaaggctttttataccaaaatgtttccatcacttagcttctggtcagataaagaattgtctttatattttaaaatgtatgcataaaataatatatcttagtcctttgtcctactgtattagcggtaggaccctaaaacaatcattttggtactgcaaacagctttagttttatttaccaaagctactttgggtaacctgctaaaagaactcaacaggactcagaagcagttgtacttaatagttattgtttattgtagcaaaaggacccacagcaagatcagcaggggaagaaacaaacattaggcggagtcttgaggaatccaggtgcaggctttcaaagttctgtctcaagcaggggaatgagttattgcaaagaacacacttcttccactagtgaaatgtatcaacatgtatacattatttgtgcttagggaagcccactttagagtcagagctcagtgtttttattggaagctagttccatgggcattttctatctgcacaaccagccatgattactgaaattccagaatccctgaagaaagcacatgttcatcttgaactgcattgtttgcacaaatagtccaggcagtctgatacagcatggttcattgctccagacattcaaaacagccttaccagttagtaatgttggaatattgcaaaaaccaagttctcagacaccagccaatgccagccctactagtcaggcccttgtaaagagtaacatcaatcctactatgttaatgtcttccccatccagggtaaaaaaaaatatttttttttttaagacagtgtcttgctctgtcaccaggctggagtgcagtggcacaaccttggctcagtgcaacctccgcctcctgggttcaagtgattctcctgtctcagcctcctgagtagctgggactataggcgcgcgccagcatgcccagctaatttttgtatttttggtagagacggggtcttgatctcatgatctgcccaccttggcctcccaaagtgctgggattacaggcatgagccaccacacccagcctgtaaaatgtttatatagctttatgactgatggtgttgagtgtttctgatccctgtgctacaataattgtgcaggctttggagtcatactgttagagttgaaatcatggctctaccaccctctagctgtatgatgttaccaagttaagttttttgtgccttggttccctcctctgcaaaatgaggataagattaaattgaattaggtaaggtactaagacaattcctggcacatcataatttctcagtaagcatctagcttttgagtttgtgtctgggaggtttgttgttgtcaatttatctttcctgagatactgacagggtagcactttttaaagattgaagctattcttaatgactagcctgtttgttattaacaaaacttttaaaattgttaaatcactgggatataatactacttcactattgaacccatagcttattcactatgccttccctccccacttcctgcctttctctcttttgaatcctaagaaataaaaaatacaggactgaattttttttgctatctggcataaaatgggaactagcattgttagagaaggctgctaaaattatgtcttgtgctttaataatataaataaatgttacatggaaaatgaagtattattgtttctgaaattctctaggcaatgaggaaaggtctactagatgtgcttccaaaaaattcattagaagatttaacggcagaagattttaggcttttggtaaatggctgcggtgaaktcaatgtgcaaatgctgatcagttttacctctttcaatgatgaatcaggtaggacatttwaaaaaaatgtttaaagaatgaactatatagataggtcagtcagcattttctgagtttctagttcttaaggcctgtttatagggtttgggaaattgctgtattactcaagcattaaaacaattttttacattgtttttaaaggtatgtttgaagtaaatagtattttgatggcttagcattaggctattcttaactcttttactgcttaatttttctaggtttcaaaaaatatgaatacaaacaaaaatttttcatggtgagcaactgtgtaaaaaaggatttgtatatagtggttaagaaaaagtaatccatgtgacaactctctgggcttttctgattcatgttgcttaaactccctaatgaaagaatttgtatgatgattgctctatagagctggacccaaatcacacttctaaaaacacagtagcacacaaacacttcctagattcctagaatctaggaagaataaggagtggtagtgaaagtcctcttgaaagaaaaacttttatctccagtgtttgatttgctgcaattctttcttttgaaagtcctatggtctaggaataggctttttagmtgtgactgtacattagaagctccaagaagttctctgtgaaaggattatacctatattccaagattattatgtacacaaaggtactgatttttttcccctttatttttcctattttgcaagcagcttcagccaaattatatattgtaatartttttgtgctaccttgtaatacagtttttaatactaataagaatttgtctcatttacaaaccaaaaatttaggaaggaaaacagtatccaaataaactgcctaagatcttgccactccaagtatgatcctcagatcagtagcattggcatcatctgaaagcgttttagacaggcagaatctctggtctcccctctctgcattccccacccagtgaatgaatgagaatctgcatttcttgagatcataagaatactgacatacagatgagataaaactcatgtgaatatcagttttaaggctggtggttcatttgttttggtcatattgagtcaggattgactaatgaactgtagaggttttgcattatgcaaatgctcttaatttcttgtattaggaattagacgctcccccccaagtcttaaataatgttttaatctgtatccttttattataagaagattagtaatattctacagataataacaacaactggtatagtatattttatttacattcttcattcttaggagaaaatgctgagaagcttctgcagttcaagcgttggttctggtcaatagtagagaagatgagcatgacagaacgacaagatcttgtaagttaaaaatttcacaagatttgtagaaggaaatacagaagttaaaaataccatgtatgatggccttttaagtttgtaatggttggtcattttaattttgggtagggcaattatagaaggtcacaaataaggcagtttttgtttttctgctctataacaatatctgaagtattactaaagctctaagcagagtgaagtacatttagctgttaatatgctgtccttagtcccagaagataccagtttactgttgcaacatggctttttatctttatcgcactgcctacatatgcttctccctgtatacatccttaatccttttgactagtgccaagccttgacagaatttctgagtattatcttgattgttatctgcatactaggaagagagtagcttaattgtgatatgtgggtactaagtctttcaaaatcttattagtacagagccccagctaacttagaattataaattagataacagaagctttgatcttagtggaaagtctacctcttagtggaacttacgtccacccatcaagtaaaaccataaccaaatcatcctgtccattaatcttgaaaggcagtatgctgcagactttcttgtagaaatttgaaggacattccttatctagaagaccctggaagatcctttctgtactcctggaacattgccccggtctaaccagccttagttctaaactagaccacttctggaaatatttaaaaatgatcagatttctagatatatcctttattttatttgaataaggggaagtggttatttgtgcaggaaagaaaaaaattgcagattcccagttaccttcattcaggcagaagcttattttgggggtggtggagggaaggaggggaattcatgcttttagcactcctgaatctttacatggctctaggtgtattctaatatttctctgctatggtgagatgggtttgttcagcagtcctaactgccacctagttcatttctcagcttttagccaccctagtaattttgacttagtttgttccccaggtgggtttgatataattggtcagcatttgacttctccagtcttrtggctcttaaaagttcccactagtcaataccataactgtccctgttggtttcaggatcacctaaatagcttaagttctaccacctttagtcagtctttagattcagggcaccttgtttccttaagacaagccccatctcaagtctgtaagaaccaccaaaaacagaaaggattggctatctggtataagttctaagtcatctattttaatctatttcctagttttaatttctgccaggttttttttttttttgagacggagtctcactctgtcgctcaggctggagtgcagtggcacaatctcggctcactgcaagctccacctcccgggttcacgccattctcctgcctcagcctcccgagtggctgggactacaggtgcctgccaccacgcctggctaattttttgtatttttagtakagacagggtttcaccatgttagcctggatgatctcgatttcctgacctcatgatccgcctgycttggcctcccaattctgccgtttttaaaccagtatttcctcagtccagtcagccaacttaaatctcatgagtttctgccttctactgaaagaaaaatttgctagtgactcaatcttagaaaaaagaaaatctccttctataaagacctcaraatttcctgtcaacagctttagtttgtgaaccttaaactcttattgaaaatctatgtttagggtgtaagcagtttatcatggkatcttcctcccccttacccttctcctctttttgggaagtcatccttcacatattgtttggtttcatcctgatgcatctagaggacataagaatggggtttctgaaacagttctcccatgaattaattagtcctgcaacttatagggtttccagagttattgggtaaactacagtttatttccctcttggagtgttataattcactagtaaaagtatttctcttccaacttcttagagatccagcagtgaggtcatctaccctggttaaccacattcatccttggagaaacactttatattaagcttgtttcttatctatgaaatgagtggtttagatcaacttcatctctagagtacctgttttctatttcttttcagattttatagatcctgatacttaacttttttttttttttttctgtccctttatatagaattctagatgagctttcccatacaactgtgcttcaggaaatcttaagtttgtttaggtttcctagtcattctaggaaattggatatacttcattgttgtgcattataaaatgattagattaaaaaaaaagcttttccttaagagagacagacactgaagaatgatgcgtatgtatgaagggatggattgatgaggaatgttacatgttcagcaaactatttcagggaggcatatccttggttaagttaaaaagtgtaagttcacatttactgagcatcatttacactgtgttgcacaaagttttattacagaggtatgataaaacttagtgttaatatggcttattgcatgaattttgatgcatagatagatgttccccaataattactattataaaatgattctgtatcacaatgtagcagtaaatactttttttgctttattattttattatttgcattattttgctccttaatgcaaaataactttttaagataacctgtgtgagttttgaacctaagaccgtatcttttgtttggcagccttttttccactaatagacactttatggaattagctgcaagaaaggctcttagaaaccatttagtccaacagcctcatgttacagatgaaaatactgaggctctgtgacagaaagtcacctttttttcctctactaamtctagacttactcctttggggaaaaaaaacaaaaacaaaaacctgtcttgaggtatgaatgatccctttcctttttagtacaagaaaatatatttaaaatccagttcaaaataatatctccttttaggttattaacataacaatakggctttgtgtatatactgccagagttaagagttaaatattaacctgttaaattcctgttcaggtttacttttggacatcaagcccatcactgccagccagtgaagaaggattccagcctatgccctcaatcacaataagaccaccagatgaccaacatcttcctactgcaaatacttgcatttctcgactttacgtcccactctattcctctaaacagattctcaaacagaaattgttactcgccattaagaccaagaattttggttttgtgtagagtataaaaagtgtgtattgctgtgtaatattactagcaaattttgtagatttttttccatttgtctataaaagtttatggaagttaatgctgtcatacccccctggtggtaccttaaagagataaaatgcagacattccttgctgagtttatagcttaaaggcctaaggagcactagcaacatttggctatattggtttgctagtcaccaacttctgggtctaaccccagccaaagatgacagcagaacaacataatttacactgtgatttatctttttgctgaggggraaaaaatgtaaatgttctgaaaattcactgctgcctttgtggaaactgtttcagcaaaggttcttgtatagagggaatagggaatttcaaaataaaaaattaagtatgttctgtgttttcattttaactttttttatggtgtttaatttgtggttggctgcaactgtgtatcatgtatatggaacttgtaaaaaagttctcgacattcagatcttaagagatgaaatcacttttacctataaaaaccacttttattgcggtttgactgcattgagctctaggatattaaatgatatcactaatattttgcatgtaatttgctcatttgagtgagggcactttttttgtacatatgatggggccaatgcacaatacttttatcacaatcaactttttctttgtatccctatttcaatgagcagtcagtctcaagaggttactgcacttcagttctaactagacatttgtactaaggtatttcagttatgtaaactcagcctgggcactttctgataactgtaaaatgttttataagatcatgattattgaagatacattttggaaaattttaaatgttcgtgagcagcttaactacttttgtatctagccttttttaagtatcttgttacatttacttttttaaataaagaaattacagaagaaatgtcaagtaatattgaagaaacaatagtttttatttatgtagttgtacatttttaaactaagggcaatacactgacatggttatgtgcataaaaattttgacttaaagaactggaagtttatatacacctggactataagaaacagaagaaaatcagtccacattttacagttagcagagaatcctaaatggcactggcctggccaccttttcattttacaaatgggggaagtgaagtgtgaccccttacttggcataggaagttaacttacacctaataactgacaggtttttgttttgatgacctattaattatgtagcctaggattaatatcccaaaattactctggtttaagtagctttattcagtggcataataacactgttttcttccttaagtcttcaatgaagtgacttaaaacagtcactttacatattaaaaaygaggagagcaattctctggaatctctcctttcagttcctttgtaggatttctggccttgaggatagtcttcatgttcaaaggcactatgcttttattatataacttccttcagaagactgaaccacatgatattctcagccctgttaacactaaaaatatttaaaactgaatgatagtagtgactcattgtattacttaaaacttatataacacgctgtattagatgtgtgtaaattagccaaaggttattttacaaagtgagacattggtttttatgtctaaatgctatttctgaataaatgaaatagtaattagatcaagagctgattagcatcaatgtgtttgaaagatataaaatttatacatcaccttaacctctgtatgcacatgatgggattgataaaatattaaatgagaacaaactagatatgattaggacatttgaaaccctaattgtgaatttatttttaatagttactgaaatgaaaatatttaaaataatgcacaatgtcttaagtcttcctaaatcaagattttggttaaaaaatacttctaataatagtaaaagattttttttttaagtaaatcataaaacggttctaaatgtaaaataaagacatgtaaaataaagttctcttttggtcttgtttagtgtttaaatctaacaattgaaaacaaatttaggaagagaagaccaagaatgaactttactgagtgttttcagagtttgctactactatttttttccctaaatcatctggataccaagactatccagtaaaatggataactggggcagacttgagagggtattttaaaggaatgatttcactatttagtagctgcccccaaacaacatccctcccataaagatactatttttacattttaaaggtagtcagcaattcctatgtttaaactcaagttgagataatcccttgaggcagtagtttccatgcttctgtatgttgtaagattcatttgtaaagtttgttaatgcagattcttaagcattcctcatcctcttgcctcctttctgattcagtaagtctttggtggaggccaggaatcttcatgcagatcatcccaggtgattctgaaacactgcccaaagaatatttcctttttatttacaaatataaatgtcccgctgaaagctcctgagagccaaacctttcctacttagaactgcttacaatctatggaaaagtacatctattgataaactagtcctaggttggattcttcctactgataaggggctggttggaagtgccttcaatagactgtgcttgggtagtgaatgaaaatatttttactgtttatgttaacctatgtaagtaggcataaacatagattatttaaacaccatttgattaccacagaagtgatagttgtatgaaaaacaataggaatgtatttaaaatgtgacttttaaatttacctcaaggtatcttgggttaagcaaagtatcttctgtttctctaaattacttttattacagtacttactgtgtgccatgcatcttgttgagtgttccacatgtattattttaccccatgagaaagactattatgatcctcgagaggaatggagacacaggttaaacaacttgctcaaagttacacagctacttagtgctaaagtgaggtacatctccaagcattctggagcttgtatatactacacgttgtgctatagtattctgtggaaggtataagtgagttggtcataggataatcaaatattccgatgcaagtcctggctgcattatgaaaaggcagtaattcatatatttttgctaaatatttctaaaaaacacttttgtcctgcataattttccccaggataataatttgaagatatgagaactgtctaaaatcaaccatggtaccttaaaatgaaaagctaacttttttgttcttgagctttctcataaggtataaagagctgcttgctctaaaagagcagatgtttgtttcatgggtaaaataactcaattttctgaatcttttcagactctatttttagctgctaaactttaagtcagtagtttgcactgctacaggctgactttgatacaagtaggatctcttctggaaaaacattaccaggccatgtacttgtatctgaaatgctgtcttcaatggggaaggtgaaatttggctatttacgatgtttaaatgcattgtcattctctggcaagcttatggcatggttctgattagatgtgttttgagttagccctaagaaagtatctgtaaataaagtgcttcaggctcccaggtagccaactacatttttatatgttcagttttgtctaatgaaatcacaggcactgtgattggaaggcttatgtgacaatcacctttaatatatttactttttagtaactttacggaacaaatatctaaatttatgttgttttcttaaaaattctgcctacataaaaacagtcatagtgatcctcaactacccatatggaggagtgagtgaaaacaaaacagtcaactgggcgccgtgtctcacgcctgtaatcctagcactttgggaggccaaggcgggcggatcacttgaggtcaggagatagagcgcatcctggccaacatggtgaaaccccgtctctactaaaaatacaaaaattagctgggtgtggtggcacatgcctgtaatcccagctgcttgggaggctgaggcaggagtatcacttgaaccaggggttcagaggttgcagtgagccgagattgcaccactgcactccagcctggagataacagccagactccatctggaaaaaaaaaaaaaaagtcacattggcctcaaaatataggcactgaagtccaagtacagtgattaaaaggagagggtttgattcctagagtttttgatcatcaggttcctgctttaacacagaccagaaatagcaaaattaagatcaaggaagctagaaagatgaaggaagctagaaaacattcaaaaagcacaacagaatgaagccacttaatgtagaaatatttggttagcaccaggtctagaagtctgaatactgcaaatattgtgcctgctacataaggatgacatgcagcagctttatccaattcaaaaacagcactcaaggctaacatttactttaggtcaggatagttatccactaaaaactgttctatatactctggaagaaagtggagaagcatgcatttaaaaagatatgtccaatgttgattaagatgttttaaaagaaattctgtaacccgaaatacagggccttgatcaaagcaagcacttttttttttgagatggagtctcgctcttttgcccaggctggggcgcagaggtgcgatctcggctcactgcatcctctgcctcccagcctcaagcaattctcgcgcttgagtctcctgagtagctgggattacaggcactcaccatcatgcccagccaatttttgtatttttgtaaagacggggtttcaccatgttggtcaggctggtcttgaactcctgacatcaggtgattcgcccgtctcggcctcccaaagtcctgggattacaggtgtgagccaccgcacctggccctcactcatattttttgaatgaaagaatttatttctaaaaggtgccaaattatctggaaccactatattacctataataagtgcagcagtagagcactatatagaaaagctatggtccttgacctggatgagaagaaatgtacattttcttgatcacatgaacttcttggaagaattgtaaaacactgattctcttatttttaaaataaaactttagcagatcttgggacacctgtttaagggaggcaaaaacttgccaggtttaaggtacagcagctgaagtgtttaagtgatctgagaaagtgaaaaagaactaaggtttctgtgcaatttttttgtcattctgtactttcccctactgctaatgccctaaaccaatgcaagttgagtacagtaacaagagggtccctgccctcccacagctatgactttaccctaaaagcttcacagatattccaactctcaccactcttggtccatccatgtgctatctgaaactagtttatgtgctcattgtctgacttcccctagtgaccctacacaataatagcagaggctatcagaaactctatccttgttcacttctcttaagcccagtgtgtaccacaatgcctggtcaaaaatcatttatgaatcagtaaattatatagttcccatgtcagaaacggaatcattcaattccctctttacccctaacattcatattaaccatcaagccctacagttactatatattgaactcttgagttaatctacttctctccacatccactatcattacctaactttgtcaccaccttctacctagattatgtcaatagcttactaaccagtttctgtttattgttttgctccctttaatatgtagaggcagaacaagttctaaaatgcatattaaccattttactcactcacctgtttaaaatacactgactttccacggatggctatgtaagatgaagttcaaactcaacaaggcccttcatgattggatcttgctttacagccttatatttacttactatcttgttatactgaaagacttgcagtcccctggtgggttatgacctctatcgccttggagcctgtataaatacttgctccctctgaccttactgcccactctttatggcccctcatcttggaatggttagttcctattcataattcagaatccggtttacccacctctttgaggtgctctccttgacctgccctccaccctccaccttgacaaagctgttttactttctttgtactccgtctgaacaatgtatctgcttgattttcccttctactctgtaagttcctttagtgtaggaactctgtctcaattacctttttctctccagtgcctggtagaatgttaaatttattgaatggattcaaatgaccaacttcaatccaatttaggaacatactattgtaatctgttgtttttatctcacctggaactctgcacctttgaaatgttgtcttattatccaactctatgacccaaaactcctgtccttccaatgctctcacacttacgagtaaaagaaagttgtctcacttcttttcttctgcatttagcctagacatagcaacttattctgaaacagttaagagggaaaatgttctttgtactgaactcgaaattttttagaaaaaatctatattgcttgttgattcttttgcaaaaactgctttacttactattaatgtgacgggttgctaagtatggctttcaggttgtcacagctggatcagatcaatggctgagccaatcagttctgaaccacattactagaaacccccagttggatctcatgagaatcatgatcttgacatgtccaaaacaactcactattttcctactaagacttcatgggcaaaaggcactgctaactgcctagtctctggattagaaacttgtagtcattgctgggcgcagtggctcacgcctgtaatcccaccactttgggaggctgaggcaggcagatcacctgaggctgagagttcgagaccagcatgaccaacatggagaaactagtctctactaaaaatacaaaaattagccaggcatggtggcgcatgcctgtaatcccagctacttgagaggctgaggcaggacaatcgcttgaactcaggaggcggaggttgcagtgagccgagatcgtgccattatactccagcctgggcaacaagaacgaaactctatctcaaaaaaaacaaacaaacaaaaaaaaaaaacttgtagtcatcctagaatcctccctctaccctacactccatatccaaccactgatcaagtcatcttgagtacatttacttaactcacatgcacggattcttcttgcattccccaccaccactgccttatttcaagcttgctttatcctgtactgggcctattccaactagctctaaaccaatctaattccaaaattttcaccttccttcacactggaggccttcctgaattataaatgaatggctcattaaatatagacctgtttagtgattttcaaactagggttcaggatctgccaattttccacaagcatcttattttgattcttaatatatatatgcagtatcttgaattacctggttgaccatttatgatggcactgatgtcaaataatacataaaaacttaaagaatggaattaaatatgtaaatgacacatttgttccttatgaaaggcaactgataaaaagagttgtagaaaaagttatcccatggctacgatgcaaaaaaacatgcttcattaatggtcactataaaattcacactgatgcaatatagtttcagcaaagcaacatcatcatccattgcttttggttgtaaactggaattttaccatttctatagtcttgtttgtatttaatttatagatctacttttagttgtgtaaagctccaagaataaggagtttattactggtcttaggtttgtacatacttaagtaacaatacatatgtagtttaagtcaatatcaaagtggctgtgaaaatttttttatttaaaaggggttgaggccaggcacggtggctcacacctgtaatcccagcactttgggaggccagggcaggcggatcacttgaggtcaagaatttgagaccagcatggc

SEQ ID NO: 93230 - DNA, 92385 bp, Homo sapiens
  misc_feature (1)...(92385): n = A,T,C or G
gatggtctcgatctcctgaccttgtgatccgcctgcctcggcctcccaaagtgctgggattacaggcgtgatccactgctaccggcctgcgctttcccagagagcccagggagtcagaaaagataaggatttctcaaggtggcttggaaaatgtgtgtagtctggggacaatgaggttccatgtcttttaaaattttttaaattttatttctttttagagacagtcttgctctgtcacccaggctggaatgcagtggtgccatcatagctcactgcagcctcaaactcctaggctcaagggatcctcctccccaagcctctggaatagctgggactacaagtgtgcaccaccatgcctggctaacattttaattttttgtagagataatgtcttgccatgttgcccaggctggtctcaaactcttggcctcaagcagtcctcctactttagcctccccaagtgctgggattacagatgtgagccactgcgcatggcctaggctccaggtcttaataagaattttaagtagaatttaagctaggactcttgggttctaatctcggcatcaaagaaacacagttcagcaataacaatgtgaattttcaacctggacaacatagagaaaccattgtctctacaaaaaattagaaaattagggccaggtgtggtggctcacacctgtaatctcagcacttcaggaggccaaagcgggaggatctcttgaggtcaggagttcaaggccagcctggccaacacggtgaaaccccgtctctactaacaatacaaaaaaattaggcacagtggcacatacctgtagtcctagctacttgggaggctgaggcaggagaatctcttggacccaggaggcagaggttgcagtgagccaagatgtgcactctagcattacagcctgggtgacagaaggagactctgtcttaaaaaaaaaaaaaaaaaaaaattagccaggcttggtggcatctgcctgcggtcccagctatgggggaggcttaggtgaaggattgcttgagcccaggaggtcaaggctatagtgagccatgatcacaatgctgcactctagcctggggaacagaacaagaccctatctcaaaaaaagaaaaaataaaggtaaacgtaaattttaagcacttcattttttattcagttaaaacacacacacacatacacacacacacacaccaaggagagaagtacataattaatgcaaaacaaaaatcttaaaaatctagctggtatggtagcatgtacctgtagtcccagctactcaggaggctgagtggggaggatcacctgagcccaggagttcaaggctgcagtgagctgtgatcctgccaatccgctccagcctgggtgacagagtgagaccctgtctcaaaaaataaaaaaaaatctttaaaatctcttctctccacatggatgacagctattctcacaaatttcctctctctcactccctttactcctaaccaccccaaactctattgtgagaagacacctggactgtactgaacatagtaactgagagccccagctgttgctctgaaattcactgctgaaatttgcactgaggttacaccttccacgggctgctcccagcatagctgcggcaaaaatactttggctcctgtactccccaacaaccttgctgaactttccttaaaactgcacggtattctgagaagctcccacccaccttccttccttccctctcttcctgactggaggtcagatttgcattgcaatctcatgggcctcccagcttctcccactgtctccccactttttctcacaggtggttcctctaactgatttctttctttctttctttcttttgagatggagtcttgctctgtcgcccaggctggagtgcagtggcgtgatctcggttcactgcaaactccacctctcaggttcaagtgattgtcctgcctcagtctcccgagtagctgggattataggcgtgcgccaccatgcctggctaatttttctttttagtagagatggggtttcaccatcttggccaggctggtcttgaactcctgacctcaggtgatccccctgccttggcctctcaaagtgctgggattacaggagtgaaccactgcacctggcccccttaattgatttcttgcatgttaattcccctcttggcaattgcttctctgaagacccagactaaattgtgacctcttccatttcctccttcctaccattgcactcatctttgctgaaagttgtaactgactggcctagaatggccagaaaatgttggcacctcactgtcccccatccatcctcactccttgtggaaggaagtgaacaaatactctgaaatgtatcactgtccttcactttaaggagaactcatgaaaatttctggtaaataagactatctcaggatactactggtaatctattaggtaacacttaaagagtacttcacatttgctaggcattatgttagctgcttacatttaaaccttataacttggccaggtatggtggctcacatctgtaatcccagcactttgggaggctgaggcaggcggatcacttgagatcaggagttcaaggcaagcctggccaacatggtaaaactccatctctaccaaaaaatacaaaaaaattagccgggcgtggtggcacacgcctgtaatcccagctacttgggaggctgaggcaggagaatcgctttaacctgggatggggaggttgcagtgagccaagattgagccactgcactccagcctgagtgacagagcaagaccctgtctcaaaaataaataaataaataaataaaaataaaccttacaactctgaggtagaactattattattccaattttacagaagaggaaactgaggccaagttgtccaagtcacacagaggtaactggcagagttggaactaacctcaggacagtctaacaccaatgactgggctcttgttattatgtcatgggtaacaaactcagaacacaagggtttcacagatcaccccctctccacttttacagaggaaactgagatccttaggtgaatgaccctgtgttatccaggaagtcagggcagaagcaagatttgtacccaggtgttgactccaaattttcagctctactgtctcagaaagtgagaaaactaaaagatcagggtgactcctgtctcacaatggagaaaaaaactcaaacacagccaccagcggggggactaaggacaggaaagcagcctggagcatagtggtattaaagggcaattactggataattgcctcctacctccaacttcctcctacccccacccacctgccccaagctggagcttgcatgtgaggtctgaggaataacattacagatctatagaactatggagtgcccataggcagggcattaggacagtgagaaagaagtggagggagagaggactagctggaggaagcagttaggttcagtgagcctccctgtgttgggttttctactaagcactggttatctaaagttaaataagaaaaacttccttgcttctgaggatcaggatagactgcatggaggagatgatacctgagcaggtttcagagcctgaaaagacatagaggagggggcgaaaacctctggactcacatgcaattgcctatttgctagctcgattcaatttcacaaatacattctaaaggccttctctgcgttgggccttgttccaggtgctgggaccacagtggtgagcaaatcagctgcagtccctgacctttggctggagagtctgtctaggaagacagctaaacaatcttaacacagtgtgagatgtgctttatgtaaggaacctacaaggcactgtgggacaagggagtccaactgcccccaggccaaaagcaagtcccaatttctgaacatgaaaaaactcttcacaatctaatgccattctcactttccagtctcatttaccaccatttccccaaaagctgggaacacaacaaagtatgtgtgtgtgtctgtgtatgtgaatctgaacatgccaggcctttgctcacactgcttctgttccctggcatatggatgctttcttggagaaactctcctcaacacactcagccttactcaaattctctcttgtgctcccaaggcaatctgcctctctaggttgtccatctgcctctctaggttggtaaagtctttaaagcaaggacccaaatgcaaggtcaagagtacccattacggagttatacagatacaggtgggctttgcctagccaagaggctttggcctctaagctgccctctctatctagatgaactgttactactccaggaaatgcaatcagtactgatgtttagttcttggcacatggtaggtgctcaaaaatgttttctgagttgaattgcattaacattaaggtcataggtcagaatttgtactttatgaaggccctggctatgagctggatctgggaagggctcatgatcaactttagcagttttctgtggctaaaaatgagaaatataaaccatgttctttgtcttgaagacctgcctgttagtgggagaaacagatggtcaagctctcaacagtacaattccaaattcctagagcagtggttcttaaactttagcaagcagatcagaatcacctaaaggtcatctgctaaaacagatggctggccccagccccagagtttctgatttaaaggtctggagtaagttctgagaattcgagcttgcatttccaactcactcccaggtgatactgaagttgctggattgacaagattccctccttgatcaaacattggtcaggctcttctgagctctctctttgactaggcctgagtgtgggctcccatgtcattccttgtggaattccattttagcaagaaacttgccaagtcagtttagccagaatcctccattcttgatatctgattactctccatatctggttttgacccataccgccaccatcccccaggtgatgttcagttaccctgacctgccttgggcaggaatcctgttaggtcaatttagccagattccccgccaatgtttcctcttagtaattttccatccactgacttccacacactgccccttagctataaattaccactttgctatattcagcccaatcgctctgacttatggcaaaactctatccctacctctgtcagattgggcctgaataaagtttgccttaccattcttaaacatgaataattaagtgtcatgaatagttttttctttaatgggatccatactttgagaactactgattagaggttaagggtcctgtgctcattatctggcacatattaatgataggtctctgagtttgaatcctggccaaccacattgtcagtcttggcttttttttttttttttttttgagacagggttttgcccaggctggagtgcagtgatgcaatcacggctcactgcagcctcgacttcctgggccaagccatcctgccgccttagcctcccgagtagctggggtcacaggtgcaagccgccatgcccagctaatttttaatttttttgtagaggtggggtcttactatattgctcaggctggtcttgggctcctgggctcacctacctcggcctcagtcttgcctcttgatcaaatcactcatctctctgtgcttgatttacctcatctgtgaaatccagatagtaagctagtgcatggtaagtgcaaaaagcaacacctggcacaatgcttaataaatgttggttaaatcttataatcattttctgtaggaagtgggacgacaaagttaagggtctaggtggtcagagaagagcaaggactatgtcccttttttgtgcagccaggcaggccctgtactttttctctgcgcgaccctcctcgggcagcaccgggtctcgaactctcacgccttactcccaagcaggttctgtagtccagcccccgcggctccctacagccagccgatgctgcgcaagcgccgtacccacgctttagcacatgcgtactyaggtgcgccggtaggggacgcgccggcacagcaaaaatggcggcggcattacgggtggcggcggtcggggcaaggctcagcgttmtggcgagcggtctccgcgccgcggtccgcagcctttgcagccaggccacctctgttaacgaacgcatcgaaaacaagcgccsgaccgcgctgctgggagggggccaacgccgtattgacgcgcagcacaagcgagtgagtcctgaggggcctaagtgagtcccgcccctggcgtccgcgacctatcactgcgtgcccggcttgcggcgtccgaggcctccctgccaatccgcacggtgcctggaggggccggagcaagggtgttcaccttgaaaacctgtagcgtttctcgtggaggcgggtataaccagcagaagcacctgtgtgctttttcatactgtttaacccttgggatttagacggatctggctcgtctctagccagctcaacacttaacataagcttttgggcaacttattaaatctctgtgggtcattttaataataattcttccttcacaagtgtatcgttagaccatagatagcaaaaygataggcgctcagtaaaaaccatgtgcttattctcgtgccccatgaaagagtgatggtaggttctttctcctttgtggaagcaggaaaactgaacttgggcatactccactaacatgaaatgggggatgtgcgcgtgcaggaacttgtggaacttctgcccgcagaatgcctggtcgagctctttagggccttagcatgcctcgccttgatgggtagcaaaggcacgtgtcggaagcaggtggcctttctgggagtgcgcaggctactctcgatgtttggctggactgagcagttgaaacactgccacccaccgcctgggttttgaggcgagaatccagctggccttcagagataagctgggcggcccattttggagaggtgatccctgacttgaaaccaggcttgcccagtgtgtccgtgactggtgggtgagtctggaccgttgtgctgaacgaattaaccaacgggaaggtgcagaagtgaaactcttacagatgaagagtattcaggcacaactcacaaccatgagggaggcactgggggagggatggggtcttaaagtgaggagatttgaacagctctatatttgtctaatattgattcagatgtcataaattcgcatttgacaagggtccaaaggtaacagttccttttgacacttgagagtgaaatgtaaatttagtgatggtttgtggtgctaggagtgctttctctcccctggggctacttctaacctactctgttagggctgagggagatgttagatcatcctctggaaaggcctgtcagtgctcctgtacactctttctgttggggcctattgctcaattcttccctggaacatcgcctagccctttcccaggtagatcctactaggtttagatgaagcctccagaagctgtttttcttttgccaaagttaacttaggaggctgatttaatatgaaccccctcctgcacccctttttatttttatgttttgatacggagttttgctcttgttgcccaggctggagtgccatggtgcgatcttggctcattgcaacctctgcctcccaggttcaagctattctcctgcctcagcctcccaagtagctgggattacaggtgcccacgaccatgcctggcaactttttttttgtatttttagcagagacagggtttcaccatgttggccaggccggtcttgtacgcctgacctcaagtgattcacccaccttggcgtcccaaagtgttgggattatgggtgtgagccactgcacccggccctgcaccccttttaaaacaatttttgaccatttccgtagattttcccagaagaggaattagtgggtcaaagggtgtaagtttatttattttttttgagacagagttcactctgttgcccaggctagagtgcagcagctcactgcaacttctgcttcccagcttcaagcaattctcctgcctcagcctccagagtacctggggttacaggtatgtgtcaccacatctggctaatttttgtatttttagtagagatggagtttcaccatgttggccaggctggtcttgaactcctgacctcaggtgatccacccgcgtctgcctcccaaagtgctgggatgacagaatttttttttttttttccttgagacagggtcttactctgtcacccaggctggagggcagtggtgtaatcatggctcactgcatccttgaccttctgggctccagtgatccttccacttcagcctcctacccagctaatttttttttttttttttttttggtagagacagggtctcgctttgttgcccaggctggtctcaactcctgggctcaagcagtcctcccaccttggccttccaaagtgctgggattacaggtgtgagccgcagtgcctggtcagtataaatatattttaaaaatctgtatatatgttgccaaattggtttcctgaaaacttactctactttacatgacagtgtataggattgcctgttttttgttttgtttttttttttttaaatgcaacctcaccagctttggctactttcctaaggggaaaataatagccaatttgaggtattttttgtttgtttttgtttttttcggggagggggggataggacagtaggctagggtatttgcctcgggttgagagcttgggagtccaagcaatggaggtttttttttttttttttttttttttaagatagagtcttgctctgtcacccaggctggagtgcagtggcgcggtcttggctcactgcaagctccgcctcccgggttcatgccgttctcctgcctcagcctcctgagtagctgggactacgggtgcccaccaccacacctggctataattttggagttttagtatagacggggtttcaccatgttagccaggatggtctcgatctcctgacctcgtgatccgtctgcctcggcctcccaaagtgttgggattacaggcgtgagccactgcacatggcctctttttttttcttaagacagggtctcaccttgttgctcaggctggagtgcggtggagtgatcgtggctcactacaacctctgcttcccaggttcaagtgattctcctgcgttagcctcttgagtagctgggatttaaggcacgtgccaccacacctggctaatttttgtatttttagtagagacggggtttcaccatgttgagcaggctggtctctaacttttgacctcaggtgatcctcccatctcggcctcccaaagtgctgggatgacagaatttttttttttttttttttttcttgagacagggtcttactctgtcacccaggctggagggcagtggtgtaatcatggcttagtgcatcctcgacctctgggctccagtgatcctcccacttcagcctcctaccctgctagttattttattttattttattttttggtagagacagagtctcgctttgttgcccaggctggtctcaactcctgggctcaagcagtcctcccaccttggccttccaaagtgctgggattacaggtgtgagctgcagtgcctggtcagtataaatatattttaaaaatctgtatatatgttgccaagttggtttcctaaaaacttattctactttacgtgacagtgtataggattgcctgatttttgtttgttattttaaacacaacctcaccagctttggctactttcctaagggggaaataatagccaatttgaggtatgtggttttttttgttgttgttggggaaggggacggtaggctagggtatttgcttggggctgagagcttgggagcccaagcaatggcggcttttttttgtttgtttttgttttttgagacagtgtctcaccctgtcacccaggctggagtacagtggtgcgatcttggctcactgcaacccctgccccctgggttcaagcgattctcttgcctcagcctcccgagtagctgggactacaggtgggtgctaccaagcccagctaattttttttgtatttttagtagagatagggtttcsccgtgttagccaggatggtctcgatctcctgacctcatgatccgcctgccttggcctcccaaagtgctgggattacaggtgtgagccactgcggctagctttttttttttttttttttttttttttttwaaaagacaggttctcgctttgttgctcaggctggagcacggkggagtgatcacagctcaccacaacctccgyttcccaggttcaagtgattctcctgcctcagcctcttgagtagctgggattacaggcacgtgccaccactcccagctaatttttgtatttttcagtagagaccaggttttgccatgttgtccagctggtctcaaactcctgggctcaagcgatgctcgtctcagcctcccaaagtgctgggattacaggygtgagccactgtgcccagccgaggctcctggtagattgagagctctgacctcatctcctcaaagaagcttttttttttttttgrgacggagtttcactttgttgcccaggctggagtgcaatggtgcacaatctcggctcactgcaagctctgcctcctgggttcaagcgattcttctgcctcagcctcctgagtagctgggaagacaggcgcatgccaccacacccggcttattttgtatctttaatagagatggggtttctccatgttggtcaggctggtctcgatctcctgaccttgtgatccacccgcctctgcctctcaaagtgctgggattacaggcgtgaaccaccgtgcccggcccaaagaagcatttttaaactcttctcaagtgagctctttagcattttgtgtcccactccccttctactcagccactccctgctgtggggtcatctctgtgtcacagtgtcactgtcaggtgtggggtccctaaacaggggataggatagtaggagaaggagaagcccacagaggaggcaggagaagaaccaggaagtagcgtgtccttgaggtgggagctgggagcagtagggaccctcgtgaggtgaggtgtgcttctgtaggtctccctagaaaaaacctgtgtcagatccttcactaagcctgctttagtttccaccacctgcttctgcattctttttatggctccttaggtctccagtaagtatttgtggaactaattaattgtgttccagggtcaggttctccttatccccacttctctctaccttttcctcgtcctatttccttattcatcttccacagttgggtggcttctggcgcacactgtctgtcctgatttccatgtcatctaaagtctactaataacacctatctgccttgggcaggttggatagaatgaaagtacttgcattgagatcaacgggcaaatctgyccttcaagccctcccatgaacagcccttgctttgcttactaaattgtctgtgatgacatcactgagtgatctttkttccattgtagggaaagctaacagccagggagaggatcagtctcttgctggaccctggcagctttgttgagagcgacatgtttgtggaacacagatgtgcagattttggaatggctgctgataagaataaggtatttgttcaaatggtggtgtgaacactttttaggtgtggctcagctggcctacccactagaataataataaatctataaggcttttatctgaagtcctctgcagaggcactgcagacatcaagcccagataatttttgtatttttagtagagatgggctttcgccatgttggtcaggctggccttgaactcctggcttcaagcaatccacccacctcggactcccaaagtgttgggactacaggcgtgagcgaccgtaccctgccttgtgtttctttatacgtcctccttcatgtaagcatagagaagtggtggccctgggtcttgattgttttgcttttaggagggtacataaggcctaagatgacagtgccattcactcctattgatgaagtagtagccctgtgcttgctgttgtagagctgggaaagtggggtgggattccttcatgttccttgttcatattgacgttttaggaatttgggttttgtttttgtctttcattgaggcatagtggccaaactcattagaagaagtatttggattttttaacctttatttttgcatttttctggtagtttcctggagacagcgtggtcactggacgaggccgaatcaatggaagattggtttatgtcttcagtcaggtatttcataactccaatagtctgaacttttcttggagggcagagccaagaggaaaatatgtgaaagaagccaatcttggggaatgaaaacttgcttgtagtttggggaaaatgagggatttgctttgcttttcagtgcgtgtttccagaatattgtgtgttttttacttaggaagagtccttagtctgttttgggggggatcacagggcactagccttgtacaaaggtatcccaagaaccaggaatttattccaagtgaatgagattcctcttagctgggttgggtgtgtgcctgtagggcatctgtgtcctgggcagtgtatgtggactagagagagtgcagtgggtgcagcctcgcaaaggggacttgactctcagaaccagagtccccctgagctttgggctttcatgaatatgttcagaaaattttatcagggtgcatcaagacagatacagtttgttcacacacatagccaaagctatcaatatgttattttacacgcaaaagggaatgaaggttgttaatcagctggccttgcaatagggagagtagcctgatttatccaggtgggcccaatataatcacagggtccttaaaagtggaagagggaggtagaagaggagcttataaggatgtgatatgagaaggacatgatctgcagtacctggctttgaagatgggagaaggggaccatcagcaaaggagtgcccatggtctctaggagctggtaaaggcaagaaaacacattttcccctggagcctccagaagggagcacagtcctgccaaccttaattttagcccagtcaatcctgtgtagcgcttctaaattatagaactataagataatacatttgtgttgtttcaaggcactgaatttatattaatttgttatagcggtaatagaaaactaacacagaatatgttgtgtactattttggatttgacttttttctctccagaggtggaaatatgtatataatttaaaatgcttaggtctttttacagacctaaagtttgatattaaaattggctaggcgtggtggctcatgcctgtagtcccagtactttgggaggctgagatgggtggatcacctgaggtcaggagtttgagaccagctggccaacatggcgaaactccatctctactaaaaacacaaaaattagctgggtgttgtgggtgcctgtaatcccagctacttgggaggctgaggcaggagaatcgcttgaacctgggaggcggaggttgcagtgagccgagtttgcgccactgcactcgagcctgggtggcagagtgagactccatctcaaacaaaaaaataataaaatagttatacttggttaatttaaaatctgtcgtagttagtatgcatttaccaattaaattacctttgaaatgttttaaaactgttataaattggtctaccaaatgccgaaatagaaggaatcacatttgttttgtgcaatttatgagagctgagaaaaacttgtacagaaggaaccattgaaaagagagatagaacaaagatgttttctggacatgatgttcactcmccactattaagcagatggaaraattcactgaattgatacttttgaccacctcttatgctcatgtggtagggtgggagtgaggagaaggtggagatgactgagacaagagttcccaccctgaagaagcgaatcattttataggcagaatggcacagaacggatgtaactacagagcacatggagtgagaggttccaggcaaatgctgtagacccaagacaagggaaaatcacatccagggttgaggaaagctttaggaacaatggggcaattgagacaggccctgaaggatactgagggtagggagtgatgagctagtgttttttaatagtgatctccaagatgttaatatcttaggtgctttttctggggagcttctgttcttctggggagcctcctcagtcccttgcctgataattggctgttggtgtattctgagggggagagaaaaaaaggggccagcactcattcagtgtataggctcctaatcttgcatgttttcagcctcaccttttcctcttttaggctagcgattgtgagtttagaacccttctggttaatttcctttagagaacaaacattctctgtcctctcaaggtgaaggagaggccctgtggggtctgactgcttctaacagagacttctgttagtctctgttttcagcctccttctcacctccactttccatggttcctgggttgtcttctccttgattacccccactgcaggtgtgtaagcttccattctctccctctaaatcaggtattttcttgtgctttcagttccccccaaatttgtttaatccttcctatgctattgtctccttgttcttattctcacagctgattctgttcttaattcctaactgtctttttgagggggttttaggagaggttatgcccacaataagccctttacatctgaacataatgaagatccataagcagaagaagcagtgagagctctgattcttgttttttaacctttctttttaaaacagcaaataataggctgggcacagtggctcccgcttgtcatctcagcactttgggaggccgaggtgggtagatcacttgaggccaggagtttgaaactggcctagccaacatggcaaaactgtctctaataaaaatacaaaaattagctgggcctggtggcacgtgcctgtaatcccagctactcgggaggctgaggcaggagaatcacttgaacctgggaggcggaggatacagtgagccaagattacgccactgcactccagcctgggtgacagagcaagacttggtctcaaaatgataagtaaaataaaacagtaaatatttcttaaaaacagaagtgcttgactgtttgatatccatagaatctgatattagagttaattctgtgtgataggttttccttcagaactgcaaatcatttcttttttttcctttcaaatcatttttgtagagcaaagactagctcttttgctcttgacaattcatgaacttcctttaagatattttattctatggaataatctataaatcagacttcttttctaattttttaaacttctgaaaatgctttaaaaactatatgtatgtatttttttaaatacagagtctcgctctgtcgcccaggctggagtgcactggagcaatctctgcccactgcagcctccgcctcttggattcaagtgattctcctgcctcagcctcccgagtagctgggattacaggcacacaccaccacgcccagctaatttttatattttagtagagatggggtttcaccatgytggccagggtggtctggaactcttgacctcaagtgatcctcctgccttggcctctcaaagtcttgggattacaggtgcgagccaccatgcccgggcaactttttttgttttgttttgttttgttttgttttgttttgagacagggtcttgctctgttgcataggctggaatacagtggtgctgtctcaactcactgaagcctctgtctccagggctcaagcaatcctcctgcctcagcctcccgagtagctgggattccaggcatgtgccaccatgcgcagctaacttttttctatattttttgcagatacgggcttctgccatgtcgcccaggctggtctcagactcctggactcaagccatccacctgccttggcctcccaaagtgttgggattacaggcatgagccaccacgcctggcctaaaaacttttatctgtgaattttctatttcttcctcccactgggttttcatctctagccagtcactatatttgacttgctgatttgtattttctttttaggattttacagtttttggaggcagtctgtcaggagcacatgcccaaaagatctgcaaagtaagtgtttaatactcaaattcaatccattgctttcctcagttacatagtgcttwttgagtatctttggggtacaagacactgagctaggtacttggggtagggcagaggtatgcaagatgtgctaccaacccgaaggggtgcataacaattttcgtaccatggatctcttccatgggctggcaaagcctgaaccctcctgtttttacatgcctaaaataaaatttgtaggattttaaaggattaaaaatgtttttaaaaaccacatttagaatatacgtgctcccttgttaatgcatttaataacaagatttagcagtrgatctagtaactaccgtaatttcaaagtagtcaaaggtgaaatatttcagggtatctgcaacaactttaataggacgtaaaaatatctgtggcttctaataatggcaaatcacagatatttctaatactgaggctcattgcctatatcaataatgaagagaaatgttaacgatcagctagcgttagtaaagataaagatgtaaattttttcctgttcaagttcatggactcccgttcacagatctcttggggttctgaggatttcaagtgaagaacctcttgtctaggtggaagggccaggtgctagaaggtaaagaacagtgcgagcattgtatgctgatatttaaaaactactgctagagattagatgctctggagaggaataaaactataaataatagagaattttggaattaaagttggagctactagtaactggaacatctggattatagacatggtcctgtcatgtattactcctgagaccttgggccagtcacttaacttttaaaccttaatttttctcattttactccctctgttatgatgggtaaatgaggtaatggaagtgaaagtactttttaaactgtcaaggactgtaggaatattgcttattatgctgtcggaattactaacccatgaggaaaatctgtcacattagaagtaaaagcaggcccgggcctgccctcagattaacagatgggtcaacatctgctttcatgaaagkactactttgccattctgtctactgtaagttctgtcaaagcagtacctgggaacaaaactggctgctggaagacgttacaacgtgagcctgtggttctagaaatggttgccatgagttgttttatcccctgctaatgggaagtgctttggctcttgggtgtttgggggctttaatcagcctattaaatatctggtcctttgtcttccatgaaggtacccaatcgtgatggggagtgaaaccagtgttaytgcctcctgttttgaaaagtgcactcagaacgttttccagaaaacactgtggtattttgtgaatgtcgttttttatatcaagaacatttgtctcaataaaagatttctctgctgtctcagatcatggaccaggccataacggtgggggctccagtgattgggctgaatgactctgggggagcayrgatccaaraaggagtggagtctttggctggctatgcagacatctttctggtgagaaacctgttaatagagaataaaaaaatacagggcttaagttytctaagccatggcctggccagagcttctccaactctcctcattgttctctgccgcattgtgtctgttctgtgggtcctttctgtgtcactgggggtgggatgaagggtagatgaaaagcaagagagagtgggaagagagggttttcattttttctaacagagggccactcacaggggaaattacagttaaagatcgttcataagggaaaagcacttgaaaatgtttttctttttttgaaagcaagggagaggaaatatgaaaagttaaaatgaactgatgtgcttgaattagaagttttaaaaaatgtagcaccttttttattttttagttaaaacactacaggattattaaataaagtccaagccacagtgcaaagaagaatgaaatcaccccagatcctaccattcagaaacatttggcgaacctcattactgatatctctttgcttatttacagactgaaattatgagagaaagaaatgaaaagaaacataaaataatgtgttatgtgaagtataaagtatatttgtgagagatacagtaagaggctgggatgagggagagagatactgcagacagaaactggcaacatttccagggagaagaaaggaaggagacaggcagacattgtttttaatcaggccagccactcttatcatccctgctctgcaggcttacttctgtggatggcttggcctaagcagtttaggcctggaagtcattcctgtttagaaacaaaagagcggccctcagagacgtggtgataaaccaccacattttagagcttgactggattttagaatatcatctagttgaatacatctttatgggtctggaggaggttttttttttttttttttgagacagagtctggctctgtctcccaggttggagtgcagtggcccgatctcggctcacttcaacctctgcctcctgggctcaagtgattctcctgcctcagcctcccgagtggctgggactataggcgtctgccaccacgcccagctaatttttgtatttttagtagagacggggtttcaccatattagccaggttggtctcgaactcctgaccttgtgatccgcccacctcggcctcctaaagtgctgggattacaggtgtgagccmccgcgcccagctggtttttttttttttttttaatatttatttatttagagacagtgtcttggttggccaggctggaatgcagtggcatgatctctgctcactgcaacctcagcctcctgggctcaagcgatcatcccacctcagtctcctgaatagctggcaccacaggcatgcaccaccacatccggtgaatttttttttgtattttttttatagaggcggggttttgccatgctgcgcaggcttatcttgaacttctggactcaagcgattggcctgcgtttgcctcccaaagtgctgggattacaggagtgagtcaccacgcctggcttttaatttttgttttcaagggctagtctttactttcagatcttcattgcttaattaattgcttactaatgctgcttgtcatattgatacctccactcacttattcctgcctgtgttattttttggtaactttttattttgataaaatttcaaacttcagcctgggcacggtggctcacacctgcagtctcagcactttgggaggccaaggcaggtagatctcttgacgtcaggagttcaagaccagcctggccaacatggtgaaatcctgtstctattaaaaatacaaaaattagctgggcatggtggcacatgcctgtaatcccaactactcaggaggctgaggtgggacaactgcttgaacctgggagacagaggttacagtgagccaagattgtgccattgcactccaacctgggtgacagagcaagactctgtctcaaaaaaaaaaaaaaaattcaaacttcacagaaaaatgacaagaatagtatgggaactcctatatgtccttttcccarattcaccagttgtttacattttctccatttgttctgttattctctctccatatatacatatttgcatgttacatttttctgaaatatttgagaataaatkggagatactatgtcttctttacctcctaagttcttcattgggtatttctaaagaataaagatattctcttaaataaccagaatacagtaataaaaatcaggaaatttaacatcgattcatcgatgttattctaattcattatccttattcaggacttaagtcctttatagtgtgtgctctgggcatgtgtgcactttctatgtgcgcgctctcgctctttctgtctctgtctctcatatatatgtgtgtgtgtatatatgtatatatatatatgttcctcctggccaggatccaatccagaataaagcattgactttagatgttatctctttttaatcttttttgatctggagcagttcctgtctttgttctccatgatcttgatattttaaaaaatagctttggccaggtgtggtggctcacacctatgatcccagcactttgggaggccgaggcaggtggatcaygaggtcaggagatcaagaccgtcctggctaacacggkgaaaccccatctctactaaaaaaaaacaaaaaattagccaggtgtggtggcgggcgcctgtagtcccagctacttgggaggctgaggcaggagaacggcatgaacccgggaggcagagcttgcagtcagccaagattgcgccaccgcgctctagcctgggcgacagagcaagactccgtctcaaaaaaaaaaaaaaaaaaaaagagcttaatgcttaatagggccgggcacggtggctcatgcctgtgatcccagcactttgggaggccgaggtgggtggatcactaggtcaggagttcaagaccagcctggccaagatggtgaaaccctgtctctactaaaaatacaaaaattaggcgggcgtgatggcgagcgcctgtaatcccagctactcgggaggctgaggcagggaattgctcgaacctgagaggtggaggttgcagtgaactgagatcatgccactgcactccagcctgggtgacagagcgagactccatctcaaaaaagaaaagtagctttattgagatataatttacaaaccataaaatccacccattgtgaaaatataattcagtaattttaaattaatttttagagttgtacagccataatctagttttcaaacctgccactcactccaaaaataccttcttgcctgtttgcagtcagttcccacctaaccacagtcaattcctcacccaactttcttattttacaaatttttccatctgactcctttcactaagcaccatgttttttgaggttcatttatattgtaatatgtatcagtttgttcctttttattggtgaataatatctattgaatattttatgtattttcatcatttaccagttgaaggatatttggattgtttctggttcctggctatcatgagtaaatgctactgtgaacatttgtgtattactttgtgtggatatatgttttcataacccttggatagataggtacctaagagtgggattgtaggttttatgataagcttgtttataactttttaagaaattgccagatggttttccaaaacaactaaaccatttacattaccatgagcaatgtgttcagggttgcaggttctccatatctttgttgatacttggtattgtcagtctttttttgtttttttttttttgagacagagtcttgccctgtcgcccaggctggagtgcagtggtgcgatctcggctcactgcaagctccacctcctgggttcacgccattctcctgcctgagcctcccgagtagctgggactacaggcacctgccatcacgcccggctaattttttgtatttttagtagagactgggtttcaccatgttagctaggayggtctcgatctcctgacctcgtgatctgcccacctcagcctcccaragtgctgggattacaggtgtgagccaccaccatgcccrgccttggtttttttttttttttgagatggagtctcactctgtsgcccaggctggagtgctatggtgcagtctgggctcactgtaacctctgcctcccaggttcaagtgattgccctgcctctgcctcccgagcagctgggattacaggcatgtgccaccatggctggctaattttggtatttttagtggagacagggtttcaccatgttggccaggctggtcttgaactcctgacttcaaacgatccatctgccttggcctcccaaagtgctgggattacaggcgtgagccaccgcacccagccagtctttttttgagacagggtctcactctgttgttcaggctggagtacagtggcatgatcacagctcactgcagcctcgacctcctggggtcaagcgatcctcctgcctcaacctcccaaagtgttggaattacaggcgtgagccactgtgcctggtccagtctttttgactatagccattttagtggtgtgtaatggtatctcactgtagttctagtttgcatttctcagatgactaatcatgttgagcatctttatgtacatattagtcatttgtaaaccttctttgctgaaatgtctattcagatcttttgtccatctcgtaattgggtttttgagttgtaagagttcttcatatattctggatacaagtcctttatcatatatatgatttgtaagtattttctcccagtctgtggcttgtcttttctttcttagtggtagctttatttttatttttattttttattttttgagacagcctcaccctgtcctccaggctggagttcagtggtgtgatcttagctcactgcaacctccacttcctgggttcaagtgattctcgtgcctcagtcacccaagtagctgggattacaggtgcatgccaccacgtccagctaatttctttgtatttttagtagagatagggtttcaccatgttgcccaggctggtcttgaactcctgagctcaggtgatctgcctcccttggcctctaaaagtgctggggttacaggcgtgagccagcacactcagcctatttttattttattttttagagacagggtcttgctctgttgcctgggctagagtgcgttrgtgcaatcacagctcactgcagccttgaactctgggctcaagcaatcctcctgccttagcctacggagtagctaggactataggcacacactagtacacccagctaatttttgaaaaatttcttttgtgtgtagagatggggtcttactacattgcccagcctggtcttgaactcctggtctcaagcgatctgcctcggcatcccgaagtgcagggattacaagccactgccccaagcctgtggtggctttttttttgagctagggtctcactctgtcacccaggctgaagtgtagtggtgtaatcatggctcactgcagcctggacttcccggggtcaggcagtcctcckgcctcatcctcctgagtagctgagaccacaggcacatgctaccacatctggcaattttttttcattatttgtagaggtgagggtcccactatgttgcccaggctgktctcaaacttctggacttaaactgtcctcctacctcggcttcctagagtgctggtgttactggcatgagccgatgtgcccagcctctggtggcttttgaggtggagaagtttttaattttgaagtccagtttatcaagttttcttttgtgggtcatgcttctattgtcatatgtaaaaacttgtaatacaaagtcatgaagattttgttttcttcatggagttttttttgtaggtttggctctttttttttttttttttttgagatggagtttcactcttgtcgcccaggatggagtgcaatggcgctatctcagggattatgggtgcctgccaccaaacctggctagtgtgtgtgtgtgtgcgtgtgtgtgtgtgtgtgtgtagatatatatatatatatatatatatatatatatatgtatatatatatatatatatctacatacacaagtacatataagagagcccagccagctttcttatagtaggtctgtgatccattttgagttaatttttgtatatggtgtgacagaagagtctaacatcactcttgtctcccaccattaattgacataactattctttccccattgaattgtcttgacacattgataaaaatatcagttgatcataaatgtaagggtttgtttctgaactctcagttcttccattgttctatgtctgtccttaaaatagaaccacactgtcttgattactgtagtttataggagttttgaagttgtgtaaaatcctccaacttggtttttttttttttttttagatgtagtctcgctttgtagcccaggctggagcacagtggcatgatctcagctcactgcaacnnnnnnnnnnnnnnnnnnnnnnnnnnnnnnnnnnnnnnnnnnnnnnnnnnnnnnnnnnnnnnnnnnnnnnnnnnnnnnnnnnnnnnnnnnnnnnnnnnnnnnnnnnnnnnnnnnnnnnnnnnnnnnnnnnnnnnnnnnnnnnnnnnnnnnnnnnnnnnnnnnnnnnnnnnnnnnnnnnnnnnnnnnnnnnnnnnnnnnnnnnnnnnnnnnnnnnnnnnnnnnnnnnnnnnnnnnnnnnnnnnnnnnnnnnnnnnnnnnnnnnnnnnnnnnnnnnnnnnnnnnnnnnnnnnnnnnnnnnnnnnnnnnnnnnnnnnnnnnnnnnnnnnnnnnnnnnnnnnnnnnnnnnnnnnnnnnnnnnnnnnnnnnnnnnnnnnnnnnnnnnnnnnnnnnnnnnnnnnnnnnnnnnnnnnnnnnnnnnnnnnnnnnnnnnnnnnnnnnnnnnnnnnnnnnnnnnnnnnnnnnnnnnnnnnnnnnnnnnnnnnnnnnnnnnnnnnnnnnnnnnnnnnnnnnnnnnnnnnnnnnnnnnnnnnnnnnnnnnnnnnnnnnnnnnnnnnnnnnnnnnnnnnnnnnnnnnnnnnnnnnnnnnnnnnnnnnnnnnnnnnnnnnnnnnnnnnnnnnnnnnnnnnnnnnnnnnnnnnnnnnnnnnnnnnnnnnnnnnnnnnnnnnnnnnnnnnnnnnnnnnnnnnnnnnnnnnnnnnnnnnnnnnnnnnnnnnnnnnnnnnnnnnnnnnnnnnnnnnnnnnnnnnnnnnnnnnnnnnnnnnnnnnnnnnnnnnnnnnnnnnnnnnnnnnnnnnnnnnnnnnnnnnnnnnnnnnnnnnnnnnnnnnnnnnnnnnnnnnnnnnnnnnnnnnnnnnnnnnnnnnnnnnnnnnnnnnnnnnnnnnnnnnnnnnnnnnnnnnnnnnnnnnnnnnnnnnnnnnnnnnnnnnnnnnnnnnnnnnnnnnnnnnnnnnnnnnnnnnnnnnnnnnnnnnnnnnnnnnnnnnnnnnnnnnnnnnnnnnnnnnnnnnnnnnnnnnnnnnnnnnnnnnnnnnnnnnnnnnnnnnnnnnnnnnnnnnnnnnnnnnnnnnnnnnnnnnnnnnnnnnnnnnnnnnnnnnnnnnnnnnnnnnnnnnnnnnnnnnnnnnnnnnnnnnnnnnnnnnnnnnnnnnnnnnnnnnnnnnnnnnnnnnnnnnnnnnnnnnnnnnnnnnnnnnnnnnnnnnnnnnnnnnnnnnnnnnnnnnnnnnnnnnnnnnnnnnnnnnnnnnnnnnnnnnnnnnnnnnnnnnnnnnnnnnnnnnnnnnnnnnnnnnnnnnnnnnnnnnnnnnnnnnnnnnnnnnnnnnnnnnnnnnnnnnnnnnnnnnnnnnnnnnnnnnnnnnnnnnnnnnnnnnnnnnnnnnnnnnnnnnnnnnnnnnnnnnnnnnnnnnnnnnnnnnnnnnnnnnnnnnnnnnnnnnnnnnnnnnnnnnnnnnnnnnnnnnnnnnnnnnnnnnnnnnnnnnnnnnnnnnnnnnnnnnnnnnnnnnnnnnnnnnnnnnnnnnnnnnnnnnnnnnnnnnnnnnnnnnnnnnnnnnnnnnnnnnnnnnnnnnnnnnnnnnnnnnnnnntggtgacagagtgagactctgtctcaaaaaaaaaaaaaaaaaaaaaataagagtggacatccttgtcttgttcctaatcttaaggagaaagcattcattcttcaccattaagcatgatgttaactggtgtgtgttttttttttttttttggacattctcttgaaggttgaggaagttcctttctacttctaattttttgagtgtttttatcatgaagggtatttaatattgtcaaatgcttttttctgcatctgtgagataatcatgtgttttttgttctttattctaatgatatggtatgtaacattactggtttttagaatgttaaaccaaccttgtatttctgtgataaatcctacttggtcatggtatatcatccttttttggaaggtgctgggctctgccagtatttccttgagtacttttgaatcaatattagtaagaaacattgacctacagttaccttgtgattttttcttttggttttggtattacagtaattctcacctcatagaatgagttggaagggttgcctctgtgaggtaggttccctatgcactggttatgaacttttctgatttcagtaagayagaacactcacacaagttacatgaagtgcccggccacatctgttgttttttgacatttttttttttcccgctgtaggcagagtcttgctctgtttctcaggctggagtacaatggcgcgatctcggctcactgcagtctccaccttgtgggttaaagcagttctcctgtctcagcctcccgagtagctgggactacaggcacacgccactacacccatctaatttttgtatttgtagtagagacagggtttcaccatattggtcaggctggtctcaaactcctggcctcaggtgatccacctgcctyggcctcccaaattactgggattacaggcatgagcccctgcgcccggctgttttttgactttttaattatggccgtttttgtaggagtaaggtggtatctcattgtggttttcatttgcattttcctgatagtgatgtgagcattttgtttcatgtttgttggccatttgtatatcttcttttgagaaatgtctattcatgtcctttgcctactttttgatgggattattttttcttgctgatttgagttccttgtagattctgcatactggtcctttgtcaggtgcatagtttgcaaatattttctccagctctgtgagttggctctttgctgattacttcttttgctgtgcagaagctttttagtttaattaggtcccatttatttttgtttttgttgcattagcttttggggtcttagtcatggattttttgcctgggccagtgttcagaagagtttttccaatgttgcagaatttttatggtttcaggtcttagatttaagtcttggaagtctggtaatgtgatgccttcagatttgttctttttgcttagtattgctttggctatctggactcttttttggttccatataaattttaggattgtattttctagttctgtgaaaaatgatgatggtaatggtagtgttttgatgggaattgcattgaatctgtagattgctttgggccatatgatcgttttcacaatattgattcttacctccatgagcatgagatgtgttttcatttgtttgtgtcatgtatagtttctttcagcagcgttttgtagtttcacttgtagagatcttcacctccttggttaggtatattcctaggtattttattttattttttgcagctgttgtaaaaggaattgagttcttgatttgattgtcactttggttattgttggtgtatagcagagctatttatttgtctatattaattttgtaacctaagactttactgaattcctttatcagatctaggagtcttttggatgagtcgctagagttttccaagtatatatgatcatatcactgataaacagtacttgtttgacttcctcttttccaatttggatgccctttatttctttctcttgcccaattgctctggataggacttccagtactatgttgaatagaagtggtgaaagtgggcatccttgtcttgttccagttttcagggggaatgctttcaacttttccccattcattacgatgttggctgtgggtttatcatatattgcttttactattttgaagtatatccctcctwtgcctagtttgagagttttttgtcataaagagatgctggattttattgcatgctttttctgcatgcaattgagatgatcatatggtttttgttttaaattctgtttacgggatttatcacatttattgacttgcatatgttaaaccatccctgcatctctgggatgaaactcacttgatcatgttgtattatctttttgatgtgctgtgggatttggttagctagtattttgttgaggatttttgcatccatgtttatcagagacactggtctgtagttttctttttttaatgtcatttcctggctttggtattagggtgatactggcttcatagaatgatttaggaaggattccctctttctcaatcttttggaatagtttcagtaggattggtaccaattctttgaatatctagtggaattcaactgtgatccatctggtcctgggcttttttgttgttggcagtttaaaattactgattcagtctcactgcttgtttttggtctgttcagggtttctgtttcttcctgatttagaggattgtatgtttccacgagtttatccatttcctctagatttttcagtttgtgtgtgtaaagatgttcatgttagtcttgagtgatcttttgtatttctatgatattggttataatatttccagtttcatttttcattgagcttatttggatctattctcttcttggttagtctaatggtcgaccaattttgtttattttttcaaggaaccaagtttttgttttattttttgcttcaatttcctttagttctgctctgatctttgttatttcttctgctggcattgggtttagttcgtacctgtttctctggttcattgaggtgagacagtagattgtcagtttgtgttctttcagactttttgatgtatgtacttaaaactatgaactttcctcttagcactacttttgctgtatccccagaggtttttataactgtgtcactactatcattcatttcaaatttttaaatttttatcttgatttattgttaacccagaaattattcaggagcagattatttaatttccatgtatttgtatagttttgagcatttcttttggagttgtttctagttttgttccactgtagtctgagaagatacttgatatgatttcaattttcttaaatttgttgagacttgttttgtggcctgtcatacagtctatcttggagaatgttccatgtgttgaggagaagaatgtatattctgcagttgtttggtagaatgttctgtaaatatctgttaagtccatttgttctagggtatactttaagtccattgcttctttgttgagtttctgtctcaacaaaaagagtctagtgctgtcagtggagtatcgaggtcccccatttcactttgttgctatttcatttcctaggtctagtagtaattgttttataaatctgggagctccagtattaggtgaatatgaattcaggattataatatctttttgttggattgttccttttattatataatgaccttctttttctttctttttttttttcttttttcttttttttttttttttttttttactgttgttgctttaaaggtctattttgtctgatataagaatagctactttgcgaggccaagacgggcggatcgcgaggtcaggagatcgagaccatcctggctaacacggtgaaaccctgtctctactgaaaatacaaaaaattagccgggcgtggtggcgggtgcctgtagtcccagctacttgtgaggctgaggcaggagaatggcgtgaacccaggaggcggagtttgcagtgagccgaggttgcaccactgcactccagtctgggtgacagagggagactctgtctcaaaaaaaaaaaaaaaaaaaaaaaaagaatagctcattctgcttgcttttggttcccatttgcatgggatatctctttccccccctttaccttgaggttatatgaatccttatgtgttagatgactctcttgaagacagcagatatttggtttgtgattttttaaaaatccattctgccattctgtatctaagtggatcatttaggccatttacgttcaacattaatattgagatgtgagatactgatctgtttatcattttagttgttacttactttgtttttttttcattgtgttattgttttataggccttgtgggttttatctttcaagaggttttattttggtgcatattgagcttttgtttcaagatgtagaactcttctgaagagtaatgctggtttggtagtggcagattccctcggcatttgtttatctgaaaatggctttatctctccttcatttaggaaacttagttttgctggatgcaaaattcttgggtggcagttattctgtttaaggasgctaaagatagaaccccaatcccttctagcttgtaaggtttctgctgagaaatctgctgttagtctgattggttttcctttataggttacctgatgcttttgtctcatagctcttaggattctttccttcatgttgactttagatagcccgatgactatgtgccttggtgataatctttttgcaatgaatttcccaggagttctttgagcttcttgcatttggatattgaaatytcaggcaaggccagggaagttttcctcaatgattctctcaaataagttttctaaacttttagccttctcttctccctcaggaccaccamgtatttttaggtttggttgttttacataatcccatatttcttggaagctttgttcatttcttctttcyttttttttttttctttcttgagatagggtcttactctgttgcccaggctgtagtacagtgttgtgacctttgtctcctgggctcaggcaatcctcacacctctgcctcctgagtatctgggactacaggcacatgccaccactcccggctaatttttatgttttttttgtagagatggaaatttgctatgttgctcaggctggtctcaaagtctgggctcaagcagtccacctgccttgccctcccaaagtgctaggattataggcatgagacactgaccccagcctatttatttcttttgattcttttttctttatttttgtctgattgggttaatttgaaagccttgtcttggagctctgaaattcattctttsacttgttctggtctattgttgaaactttccattgcattttgtatttccctaagtgtgtttcatttccggaaattctgattgttttttctttatgatatctatgtagaaaatttttccttcatattctgaattgttttttaagttttttttttatgttggttttcacctttctatggtgtctccttgagtagcttaataatcaacctactgaattatttatctgattatttcaaatatttcgttttagtttggatccattgctggggagctagtgtgatctttcgggggtatgatagaaccctgttttgtcttataccaaaattacttttctggttctttctcgtttgtgtagagtatttcttctaattgttcttgaatttatttttgatttggctgtggtttttttaagtttctttttcctcttcactaaggatgtgactttagtgtttatagtttattatagcctaatgtgattcttaatgcttttagggggaagactgtatgagttccttggctatagagagtctttgtatgatggcttctttagatgctggttgtatttatttatttatttatttatttttgttgagatggcgtctcgctctgtcactcaggctggagtgcagtggcacaatcttggctcactgcaacctccacttcccgggttcaagtgattctcctgcctcagcttcccgagtagctgggactacaggtgtgcaccactacgcctggctaatttttgtatttttagtagagacggggtttcaggatgttggccaggctggtcacaaactcctgacctcaggtgatccacctgccttggcctcccaaagtgttgggattacaggcgtgagccactgcccctggcctgtatttaatagatawgtacttgatgtgtgggcaagttcactgtctcctatggggttgagatggaaaggtctcttgaagctcatctcattcccctgtggtgtgygcttttttatttatttaatttttcccctgtattttatttactaagttgatggttaaggcttcaggccagtaggggagctgtccctgggtaggaaccagttgtggstaaagcaaatgggtaaatgcaatactcagtaaggcagagaggttccacccttgatgaaagtggctgggggaactctcaattagatgcactgaggtcttatcaaggggaagggtgggagccacctcagctcctttgccaggccagtaggaaagctattcacctcccagactcgctcctgccctagtgttccagctattcggatcagacaggcatctcttttcatctgtaggactgttgttgttccacacagagaggaatttgtgactctgcctctcttgcaagcctgaacttgggccagggcgggggtgggggttgggggattcctcctgtggagatgcagtcactctgtagtgttccaggaaggctgtctataggtycacctttgccaagctcctgtggagaagccccaactgtgtctgtgtagtggtggacaaggtgggagagaagataccttctccaggacccttcatgagcagcaaagctgcctgattgttggggtagagctgcagactttcccttctgagcccagcactgcaattgtgtctctgctgaaaggaacttcccatcagtggaaagatctggaactcaaggcctgccatctgaattcttttgtcccatggggtattcccttggtgtggtggtctcctccttcccttaggagtaagaattcctgagagccaggataagttgattgctattcttctgggtctagccacccagtggggctgcccaactccaggctggtgctggggaatgtctgcaagggatccggtaatgggacctgtcctcaagtctcccagcaagggatataccaacactagtgctgatgggagtgtcaggtgagtgaggtagactctttgaggttccttggttacagaaagccttagtgtgctggctttctcgaatgctggttataatagtagtgaactggtcacgtggacagatgcaggacctcctggttagccagggttttgcaggcartgatgatagcttaggtcatgcactggttttctcctttctgttcacagtgttattctacctagagatgctgtagtggactgtgttggttggcatccagcctggaggtagcgtttacaaaagggcaccagctgcagtagtagcagtgggattcgagcttgtcctgtgttgcccaggaggtattctggtttctcaggtgacaacggggkccataaagctgccaaaagtttctgtcctttgtattaagtaaccagggtgggtggaggggtacagccaggtgggggctgggtcaggtgggtctacactctgtctctccatgtgtggggaaagccgtggctcctatgagggttgggggggcggttctcaggtcattagggtaatgttccagagaggaatataactgcctctactgcacagaagagatcgcacagtgtgtggggagtaacaggtggcactaagcctcacccagatcccacacggtcggaaaggcagatctcactccctctgtgctctgctagctgcactgggctaagttccaggcagcctaggctcagaactcaaacctgccccaggccataagctttccctgtgggaaagcagctgtggctttcaggccatgctcctcccaggccacctgcagggccaggcacctggctcctgcacttgtggctgcagtgcacttccccctgcccctgggaggtatgggttctggacaaaggagttcatcctcactcagtgttatatcttgaaatggggagattctttcaaccwgcgaccactacctgagcttgttggctgacttccccaaggtcccctgtgaggtacaataaagaatggcttaccttggtctgcactggagactgggaatgcctgcaaagcacttcccgccactgtttctacttttatatttcttactgctccctaaatcagtcccagccctgggtaaggttaaggccttcccccatggcctggattttcaggttccccagtgggaacctgaaagcagyttctctctatctcacactctggagacttacagtttttcccttgtcttatggtttaggctgcagactgccacttctttaaaaggtctgtggattctttcagttttcctgttaagttcctgcgtggcttcttggaaaaagagtcaccatgtgattctcaatacactattctgttcttctaagtgggagaggcatgctaacactgcttcttatctgccatcttggtgggggtggaaaaaccaaaacctctcaaagtattttctaacttctcttgtagattcttcttttgcctattgcttatttagaagtgttttgattaatttttacgtgtttgtgaatttttcagttttcctattgttattgaattatagttttattccattgtgatcagaaaagatgttttttatgattccaatcattttaaatttaagatttgttttgtggattaatgtatggtctctcctggagaatgttgcatatgcacttgacaagaatatatactctgttgttgggtggagtgttctctataggtcttttatatgtattagttcatagtgttgttcaagtgtactgttaacttaccgatcttctgtctagttgttctgtctgttattagaagtgaggtgttaagtctgcaactattattgtgcacctatttctccccacaattctgttaacttttgctttgtgtattttagggctcttgttgcttcatagattttggggctctgttaggtgtgtatatttttttaactggtatattttctagatgtgaaccttttatcaatatgtctctctagtaagtttttgatttaaagtctctttagtctgatagtaatatagccacctagggtctattttggttaccctttgcatggaatatttttttccatcctttagtttacctcttcatgtctttgtatctaaagtgaagctcctgtaaatagcatacagatagattctgtctgtatgcaatctgtcaatccctgtcttttaatagaagagtttaatccatttatacttagcatgattgctgaaaaagaaggatttacttctgccatttagttatttctgtatgtgttttggttttttatgcctcagttcctccattatggccttggggtggtgatatttagttgagttgtttgcctttttgattcacttctttcattttaatcatattttaaagtttgttttcttagtggttaccttggggattataattaatatcttgaactagttggaagaataccaggttagctttagtagtacatagacatactgcttctgtaactctccatccttccttttttatgttgttattgtcatagattatatctttatacatgktatactcattaacaacagatttattgtttcatgcatttgcattttatttttatttatttatttatttwttttttgagacggagtttcgctctgtcgcccaggctggagtgcagtggcgtgatctcgactcactgcaagctccgcctcccaggttcacgccattctcctgcctcagcctcccgtgtagctgggactacaggcgcgcaccaccatgccyggctaatttttgtatttttagtagagacggggtttcaccgtgttagccaggatggtctcgatctcctgacctcgtgatctgcccgtctcggcctcccaaagtgctgggattacaggcgtgagccaccgcgcccggcctttttatttatttttgtaaattttattttttgtgcagactcctctgctggggccgcaactgctgagaggagcagcacatttgccttttaaatcacataggaaaaagacattacaaaccaaagtacaacactacttttatatttacctaggaagttacatttattagtgttctttattttttctcatgacctcatgttactgtctaatatccttttgtttcagactaaaggactccctgtagaatttcttgtatggcgtgtctattgcaaatgaatgctctcagcttttgttgacttggaaatgtcttaattttcccttctttcttgaaggatagttttgctggatataaagttattggttgaccagttattttgtttcaatacttctttttttctttttgagacagagttttgctctgttgcccaggatggagtgcagtggtgcgatcttggcgcacagcaactctgcctgccaggctcaaatgattctccctcctcagcctcctgagtagctggggccataggcatgcaccaccatgcctagctaatttttgtatattttgtaaaggcagggtttcaccatgttgcccaggtgggtctcaaactcgtagactcaagcagttcacctgccttggtctcccaaagagctgcaattacaggcatgagccattgtgcccagccttctttcaatattttgtttttatttttattttagacacagggtcttgctgtgtcacgcagaatagagtgcagtggcatgatcatggctcattgcagcattgaccttataggatcaagcagtcttcctaccttggccttctgagtagctagtagaacaccactatgcccgaccaaccaaaaaaactttctgtagagatcagggctcactatatcgtccaggctggtctcaaactcttggcctcaagtggtcctcctgcctcattctcccaaagtgctgggattacaggtgtgagccagcgcacctgacttttcagtactttaaatatgtcccactgccttccggcctccatggttaatcttgctgaggatcagttgcatgggatcagttgcttctatcttgctgctttcaagtttctcttattgtgttttgacagtttgactataatatgtctccgtgtagatctctttgagttcatactgcttggagtttgttgagcttcttgggtatgtatacttatgtctttcatcaaatgtgggaagttttcagtcattatttcttcaaatctttgaccctttctttctgttcttctgagattcctataatgtgtatattggtatgtttggtttcccacaggtccctcaggctctattaatttctccttttcttttttctggttccttatactagattattttgttttgtattccagtttcctgatccttttttctgcttgcttaagtctgctgttgaacccctgaaatgaatttttcatttcagttattgtcaactccaggctttctgcttggttccttttcataatttctgtctctttgtggtgttctcattttgttcagacattgatttcctgatttcctgtagttttttccccccacagctttctttagctcattgaacatatttaagacagttcatgtgccatctttgactattaagtccaatatctgggtttcttcagagatgatttttgttaaattatttttttcttgtgaatgggccatacttgcttatttctttgtatgatttgtgatttttgttgaggatgagaaattctgaatattatgtttggaagtttggaagtctagttctcctacttttcaggaatagccgatttttgcttgtcaactgctgggtccatctgtttgaacttttgcaagctgtttttgcaaagagtatgttccttttttaatatggacattgaaattttagttctcttatcactgtgtttaaccagcartctgacagtaatttccttaaatgtctgtctcccagaagtgtggaggggtgtggaacaaactacctttttaaatcccttgtggctgggaagctgcttgagccaatcagggttgaaacaatgccagcctctatgcttagcccctcagccatcaaaagcagtggtcagtaatcagaacatacaaccttgatttttcaaggttgaaaaaccaagatgcaaaggttctaatttcccaatctggcaccaactagctacactaggaacatcctcgtggctacctgccatgggttgttggctgggggattatagcagccatgttattaataaatgtgaagtttactgaaatttacttgctgttttatcaaattctcctctgggccctgaagtgtttgagtagactccagagttcaaaaatagttgctttagacagctgaatagttgttttgatctcagatattcttggagcttcctgttctctcttctgtgatgtcactcagtttttttatggtaagcatatagttttagtgtaccattttaatttctagtgttttttagctgtattttttgagttatttttagtagttgctctaagggttactatatatctcttaatttatcacagtctgcttcaaattaatactgacttaattctggtaagacaggaactttgctccaatgtagctccattttctcccccttcatttgtgcttttattgttatgtaatactcaaaacagtgttaattattgctttatacagtcttgtttttcaaagtattaagaaaagagaactatacttatgcagtgtttataatcacatatttatcattttcagcactcttaattggttcttgtggatttgaattatagtctggtgttattttctttcatccagtaggacattttgagctggtatgggcaatggtggcagccttggttaagaatgccacaggctttcactgttcttatctcaagtttagtagtttttcatgaataaacacttctcaatttgttacatttggctcatttttagaaccccaaaatactcgtttttgacaatgctgtccagttgtttttggggagagaattttctgaactcttcactctgccacagctggaagtctcccctactaccttgatatctttgcagaaagcatagattacattttgcactgtccttagctgtgtatagattgggcttagagccaaggcaggctgaaaagtgaacctacttttcctaagctgatgggacttaggagaaggaaagaatttggaagtagggcaaagaataattgggccttttatcatcttgcctgggtcttttgagcccccacatcctatctttcctgaggcttagtccttcacaacacagtgtccttatggaggctttctggctccttctaccgccttctctcctgcattccttgtctggggatgggcagagtagacactgggtactcagtgtcaagaagcacctgcttgtacccttgcgtgccttctgtggagggtgtggagggactcaaaatagaggtcagggtgccaagataagtgttggctctgcaaactctgcatgaggttttcagtcttctttcaggcagctttgcacagatggggggctttgcatttggagctgtggtgaggatggtgggatacactctgtacctcatgcccttagtgaaggttttagggaactgctgcccaggaggggaggggagagaaaatacttgcctcagaaagtaatatgctgaccatcctaccagttacggggagaaaatgcacatataattcttaaagaacttcactgattaggtctgttgcctcctgtatagaatttctgtgggaaaaaagccaaatgttatcttattgttgtctttatctttccacagataatgcctcaaacatctctgtaaccagatgcttttgcttttctgttttggcagaggaatgttacggcatccggagtcatccctcagatttctctgatcatggrcccatgtgctggtggggccgwctactccccagccctaacagacttcacgttcatggtaaaggtaagaaagaagggcctgtytttggtgccgtttgagatttgtgcagttccttacctgcaataaaaataattcctgacccagatctaggttgttacctgcattctcattggctttcagcatagtgatgataaggtgttaatggagagagggttttggcatgaaatctgtagcttgtgggggttcagtggcaggggatgcttatgtacttcattggtgggtgattttacttgttgatctgaattgcaaatgattttcaggtaatcaaagaatcctgtcctttgaccagatagatgactgtttactgagtcctattcaagaagtttctcatggaaggcttttctgtaatctgtttattgggaagttgtttcttcctttatttcttcagctccttgccattttattacattgtgtccataatggtaaaggataaatctgatctcacacttcattttcagaggtacatatctttattacatgactttaatggacttatattttaaaaatatttttaaatgaagtctatttgaagttatacatgagtaattaccattcatctcaaaccttgctttaaaaaaatcagccttttcttcttaaaatattaataaaaatgaacattggatgccaagacagaatggttggggggaaaaagtagtgatagccatccaacttgaggagaggagttctagagggagtgtaaatgggaaaccctttgttctcaagggaagttaggcagtaggaattcaaaagtttcacaaagtgcttaccactttgacccaactattctgttcttagtgatataccgaaagtagtgtaagtgttcaacaataagagtgtcttttattaatcaaatttaagatgggccatacacagtgtctcacgcctgtaatcccagcacttgggaggctgattcaggtggatcrcttgagctcaggagttttagaccagcctaggcaacgtagcgaaaccccatctctacaaaaaaatacaaaaattagctgggcgtggtggtgcatacctgtggtcccagctacttgggaggctgaggtgggaggatcactcgagcccagaaggtcaaggcagcagtgagccaagatcgtgccactgcactctagctctgggtgacagaggaagaccctgcctcaaaaaaaaaaaaaaaaaaaaggtaagatgaccacttctcttacttggtggacaatgcagaattttctgaactttgcttactaagtctatatatacacacctagctggtgctacccccattctctcctccttcctgcctgttacgaagggaggtgtgggatcaattcctctggctagagccatcctttcctcctgctacacacatccacattgctgaatataactctccacccttcttcaggacccttatactgttccttttctcctttctctttagtatcttcagtctgtccgttggtamtagatcctcccatcaaaacttaatcacactcaggtctttcctatcatcaaaacaaaaactgtcctctagttggcatactcctgtagctcttgctgtgtttctctcttgccatcccattctttaacacgtgttaatttagctttgtcccctagaccactaaatcgttttttttttttaaggtcctcagtgacttgcatcactgtaaatgcagtttaactctcattttcctgtctttcaacagtattcccttggcttccattataccatactctggcatttcttctcacaactctgaccataccttcctggtttccattggcaatttacatgattccattcagactctagatgctggagttcatttcaactgctttctcttttaattctgtgttttattctaagcaatctcattttctgcttacaaaactttagttaataattgcatattagtgagacttcctctcttgtcctcagcaccattcttaagctgtcaccattctacatcttaaatattctgtgtatttaataagagtgcagtggaaaatactaagtcttttttaaaggactacacaaggtaattataaagttcttatgggaggaagaaacaccatgcaagaataaacattctatgaaagtagtgtaatgaggagttagccctaccaggtgccaggatataaaactacaataactaaaaytgtctgaagaacttgtaggtaaatggacagaaagaccaagggacattacagaattgatacatagatctatatctatttggacattatgatgaaaaggatattattctaagcagagtcactgataataacaatttcttatgtcagagataccagtgattgctgcatcactaaatccagttgacatttctcaccctttgtcttacctgttgacaacatttgctctagctgatcactccagtctcatgactttaaatactgatccgtatgctgacaactctgaaatctgttcctccaggattatatttttaagagcctaccagaatttccatttggactttaatgggtatctcaaacttaacaggttttgatttctaccaagcttctcctgcattgctctcctgcagccttcgccattttaaatggcaggtctagtcttccagtggctcaggtaaaagctttgacactgccttgactcgtcttttgctatcacatcccaaatttagtcagaaggtcctgttggctttactttagaatataatccacaatataatcaaattgcttcttagcacgactacttacttcttactaacaaaactgctaccactttgattcaagcacatcatttcccacctgattattacagaatcctcctgactggtctccctgcttctgaacctgggagctgaaggttgcagtgagcgctttgggaggctgaggcgggtggatcacttgaggctagtagtttgagaccagcmtggccaacatgatgaaaccctgtctctactaaamatacaaaaattagccaagcgtggtggyacgtgcttgtaataccagctactcgggaggctgaggcaggagaatcgcttsaacctgagaggcggaggttgyagtgaaccaagatcgcgccactgcacyccagcctgggtggcagagcaagactctgtctcggaaaaaaaaaaaaaaataataaaaataacccaggtcaggaaatagctcttcaagagccctgtcatcatgatcctttctaaggatcattgtagcctccatcctgcttagaatttgttattaataataattctttattgtctcagcttttatggtagtgtttttatttgctttgcttcatagttgaaaataaaaattgcctccctaaacaatgtggattagcgtttcctgttttgacctttacgttaagtgaaaccatataatatgctttcttgtgtgcatggcttctggctcattatgttgttaagatttatctatgttgttctttgaaaatgtagttcattcactttaatagctgtgtagtaagtgtgtgtgtgtgttttttcttttgtgtgtgtttggtgttttttgttttttttttgagacagagttttgctctgtcacccaggctggagtgcagtgacatggatctcacctcactggaacctttgcctcctcggtttaagtgattctcacacctcagcctcccatgtagctgggactacaggcgtgtgccaccacacacccggctaattttttgtatttttggtagagatggattttgctgtgttggccagggtggtctccaaactcttggcctcaagtaatctgccggcctcagcctcctaaagtgctgggagtataggcatgagccactgcgcccagytatagtaaatatttcttaacatattcattcattccactgcagatggacatttgaattatttcaagatttttgccattgcaaatgatgctgatgtaaacatttttctatatgtgtcttggtgcgcacattttattttctggtgctgatgtaaacatttcacattagaggcaatcttaggtcataggatatatatgtcttcagcttctctaggtaatgcccgtctgtttactaaacaggttgcagccagcaatttgagaatttcacttgtttcacatccttgccagcacttacattaacatagtttaattgtgccagtttgatgcttgtggtatagtctcttattgtgttgtcaatttgcattgactcaatttgcattagtccatgactgataaagctgagtgccttttygtatgattcctgttcttctaaattaaggtatgtttatgactcagaatgtagtctatcttggtgaatgttccatgggagcttgagaagaaagcgtattttgttgttagatgaagtatgtccatcatatcctgtttattgatactgtttttcttttaattttaaaaatgatttctatttattttacttcttaaaatgttttttattatttttttttattttttgagacggagtctccccctctcacccaggctggagtgcagtggtgtgatctcrgctcactgcaaccttcggctcccaggttcaagtgatcctcctgcctcagcctcctgtgtagctgggactacaggcrcacactgccatgcctgcctaattttttttttttattttggtagagaactggtctcactgkgttgcttagactggtcttgaactcctgggctcaagcaatcgtcctccctcccaaagtgctgggattacgggtataagccacagcacctggtctataaaaatgtttagagacagggtctcactctgttgcccaggctggagtgcagtggtatgatcatagcttaccacagcctcgacctgctgggctcaagtgatcctcctgtgtagctgggattacaggcacatgccaacacacctggctaattttttatttattttatttatttttttgagacaaggtcttgctgtgtcgcccatgctgaagagcagtggtgcgatctcggctcactgcatccttgacctcctggggtcaagcaatcctctcaccttagcctcctgagtagctgggactataggtgtgtgccaccatgcctggccaatttttttatttttgtagagacagggtttcaccatgttggccaggctaatttttatttattttaatttttgtagagatggggtcttgccatattgtcataggctggtcttaacccctggcctcaagtaatcctctcacctagggcccttgagttgctgggattataggcatgagacactgtgcccagctgattggtgttactgagttcatctatgtctttactgtttctgcctgctggatctgtccacttttgatagaggagtgttaagatcttcaactgtaatcatggattcatctatttctccttccagtgctatcagtatttgcctcatgttattttgatgctctgttgttaggtgcatacacatgaaggactgtttgtctccttggagaattgacccctttatcattatgcagaattcctctgtataataactttccttggtctgaagccttttctttctgaaattaatatagctactcctgatttcttttgattagtcttagcatgtaattaatatctttctgcattcatttacttttaatctttatgtctatttcaagtgggttttttgtagacatcccttatagttgtgtcttgtttcttgatctagtctgacaatccgtcttttaattgatacatttagaccattgacattcagagagattgttggtatagttggattagtatctaccatatttgttactgttttctttttgttgtatttgttcttatttttgtcttccacttttctgccttttgtgattttaattgagcattctatatgattccatttttctcctttattaacatgttatactttttttttaccttcttcagtggttgccttagaggttgcaatataatttacagctattttaagttaatttcagataacacttttctgcttcccaggttgtatgagtaccttataatagcaaaatcattctaattccttcctcctatccctcatatgatatatataaaatatgtgtacataattgcacttggtcttagccaaaaggctgagaagcgatgtgcacataattcaattgtacataattgaatgtgtacataattgaatttttgctactattaatttgaatcaaaagttttcattttaccttcatttattccttcttgaatgctctttctttctttatgtagatataagtttctgatctttatcatttaccttttctgtaaagaattttgcttaacattttttgcaaggcaggtctactggcaggagattacctcaagttttgtttgtttgagaaggtctgtatttttccttcacttttgaagaataattttgcagagcacagaattctaggttggtaggatctttcccctcaacactttaaatatttcattccactctcttcgttcttgcatggtttctaagaaaaatttggatataattattatttttggtcctctataggcaaaatgtttttttcttgtggctgcctttaggatattttctttataattgattttctgtagtttggaaataatgtcctaagtgtagttttttgtttttgtttgtttgtttgtcttttgtttttttagagatgggggtctccctgtgtttcccaggctggttcaaactcctgggctcacatggtcttcctgcctcagcctcatgagtggctgggacaacaggtgtgcaccactacacctagctttctctgtgtagtttttttttttttttttgtcattcatcttgcttgatggtctctgagtttattggatctgkggtttggtgtctgacaatttggggaacttttctgtcattattgcttcctatattctgttcttttttctctttctgctccttctggaattctcattatgtatatgttacatcgtttgtaatttgtgccacagtttttagatactccagttttgttttgttttttttgatccatttttttctcttcgcttttcaatttgagtggtttctcttgaratatcctcaagctcaragattctttcctcaagcatgcccagtctaccaaaaaacatcaaatgcattctttatttctgttgcagtgtttccaatccctggtatattttagttatttttttagaatttccatttctctgcttacattgctcatctgcttgctgtctactctatccatgagagcccttaaaccattttgtttgtttttgttttttgagatggagtcttgctgtcttggccaggctagtgttgaacgcctgggctcaagtgatcctcccacctcagcctcctgagtacccaagactacagacacatgccattacacctggcaaacatcttaattgtagttgtttcaaatttctggtctgataattccaacatttctgctacatctgattccagttctgatgcttattctctcttcaaactttgttttttgtcttttagtgtgtcttatgacttattcctgatagctggacatgatacactaggtaaaaggaactattgtaaataggcccttagtaatgataaggagctggggaagaggaagtgttctgtagtcttatgagtaggtgtcagtcttttagtgagcctgtgcctctgaactatgaatgtcatgtgtctcagtctctcgtacttttttggtgggacggtggctagagcgggttggggctggccatttcccctcttccacatggaaagcaagagctggcttgagtttggtatttttcttccctcgcgtcagcagtttctgataaaacttcagcaggttaggctcttatcatatagttttgcctgagagaagaccctgttaagaatgatgctctcgtgcgtttcagaagggtctttttttcccccatgcatgtcagaagcatgagggagttttctctgattatcactgtgagaaccttgttgagttcctagaggtaaaactcacaaaagtgtgggagcccccaatgattggccggccctggagtcttgatctctccgacttgtccatgctgggcctccagcaatttgtcagctatagttccggttttcctacatcagccctggctctggaggagatttgtgcttgtgggtttctgccctgcaaggctcaattttctgcatttgccagttggtctccagttttggggtgctttgttctgcaaagacctcacctctttgatggacctaagaaaaactgttggtttttcccctgcaactttttcagctttttatttgttaagaaggagtatcaacttttagcttcttatgtgctggactagaaacctgaaattttgtgtctctagttttttttttttttaacagtttcaaataaggctgctataaacatttgtttagaagtctgtgtgaagtggggaagacctttgtagctagacctttctagcaagatttcaaaccaagaagccataagataaaagactgatataatgcatatgatagactaaggactaatttccttagtacataaaaaagccaatgatgtattagaaatgggcaaagaacatgaatagtgagttcagagagcactgtagtaatatttattgcagaattgcttattatactaaagttttggaaacaaccttcatgaccatcaattggtgaaagttatgatacaaatcctactatactgatatggaatagaatgatcttcaagctagaaaaacaaatttgagaacagtgtgtattgaactctatgtgtattgaacacagtgtgtattgaacactatgtgtattgaaagaatgtgttgggaagaaaatgtttgcattagaaagtgtttgtgttagataatgtttgtgttagaagataagagggcaaagagggcaaatatatatataaatgcacatggatgcatgggtgtctctgtagagagaagaaactgacagggtatgccttaggggaggcgaattggaggcctggaagtaagggctgggctgtagactttccactgtatctcctgttcctctgtttaaattttatgcagtatacttatattatctatatattagaaactaaaaattaaaagcctatcactctttaatagcaaagcattgatttattagtttttttgtttttgtttttgagacaggtttttactctgtcacccaggctggagtgcagtggtgcaagcaatcatagctcactgcaactcaagtgattgtcccgcctcactctcctgaatagctaggactacaggcacatgccaccaggcctacctaattgaaacaaatttttatggagactgggtctcgctatgttggccaggctggtcttgaactcctggcctgaagtgatcctcctgccttggctttccaaagtgttgggattacagatgtgagccactgtaacccactgatttatcaatatttttaagtagcttcatttaaagtgactggttgcatacagtctccatatctcagtttcctcatatgtaaatgagggtgataatagtacttaggctttagtgacacagttttgtgaagtgcttaaaaaacttcttggtgcacagcaagctctgagtaagagccacctgttactgtgttctacagatgaatgaccttgagatgttagccacattgcaagttaacttctgaggtagaactgtgcaacagaaattttttaaaaaagacaataaggcagggaaaacttgggtctttagtttggagtcgtatctttaagctacatcctatcctcattcagccacgtcactatcttctctgcatttgtcatcttggctgaatcaactctaaggctgtgaccagctctggtgctctgaggttgactgttctggaaatcttttatttcaggacacctcctacctgttcatcactggccctgatgttgtgaagtctgtcaccaatgaggatgttacccaggaggagctcggtggtgccaagacccacaccaccatgtcaggtgagaggccttgaagatgaccttgttgttttcaaacattgagaagagggcattgccaaagagcctggtggcagtttttaagaaatattacttaattggcagaccttatttgggaagactgtggtacagtctattgtactacactacagtgtattgtttacagatatagtgataaaggtagatttagtatataaaatttattaaataacacgctattagtaatgcttggttattctttaaaacaatttagagctagttgctggaatggtgattataagtaggtatgatttatgtatgtacagttgaacctttgaaaaaaaattttatcttattgtgacattttttattctaaggttggtatatatcttagagtacataagtgttttccaatcattggccaggtgcatgatggtcatatatcatgtgttgatgaatttggtcatagttgttaacttctttttttttgagacaggatccagctctgtggcccaggctgragtgcagtgacacaatcttagcttattgcaacctccgcctcccaggctcaagcaatcctcccaccacagactcttgggtagctaggactacaggcatgcaccaccacacccagcaaatttttttttttttgtagagatggggttttaccatgttgccaggctggtgtcagactcttggcctcaagcaatctgcccaccttggcttcccaaagtgctgggattacaggcatgagccaccatacctggcttttgttttgttttgtttttgagatagggtctcatgctattgcccaggctggagtgcaggacacagtgatagctcactgtagcctcagtcttccgggctcaagtaattcttctgcctcagcctctmtagtagctgggattacaggtatgtcacatcatacccaggtaatttttatttttaatatttttttgtagagatgtggtctcactgtgttgtccaggttggtctcgaactcctgggcttgagcaatcctcccacttcgacctcccaaagtgctgggattacaggcgtgagccaccatgtccggctagttgttcacaactttaagattacgtaccaagtttaaaatgtataaagattattctgtgcctcagcactgaaacaaaaagttcttgtttaaacagaaaggcatggaattggaagtagggcatgattctgatattagtgaagacatgttagctgttggagtaattattgcaattccatgttttcctgtaaaagaaaccacccagctgtgaatggattacctaccacacagcaatgtaactaaagacaggagaaattgcttctctgagagattttacagcagtgagaggctggcatgcctgatttatgcacctcattgtactgtggttaaggcattgggtcagcatttaattgtcagcatttcttcccagtgtccctaaagtagagatgtgtcttatcagtgaagtcttagattagatgaaatgtagttttaaaaaagttmgggctcttgatcccccacccacaaaaattgtttctccccatgtcaggttggcatcgatcttgactcattcctttcccttacctatcagcatcatttagccccatctttaagacatgtctagaatcagaacacttcttagcatcaactccagcacggcctgatgccatgctattgtctcagggctttattggcagcagcctgtttttcttgctggtatataatataaagctgggtcttgatggtgtcttagatttgatgaaatatgctgtttatttttccccattttaatagcattatatgtttgtagtacaaaacttagaaaacatacaaagcataaaaactgctagatattccatcatccacagataatcactagtgattttttggttatacccttgcagtcttttcacgcacatgagcgtgaatacacaaacacttactcaaacataggtatggacatactcttatgtaacctgagttttttttttttttttacttgacagcttaaagtaatgaatgtctgcccatgacattaaagtttcttctgtagcacaatctcaagtacgttttgtttgttttttgattgtagggcagtatgtggttttctttctgggcctgaggctctttgatggactgtgtctgatgcacttggccctgtatccccagggcaaggcacaaaaaggtgctccgtacatatatttttctctcttttcttttttcttttrtggtaacagctttattgagatgtaattcatataccgtatattttaaacacctatttatagtgtacaattcagtggtttttaaaatacattcagagttggataattattaccacaatcaatttcaggacattgtcatcaccccaagaagaaaccctgtgcccattagcagtcactctgcatttcaaccacagatacttctgctctaggcaattaccaggctactttctgtctctgtggattttttcattctggacatttcctagaaatggaatcatataatatgtgatcttttgtaactggttgcttttacttagcataatgttgttaaaggctcatccatgttgtatcatgaatcagtactttattcatttttatggccgaataatattccagtgtgtggatataccacatctagtttattcattgaccagttaatagacactgggtcatttccacttttcggctatcataaatatgcctgtattaatatttatatgcaagtttttgggtagacatatgttttcatttctctttgatttctgagttaaatgataactcgatgtttaacttttaaggaactgacagactctcttccaaagtggctgtacccatttataaatattttttgaatgaaagaattctgtcatgctgaaaatgctttttattcaacaaatactcatttagaatatgtggaaaaaggcaaatagcaaaggaattaaaaatttaaaatagaataataaaaatgtaaaaaaagaaacaaaacaaamcaaatattcatcgagtacctatgtgtgaagcattgttttaggtgctaggaatacatctgtggacagaacaaaagaaagacacctgcccatatggggcttatattctagtagaggagatagacaataaacattgtaaataagtacactatgcagtatgttagaaggcaatacgtgctatggaaaaagtataacagggtaaaggggactgggattgttgtagtttcaaatagggtggtaacagtaggcctcactgaggttaggagctgagcagattttaaggagttaactgcattgatatgtaagtggggagcattgcaggcagaggggaacagcttatgcaaaggctctcggtaggagagtgactggcccgatcagtgaacaaggaggatcattggagtagagacatgacacgatctgacttaaaaagctctgtctgtcagctttgtggacaagagaccgtaggggcaatggtgaaagaaaggagtctggtgggatgaacctggggagagagttcttggctccgctttctccatcatacctatggccttgtttggctgctctgtgatttcagagtgctcttcaagaattatggcttgattctcactaggggcaggtggctcccctcctttccttccactgttgctgtgcacctgtttgccaggtacattattcttaatgttggccaggcctgatcttaccctgttggagctgatattccaggagagatgtccggcagtaaacagggaaataggtgatgcagagaaaagtacgggaggagaactcccgcatggtatagggatggatagtgaaggatctgggagtgggtatggaggtgacattagagcaaggacctgaataaagaaaggtgtgacccctgtagaggtgtggttgcagaacagagggaacatgtgctgcatgagttgaaggatcacccggaaggtatgtattatgtggcattacatcctcagtggagggtgcagagaacagagctatcagcacggtctgctactgacatgccctagaagggcgcagtcaggcatgaagcagcaactttgggctggctggtaccctgactcaatcatatatgctccctgttctcttaggtgtggcccacagagcttttgaaaatgatgttgatgccttgtgtaatctccgggatttcttcaactacctgcccctgagcagtcaggacccggctcccgtccgtgagtgccacgatcccaggtgggttgtaggccggtgcaccttctctcattttgcagtgtagcttgcctttctctgccctgacaggacccccagggtctgccttgttgggcaagttgcagcagagtgtggtagagtggctcccaggtgtggggatgatgtcatgtttggctataggagcaaagaaagatgattttattttcctttttcctctctgtaatatctaatgtatatcttggtggtgaagagtggcccaaaacagttttaaagaaaaattttttgatttctaagaaactctcaagttatctagaattagagattcaagttttttttggtctggcctagtccccatgaagaagtctcccatttcctttccttcccctcacccacaaaaggaagagccatgattcttcttatgctgactatacctggcttttttctgtctaaagtgactggttcctgggctctacctagttgtccttttgaaataaataaatgtaaaatgatgcaaacagcatgccctttaggaaacatgtttatgcatactgcttatagccagaggctgggacagtcctggggaagggtgtgttgctggccatctggtgaagacctttccttttgctgttggagtctaccacctgttgtggaggcaccatagagtaaagtggaggccctgcccaggaactgctccacacctctagccgttccattttatttcctctccaaattataagcactcacttggcctggactttcttctgcagaagggatttgaaattgtattgtttgggaagaggtcattttcagatgctatcctgtagcttaaacctggactccttcctgtggggcctggtctgggccagggatgctctgaagagttgtgttgccagggcctcactctgtctgcctctgcccactccacaagggacatacccagtggcccactgtgtgtagtcatggaggggagagtggtcacaaggtccagagctgtgggtatagcctttctgagtatacagtttggagttcctgaagggtttaggacatcacttgaaggtattatggcccaggagcccagaaatgtctgcatagcccgctttggcccagctatacctcttctgcatatgattccaagggagatatatatccatatatatgtatacatatatatatgcatgtgtatatgcgtatatatgtatacgtgtatgtgtatatacatatgttcatgtgtgcatatgtacgtatatgcayatatatgtatacatacatgtatacatatttgtgcatacacacatacacatgcatacatatgcatgcataggtatatatgcatatgtatgtatatgtatgcttatgtatatgcatatgtatgtatatgtatgcttatgtatatatgcatatgtatgcatgtgtatgtataggtatgcatgtgtatgtatgtatatgcatgtgtatgtataggtatgcatgtgtatgtatgtatatgcatgtgtataggtatgcatgtgtatgtatgtatatgcatgtgtatgtataggtatgcatgtgtatgtatgtatatgcatgtgtatgtataggtatgcatgtgtgtgtatgtataggtatgcatgtgtatgtatgtatatgcatgtgtatgtataggtatgcatgtgtatgtatgtatatgcatgtgtatgtatatgcatgcatrtgtatgtatatgcatgcatgtgtatgtacgtatatgcgtacatatgtatgcatgtatatgtatgcatatgtatatgtatacgcatatgcatacatatatacatgtatgcatgtatacacacatgcatgtgtatatatgcatacccacacatatgcatgtgtacacgcccacacatgcatatatgcatgcccacacacatgcatatcaacacatatatgcatatacgcatatctacacatatacatacatgcatatctacacgtgtatatatgtatatctacacatgtgttcacatacatatatacacatatgtatatgtgtatatatgtatgacaagtaaaaagggaggactttattagcagatggggctacccttagttttctttccagcgtagagctttttgcgaagttgggcttgatggacacatggcctgacccaaggccaaacctcagcccaggagtacgtctcagggtcactgtagcccctggctgcccacactgggmaggagggaatgaaagcctattggagagaagaggttggagaggggcaagttgctgggtcctcctgtagagtgggagtgggctctggcttagtttttctgctgagacacttggatgcaggaggaaggagagagtccatgagcctgcatgtgacaggttctgtggtgattttgcccagagggcctgcagttttgctttttgaaggagctttagcagattaacctaacagggaatgtgaacccacagtggtttatgcagagctctgcctttgcatttccaagtccttgttcttttaatgttccaggaagttgggctgggctctcccagggctgtgtcttgttcactataatgtccttcagtgccctacacggtacctagaatgtaggaggtattcagagaagataaatgaaagaataacgtttagaggaataaactcattttttcctctaaaagagaaccagaagatcttttggattgatacttgtcccaggttcagttaatatggtggttaaaaaggaatgactctttggtgactgctttgtaagcccagcagggacagaactggcccagtccctatgacgtgtcaccccatttcctttcccaccccattcccacaaaaggtaactggctcttcctatgttgactatacctgccttttttctgcctaaagtgaccgtctggttcctgagcttgacacaattgtccctttggaatcaaccaaagcctacaacatggtggacatcatacactctgtaagtgccacatctgtttgtcttgcctgtcctagtcagccacattyatgggcattgtgcttcggcttagtgaggaagcactggaccacttggcctccatgtcagacagcacaggtcgggaatagggtgggcacaggaccagtggccactgagtagtgtgttctggaaagacctagtggctatagataccctagtggcacagatrgacttgagggctggagataggagtagtaagggccagcagagctcaggagtctttagaaggccctctgaggatcataaattaggggccatgtccacagagtctagagtgaggccagagtgatcattgttaagtatcaytggggccctctgctcagagggggttttgtctttatagagaagagagtacacagggcatcctagaaggttggactgtgtgtgtggaggtccgtgggagacaggagccatttgtacctttttttggtacagcagattcctgggtcattaagtaaaggggayagtgttgggcaaactgaaggcatctgtagatggccaatgccttccttaagggtacactgtgctctcggtagtccttgtgcaacacaycgtgatggctctctggtaactctagaagtcagattctccctcttccctagggtttgctgttttctgttattgtttttgtcttttttattcttgtagtctcttcctgcaccaaggattagcctgagatgtaaccttaaggtcttccttaggtcttttctgagcctttgcaggggcacgtgcaatcactttctaattttccctgcatatgcagttgtttttgagtgtcctagttgttaacgtctggctcccaaaagtagaaaaagagaaaaaaaatgaagatggtaaaaagatgtcagccctttaaattccttggaagtcagttcagcccaaagcaggagagcctcgcaacagtgtggggagttgtagcaacagtgaccacccatctctttgcacctctgtgatcagaagcagcagtcagcaagcacagattctcmatatttggaggacagggtccttttatgcccaccccggctcctgcaagctgtgtgcaaactgctgcaggaacacttgmggaaatatctgtcatggagctggggtgggggatgggtagctgctactatgctaagagctgaaattaactccaattttcagtccaatccttcccctggaagttgcagtctttcaacagacgccagagtcaaaatagttccatcagacagattctgccaggcaattgttgcctgggtggggagacagattcctggtgcttcctactctgccatcttctaactttttcttaaggtacatatgataactcttgattctcattataaagttttatatcctgctacctattaaatactcttgtttgtaatttttttctgtcatttatttagggttttattttatttatttatttttattttattttattattattatactttaagttttagggtacatgtgcacaatgtgcaggttagttacatatgtatacatgtgccatgctggtgtgctgcacctgttaactcgtcatttagcattaggtatatctcctaatgctatccctcccccctcccccaaccccacaacagtccccagagtgtggtatttagggttttaaaaatgtggttgtatactgtctatgtataaataagagttctgtcgggtgcaggggctcatgcctataatcccaatgctttgggaggctaaggcaggaggatcctttcatgccaggagctcaaaaccagcctggacaacataatgagtcaccatctctataaaaagtaaaaaaatttgctgggtgaggtggctgtcgcctgtagtcccatttacttgggaggctgagatgggaggattgcttgaacccaggtgtttgaggctgttctgagttatgatcattgccactgcactccatcctggtgtgcaagactccatcgccaaaaataagtaaatgaataaaattttatctttccagttattttacatgtcatttctttccttgtcttgcattggctacaactccctatatgtcaaatgtaatggtgaatcatagttgtgattctgggcatctttgtattgtttgtaagtttagcaagactgctgtcagtgtttcctaatttatatcttttttcatgttgaagctactactggcttctgttttaaatatttttgttgttgtttattttgttcttaaagttaggaatgagtgttgaatattgttgaatgcactttcagtgtttttggagatgatcatgtgattttcttccttagatctatttataaatctatcctagtagatttctgaatactaaacttccttcattcctgaagttgtatattctgtttgctaatgttttgagtttctgcattgatattatgtgatactagtgcgtatattttaaggtattttaaaatcaggttttggtatcratgttgtatttgctttacttatttatttatttaaaaaaaatttttttttgagacagagttttgctcttgtcacccaagctggaatgcggtggcacaatctctactcactgcaacccctgcctcctgggttcaaccaattctcctgcatcagactcccaagtagctgggattacaggcgagccctaccatgtccggctaatttttgtacttttagtagagacacggtttcgccatgttggccaggctggtcttgaacttctgacctcaggtgatccacctgccttggccccacaaagtgctgggattacaggtgtgagccaccgtgcctggcctgtatttgctttatgtattagtgttctagtgctgccataagaaaataccataaactgcatagcttaaacaacagaaatttattttctgtcagttctggaggctagaagtccaagatcatggtgttggcagggttggcttcattctgaggtctgtgtctctttggcttctggactacactcttgctgtgtcctcacgaggtctttgctctcagtgcatgcagaaagagatctctggtatctcttcgtcttttttttttttttttccctcagagacagggtcttgctttgtcacccaggctggagtgcagcggtgtgactttgactcactgcaggcttgacctcctgtgctcaagtgatcttcccacttcagcctcctgagtagctgggactatagctgcatgccaccacatctggctaattttaaaattttttgtagagatggcaactcactatgttgcccaggctggcttttccaattatttatttwtttttttttgagttggagtctggctctgtcgcccgggctggagtgcagtggcgtgatctcggctcactgcaagctctgcctcccgggtacacgccattctcctgcctcagccacccaagtagcagggactacaggcacccaccaccatgcctggctaattttgtttttgtatttttagtagagacggggtttcaccgtgttagccaggatagtctcgatctcccgacctcgtgatcygcccgccttggcctcccaaagtgttgggattacagatgtgagccactgtgcccggctggctttccaattcttttcttttttttgagatggagtctcactctgtcgccaggctggagtgcagtggcacaatctcagcttagtgcaacctctgcctcccgggttcaagtgattctcctgcctcaacctcctgaatagctgtgatttcaggcacccgccaccacgcttggctaatttttgtatttttagtagagacggggtttcaccatgtttgccaggatggtcttgatctcctgacctcatgatccgcctgcctcggcctcccaaagtgctgggattacaggcatgagccacgggcgccaacccagcttttccaatttttaaaagaattccagtcctaacagattagggtccccctcttatggccccgtttaactttaattacctctggaacatccctctctccaaattcacttttttttttctttgagacagagtctaactctgttgcccaggccagtgtgcagtggcgagatcacggctcattgcaacttccaccttccaggttcaggagatgcttctgcctcagcctctcaagtagctgggattacaggtgtgtgccaccatgcctggctaatttttgtatttttagagatggggtttcgccatgttggccaggctggtctcaaactcctggcttcaagtgatccacttgcctcggcctcccaaactactggcattagaggtgtaagccactgcacctagaccatatatttacttttaactcaaaaagtattgtattattacacttttttattttgctttttaaaaaaacttcttctggccgggcgtggtggctcatgcctgtaattccagcactttgggaggctgaggcgggtggatcacttgaggtcaggagttcgagaccagcttgaccaacacggtgaaaacctgtctctattgaaaatacaaaaattagccgggtgtggtggtgtgtccctgtaatcccagctactggagagactgaggcaggagaatcacttaaactggggaggcacaggttgcaatgagctgagattgcaccattgcatttcagcctgggcgatgagtgaaactgtctctaaaaaaaaaaaaaaagaaagaaaaaaagtgaatatgctagaaaagagtcaaagcagtgactttagaagctacttaagagtgcacacacaaatcaatacggtagtcaggggaaggcattacttctggggaagaagagtacaaaggaaagagagaggtacctttggaaattgtgaagggaaaatgaagcaagggggttacatttatgtacctgcaagacatacaaaatcgaatacactgaaggacactacatctttccccatcaccctccctaaaattagtcacccatgaactaaactgcactttgctatactgacagaagagggtgctcttgaactaggatttttgttcatttgttcatctgccagctttggagaatgcagatacaaatagttttcatttatataaagctacaataagaaaacaaaaagtgagaatgaaacatgtcagttgatggaactcccttcactgtaaaagtcaatcatgaagcagctgactatgcttcaatctgagtgcagtagcccctgataagcatttgaggttgtaaaaatagaaaattcagaaactaatgacaagatggagagataatagtaagaagttaaagctgattgaattaagaaaatgggcaggggagacaaaattgcatcagaaatgatatcaaaattgcaaggtgctcaaaggagaatgtatttcaatgaaaatttaataaggaacattaaagaaaagtagataaatagcctaaaaaatgaatgaaataatataaaaaagtaaaagtagattttacattctcaccacaaaaaagtatgtgaggtggtggatatgttaactagctttagtcatcctacactgtatacatatatgaaaacatgtacgttgtacatatatgcaattataaaattttaaaatagtacagatacctttaatacaattattggttatattgtcacatctgggattaattttttaaaattcttagttaaatgtatgagaaaaaagtgactacaatgaaaggcaaagaagaatgaacatacatataattggagtgtctgaagaaaaaccagtagaacagacttaatatttaaaactgtaatccaagaaaatagtccagaaataaaataagattcagatttatataatgaaagagcacactgagcacgtgggaaaattgacccagaattgtcaaactagagaaaatattaactgttcgatttttaaaataaggagaaatactcaggacctttgggcagaaatcaaatgacttacaagggcaagagaataaaatggcatccaacttctccaaagcaacgtagaaaagcaaggaaacaacagaaaagcactttcaggaggctgaaggaaagaatctgtgactaaggattttatgtttagcaaagctcaccttcatgtattaagactgcagaaaaccagttttaaaccaagaaccgagggaagtttgtgttaatgaggctttcttgaggaatctactagagaatgagctttatccaatcaagaggtagctggagaaatttcaacaaaaggattggtagtgattatctaatatacttaattataattctaagactaaaacagaagtggggatgagggtagagaacaatgtataagtactatatgtttagtttcagaaaaaaatgcaactgaaaaatgggaggagaagagaggggaagaatattgcagaatcagctcactgattattgttagctaacagatatcattaaaaacaaactagttaataaaagattaaggaaatgaactaaaggcatcaaaaggcataattacaaaggtaaccactagactaaaaaatacaaacattctttaatactactcacataaacagtatatatcattgtgggtaatgataaaggggaaaaataaaaaaaaaggtaaaagacaataaatatagaatacatagtaattataaaaaataatatgacaggccaggcgtggtggctcatgcctgtaattccagtactttgggaggctgaggcgagcagatcacctgaggttggaagtttgagaccagcctgaccaacatggagaaaccctatctctactgaaaatacaaaattagccaggtgtggtggcacatgcctgtaatcccagctacccgggaggctgaggcaggagaatcgcttgaacccaggaggcagaggttgtggtgagccgagattgcaccattgcactcaagcctgggcaacaagagtgaaactccatctcaaaataataataataataataataatatgatagtaaaaaagtgtcataccaataaatatggatgggtttgattcacttgttaaaaatatgtctaatttgttatggaccaattatattcagtatataaatgtgattcagaaaggctaaaaataaggaatgggcagaaatatactgggagaatggaaacaataacagcagtatttgtgacactaatattgaacagagtaaagttcaggtattaaccataataaggaaggactttttttttttttttttgatatggagtctcactctgtaacccaggctggagtgctgtggcacaatctcrgcccaccgcaacttccacctcccaggttcaagtgattctcctgcctcagcttcccaggaaggacattttcaactgctaaaagccatagttcacaatgataatgtaaagcatatcgaatatctgtgccagaaataaccaccatctttataaagctgaaactataggagattcaacagacttaggtagaaagactgaataggagatgtatacacagcattgttattacaaagcaggtcaaatggacaaaagtaataatttaggagacctaaataacgtaataggtagatcttacacatttcttttggactttacaccctggtaatgaacaataaatcttattctgaagtgcacatggaatattcacaaaagttgatcatatgtattagatcagaaagaaaacatcrttaaatcccatagagcaaaaaatactgtgaaacaacattgcttaaaattagaaacttttgtagcaactaaaacaaaagtagcctccagccgggaaataaatcttctagtaaacaattcttggatgaaaggggaaaatagaaaccaaatgacagaattctaaaagaaaaaaagacaaaacactatgtgtcaaaacctatagaatatgtttaaaacgatgaacagatgaaaatctgtttcctgaaacagtaaaaatcagagaaggaaaataaacaggccaggtgcggtggctcacacatgtaatcccagcactttgggaggccgaggcaggtggattgcttgagctcaggagtttgagaccagcctgggcaacacggtgaaaccccgtctctactaaaatacaaaaaattagctaggcatggcggcatgtgcctgtaatcccaggtactcaggaggctgagacaggagaatcgcttgaacctgggaggcagaggttgcagtgagcccagatcgtgccactgcactccagcctgggtgacagagcaagactccatctcaaaaaaaaaaaaaaaaaagaaaagaaaaacagattcccaactggaaaagccaggggaaaaaaccctgtaaaatatttcagaataaatccaagaaataatttaataaggataaatgcagaaatttatgatggaaatagaagaatagctgcaattagtaaacactggctaacttcaaaaaagagacagtaaaagcagaagtatgaagtgagaaagggaataaccattgaaaaagaagaaacttaagaatcgttaagaggccaggtgtggtggctcatgcctataatcccagcactttgggaggctgaggtgggaggatcgcttgaagccaggagttgaagaccaacctgggcaacatagtgagtccctgtctctacaaaaatttttaaagttaactgggtgtggtggcatgcacctatagtcccagctacttgagaggcctcagtgtaggagaattgctagaacacaggagttcaaggctgtagtgagctgtgattgcaccatcatactccagcctgggcaacatagtgagaccctgtctcaaaaaaaaaaaaaattctaagagacaagatacattggaaaatttgtttggaaaacacagtttaacagaaattgatcccatcagagataggaagcttaaatgaaccaccaaattccacggaaggaattacttcaccaaaaagcacaaggagctggattcagtggctcatgcctataatcccaacattttgggatgctaaaacgggaggattgtttgagcccaggaatttgagaccagcctgggcaacatgacgaaactctgtctctacaaaaaataaattagggccaggcaaggtggctcacacctgtaatccmgcactttgggaggccgaggtgggcggatcayctgaggtcgggagttcgagaccagcctgactaacatggagaaacctcgtctttactaaaaatacagaattagccaggtgtggtggtacatgcctgtaatccccgctactcgggaggctgaggcaggagaattgcttgaacccaggaggcggaggttgcgatgagccaagatcgtgccattgcactccagcctgggcaacaagagcgaaactccatctaaaaaaaaaaaaaagccaggcatggtggtatgcacctgtagtcccagctactgsggaggccaaggtgggagttcacttgagcccaggaagttgagggagcagttaaccatgtttgtgccacggcactctaccctgggtgacagagcaagactctgtctcaaacaaacaaacaccaggcccaaatagtttcatgtggaatttctgagacctttaagggccaaatagtcctagtgccacataaattcttccagagcatagaaagtaaacaaaacacacaagaaccttccaaaatttttwaaaagaagtatgatatcagtacctgaacctgataaaggtagtacttaagatttcagtttcatattgcttatttctttaaaattatatctgtggcctactgggatgtattctaggaatgcaagattggttctaggaaactcaataatatactgtattaacacatataggggagaaaaatcacaattatttatatagacgctgaagaaaacctttaagaaacatcaatacctattcctgatagacttcataaaataggaattaatactttcttaatgtaataaaatttggtatagaccttttcaaaagcctgcatctcacctaataaagactagcttctactaggattaggaacaagtataggatgcccattattcccattattatttaacattgttctggaaatattaaccaatacagttatccaagaagaggaccaattagagacaaaagccttgggagagatgtcaagctgtaacgtaggtgatatagtattgtagtattcaagaaaactctagagaatgcattattatactaaaacaatacttgaggaacaggatacaaaattaacatatagaaatcttcatatacgcaagcagtaaccaattatggtagagtaaaagcctctcttacatagcaacaggaagataaaatatttagtaataattttaacaggaatgtacagaagctgttttagggcaaatttatttttttagacagggtttcactctgtcacccaggatggagtgcagtgacccagtcacaactcactgcagcttcaacttcctggtcaagcaatcctcccacattgccaggactacaggcatgcatcaccacacacacctgatttaatatttttttttttgtaggaagaattcctgctatgttgcccaggctggtctcgaactcttgggctcaagcgatccttctgccttggccttccaaagtgctgggattttaggtgtgagcccccaagcccagcccagggtgatcttaaaaacacttttgaaaatcaaaagtaggccaggcatggtggctcacacctgtaatcccagcactttaggaagctgaggagggaagatcctttgagcccaggagtttgagaccatcctgggcaacatagtgagaccttgtctgtacaaaacaaaacattaaaatagacttgaacaaatggaaagacattccttgttcctggggttaatgttattaacaaactggtgattcttaagttgttctataaatttaaggcaatcccaataaacagtttttaaaaactagaactagataagtttatacaaaagtgcacatggaaaaataaaagtgcaagaatacctaagaatatactgcaaaagaaaagctgtaagtggggactagccatgctttatattacagcatcctatagttaaaactgtggtacaggcacataaatagaccagtggaatagaataaaagagccagaaatagactcaagtacatacagaattttagtacagtcacgcgttgcgtaacaacagggatgtgttctgagaaatgcatcattaggcagtttctttgtgcgaccatcatagagtgtacttccacaaacctagatggtataacctattacacacctaggatctgtggtatagtctgttgctcttaggctgcaaacctgtatagcacgttactgtaccaaacactgtatgcagttgtaacacaatggtaagtatgtatctaaacataaaaagggtacagtaaaaatagggtattacaataggaccaccttcctataggcagtttgtcattgaccagaacctctttgtgtagtgcccaactgtatatgataatgatattttatcaaatctcaggggcaaaaattascttttaataaatgatgctggggcaactgactagccatttaggaaaatataaaattagattcatactttacaccatgtacaaaaataaactacaaatgggtcagaaaactaaatataatctgtgaatccatacaagcactaaaagaaaacacagatgaattcctctgaaaccttaggggaaggtttagaaatgcttttgaactgtaactcaactagtttcagtgaaagatagacaaagctgactgtgaaaattttaaaatcccactcttcatagcaaaaaactataaataaaatcaaaaggcaaccaatatgctagaagaaactcttggcagcatgtatcccagagtatgaatattcttaataaagagctcttatgctgagggattaacaaccaaaattgatagaaaagtgggcaaaaaaccacggatagatagctcacaaaaaagatataaaatggaccttaaacatgtcaaaagattttcaacttcatacataatgctagaaatacaaattcaaattacactgagtattttctcatatgttagattggctaaaaataaaaaccccgaaaacactttccattggaaagtcagtggagaagcaggcactcctgtgcattgctggtaggggactctggtattatccaggactaaattagcatttgccctttaactcagcaatcccattcctarcaatttaccctgaagatacacttcccaccatacaaaattatagatgtacgaggttacgaccattacgttgtcatttgtaattgcgagatactctaaataacctaaatgtaaattttaaaataatgtaagccacgtgtagattggttgaataaactttggtacatcacacagtacagtactatgcagaagtgaaaaagaatgatgatctctatgaactgataggaagtgattcccaggacatattaagtgaaaaaattcaaagtgcaagagtgtctgtactgttactttccatgtaagaagggtaaattaaaagatacaaatgcaaacacacacataatacatcagaaaataatgagattaataacagggtaggtgggactagggtggaagggatggggaaggaacactattaaactgtattagtattttacatattaaaaaataaaatcaagactggggaaaacctttaaaatgaaatacaaacatgaacctgttttaaatgagtgtcttttgaacctatattttgactatatacctttaatctaaagaccaaaatagctgtaaaaaaattctagctagtaggtctgttttttgtagctaagttagcagttctgaaaccattttctctgtatttgaggatcgaataaataagtacattttgagggtagtagcagccagattctgctatcggagaagggagttgtgaatatggcaagagaaaaaaatctagaatgaaccctatagttgcactggagtaggattagaattatcagcatgaactcatggtttttcatatagctggactttggacgttttagaaggagtcacacacacacacacmtccctaaaaggaacccaggccttttggagaaatggctgattgtagggctggggcaggaaagaaaccaagatgaaccagaaagtaagatacttccaaaatataaggtagtgctcaaagaatgatggggacactttagaaggacacaggaaccagcatgaaggaactttggtaaatataggacaatttaaacataaaatgatggtgaaagattataatccatagaataaaacaatctataagttcatattgatacctataagtaaatgggaaaggcaaagatctttcttgtggtagatgtcagctaataaatggagaagaaaagtggaattggaaaactcaccctttgggctgggtgtggtggttcacacttgtaaggagggcggattgctcgagcttcggagtttgagcccagcccggccaatacggtgaaaccctgtctctactaaaaatacaaaaattaaccaggtatggtggcatgaacctgtggtcccagctgcttgggaggctaaggtgggaagatcgcttgagcctgggaggtggaggttgcatcgagctgaggttgctccactgcactcccacctaggtggcagagtaagaccctgtctcaagaaaaacaaaaacaaaaacaaaaaaacaaaacaaaaaaactcaccatttggcagctatcatgacagtaatgagtcaggcaagaatcatggctgcttggtggctgctaggatgctaaacctagtggatgaagaactagattaatgattaaagtttgaagaacaggattttatgtagtctcaacgtatttcctcacaaaattcttattaaattggagaaatagtaactttacaaggaaacctgcagatatcaccatcattaatggacaaatcaacacattgtgccacttgatgagaatgctccttctgtggtactcctgtggaaaggcttagctcaaaattaaacatgaagaaataccaaaggaacccaaatagaagtcatgctttacaaattaactggtctgttgtcttcaaagatgtcatgattatgaaagacaaagatggagggggaaagttaaaggagcctaaagagatataaccactaaaagcaccaggtgatcctggctcaggttctggaccagaattttgttgcttgtgctgctataaaggatactattggaacaattggcaaacttgaataatgtcatataataagaaatagtggccgggcgcggtggctcacgcctgtaatcccagcactttgggaggccgaggtgggcggatcacgaggtcgagatcgagactattctgaccaacatggtgaaaccatctctaaaaatacaaaaaaattagctgggcatggtggtgcgtgcctgtagtcccagctactcgggaggcttaggagaattgcttgaacccagggggcggagattgcagtgagccgagatcgtgccactgcactccatcctgggcagctaagcgagactccgtctcaaacaaacaaaagaaaattgtgaattgggcacagtggctcatgcctgtaatctcagcactttgggaggctgaggcaggtggattgcgtgaggccaagagtttgagaccagcctgcgcaacatagcaagaccctgtctctacaaaaaatataattttttttttttggtggcatatacctgtagtcctagctacttgggaggctgaggtgagagaattgcttgagccctggaggttaaggctgcagtgagctgtgatcatgcttctgcactccagcctgggtsacagagcaagacctgtctcaaaaaaaaaatagtattgtggtaatgtttatttcctgattttgataatatcactgtagttataaaaaagaatsttcttatgtgtttatatatatataaaagagagagtgatggtcgggcacagtggctcacgcctgtaatcacagcatgttggaggccaaggtgggaggattgctcaaggccaggaattggagaccagtctgggcaacatagcgagatctcatctctactaaaaattaaaaaattaactgagcatggtggtgcacagctgtggtcctagttgcttgggaggcagaggtggggaagatcacttgagcccaggagatcgaggctgcagtgagccataattgcaccactgcattccagcctgggtgacagagggagaccctgtctcaaaaaaagaaaaaaaaaaaaagcagaatagtttgtagtaaaataataatgaagaatcrgggtgaagggtatatgtactgttcttgaattttttatttttatttatttattttttgagataggatctccctccgttgcccaggctagagtgcagtgrcataatcttggcttgctgcaacctctgccttccagtttaagcgattctcctgcctcagtctcctgagtagctgggattacaggtgyctgccaccacaccaggccaattttttgcatttttagtagagatggggtttcgctacattggccaggctggtcttgaactcctggcctcaggtgatccacctgcctcgacctcccaaagtgctaagattacaggagtgagccactgggcccggcctgacatttttatttaggttggaaataatttcaaagtgaaaaggtaaagttgtcacaaaaattccacactcaaataggacttttaaaacaaacttcattggtgtgtccatcttagcagcagttgaggttttccacaccatttctccccagcagggaggaggtgctgcctctgcctgttgtcctgcttccttggagaacctgtgatagagctggagctgtctacctctacctctgtaattctgtaatagaaatgtcattctgtagtgtcattacatcttatrcttstctttaccattttgagctcagaagtaaatttattcctgcaggttgttgatgagcgtgaattttttgagatcatgcccaattatgccaagaacatcattgttggttttgcaagaatgaatgggaggactgttggaattgttggcaaccaacctaaggtggcctcaggtaggatggagctcttataagccttggttttggggttggaggccagggaagcctgggtccatggtatcctttctgtcttttgcctgttcttcagacatggccttccatgaccagaggaaaaaatctaaatggttgttataaaagctaattttttttttttttttttttttttttttttagacagggtcttactggtgtctaggctggagtgcagkggtgtgatctcagcacactggaccctctgcctcccagggtcaagcagtccttccacctcggcctcccgagtagctgggactacaggcacataccaccatacctgrctaattttctttttttgtatttttggtagagatggggttttgccatgttgcctgtgctggttttgaactcctgagctcaagtgatccgcccacctcagcctccgaaagcgctgggattacagacatgagacaccacaactggcctataaaagctacttttaatatctcaaaatgcttytttcatactccttttcaaaggtttataggaaacttacattcttagtgtataaggttttcaattttttaggggtcagttttctgttcccccctacccccagctaaatatatgactcacccactaatcatgagctccatgagggcaggggtggtgatgtcgtattcacagtagtatctccagtgccttcaacagtgccaggcacatagatggtacgtgacaagttaatggcatcttaccatgtctgtgccccacagctttctggtgatatggccagacctgattcgcagccaagtgagggagactcttccatggctgtgctctgggagggattgggagtgctggggtggggactgtgaataccacttctctcctcaatatttttcctcttagatttgttttgtatccttgtttaggaagaatctgtctttcttcatgacctaacctcatcttatttctgccatggaaattttttattgtctttagaaaactgttttggctgggtgtggtgcctcacgcctgtaatcccagcactttgggaggccaaggcgggtggatcacgaggtctggagttagagaccatcytagccaacatggtgaaaccctgtctctactaaaaatacaaaatacaaaaaatgagctgggcgtggtggcacgtgcctgtagtccagctacttgggaggctgaggcaggagaattgcttgagccggggaggaggaggttgttgyagtgagccggggattgtgtcactgcccgggaggcagaagttacagtgagccgagatcacgccactgcatgacagagtgacactgtccccacctccccmaaaaaaaaattttgtcatggtaaaatatatataacaaaatatgtctgtttggcccatttaaagtagtgcaaccgcagtgattacatacaaagtgtatgcaaccatcaccactgtttccaaacattttcatctcctcagagactgtgaacctgttaaacaataactcactatttatctcagcctccagcctttgctattctaaatctactttctctctctatgaatttgcctattttagatatttcatataaatggaatcatacagtgtttgtccttttatatcaatcttatttcacttagcataatcaggcttatttcatttagcaagattcatccatattgtagcatatgttagaacttcatttatttttatggctgaataatattatgttgcatgtatataccacattttgattgattgtccatttgtcagtggacacctgggttatttccacctttgggttactgtgaataatgctrgaataaacattgatatataagtatctgtttgaacctcagttttcactttttctgggtgtgtacccagaagcaaaataactgggttatgtggtaattctaggtttaactttttggggaaacaccatactgttttctacagtgtctgcactattttacattcccaccagcaatgtgcaagggttccagtttttccacatccttgccaacacttattattaatttttaaaaatagtaatcctagtggatgtgaagtgaatggaattgtgtttttgatttgcatttctcatcaacattagtcttggtgagcatcctttcatgtgcttattggccatttgtatatcttctttggaaaaatgtctattcaagtccttttccattttttaattttgtgtgttttttgttgttgagttggagttccttgtatattctgtatattaaactcttacatttgacttacaagtattttcttctgttctataggttgtccttgcactcttttgatcatgtcttttgatacacaattttttttttttttttgagatggagtctcgcgctctcttgctgtctccagcccgggctggagtgcaatggtacgatctcggcttattgcaatctctgtgccccgagtttcaagccattctctcacctcagcatcccaaatagctgggattacaggcatgtgccaccatgctgggctaatttttgtatttttartagagacggggtttcgccatgttggccaggctggtctcgaactcctgacttccagtgatctgcccaccttggcctcccaaagtgctgggattacaggtgtgaaccactgcacctggctgaaaagtttttagttttgattaaatctgatttctrtattttttcttctgttgcatgtgcttttgttgtcgtatataagaatttaaattcaaggttgtgaaggtatgttcctgttgtttttttcctgagagtattacggttttagcccttacatttagcttttaatttcgagttaattttatatgtattggataggagtgcaacttcattcttttgcatgtggaaatccagttattccagcaccgtttgttgaagagattattctttcctcattgaacaggtgtggcgtgcttgtgggaaatcaacaggctgtgggtgtatgaatttgtttctgtattcttaacactattctgttggtctgtatgtctgtccatattccagtgtcacactgttttgattactgtagctttgtatatgttttgaaattgggaagtgtgtcttccaactttrttgttgttcttaggattgttttaggcatttggggcccttttaaattccatatgaattttggtagtgactttcccatttctccaaaaaaggctgttggaattttgatagggatggtgttgaatcagtagattactctgagtagtattgacaccttgacaatattgtctttcaatccatgaacacagaatgtctttccatttttcttctttttttatttctttcagctgtgttttgtagttttcagagtccaagcctatcacctctttggttaaatttattmctaaatgttttattcttctagatgtcatgtacatggaattgctttctcaatttctttttcggattgttcattgctgctgtatagaagcacaactacaaaactgatttttgttgatcttgtaacttgcaactttgctgggtttattaactttgttagcttttgtttcaaaatttatattgctacattttgtttgattgttgatctgtggacatggggtattttcaccttttagttgtgaataatgctggtgaatattgtgaatattatgaaagttgatgaatttgttcattagccctcttgtggatttgctgggattttctatatatagggtcatattttctgcaaatagagatagttttacttcttcctttccaatttggatgctttttatttttcttgtctaattgctctggcaagaatttcttgtacattgttgaattgcagtggtgaaagtgggcatggttgtcttgttcctcatgttaagggaggaaaacctaatctttcattattgtataatgttagctgtgggtttttcatgaatgccctttataatatggaggaagtttccatctgttcatgattttctttgttttatcatgaaagggtgttggattttgtcaaatgccttttttgtgtcaattgagatgatcatgtggtttttgtccttccttttgttaacatggtgtattatgttgattttcttatgttgaactgcctttgcattcctggaataaatcccactggatcacagtgtataacctctttaaaaaaatagacttacagaacagttacaggtttgcagcaaaattgaatggaaagtacatagaattcctgtacaccttctgctcccacatgcacacatgcacagcctccatatgtccaaaatcctgcataagagcagtatatttgaggttaatggttgtattaatctgttttcacactgctataaagacaccacccaagcctgggtattctataaaggaaagaggtttaattgactcacagttccatatggctgggaaggcgtcaggaaacttacaatcatggtggaaggcaaagtggaagcagacgttcttcacatggcagcaggagagagaagtgcaggcaggggaaatgccagatgtttataaaaccatcagatctcatgagaactcacacactatcacgagaacagcgtgaggaaaaccacccccatgatccagtcacctccctcccttgacacatggtccctccctcaacacatggggattacagcttcctctctcaacacatgggtattacaatttgagatgagatttgggcgggcacacagagctatcccataccaatagtattttgttttaaatttcagattctactggtttattgccaatatataggaaagtaattgatttttgtatattagccttttatcctgcaaccttgctatattattagttccagcagttattttttggtcacttctttcagattttctgtatggacaattttgtcatctgtgaacaaagacagtttgatttcttccttctcaatgtgtatacgttttattttcttgtcttcctgcattagccaggacttccaatacaatattgaaagatagtggtgaggggacatttggtcttagcaggaaaacttctagtttcttacaagtaagtgtgatgttagttgtaggtttttcatagatgttctttataaagttgaagaaattcccctctatacctagtttattgagagtttttgtcatgaatgtattttggattttgttacatgctttttttgtattcatatgatcatgtgatttttcttctttagactgttgatatgatagattacgttaattgatttttgactgttgaactaaactcacatacctgagataaatcccacctggttttgatgtgtaattctttttctgcattgttggatttgatctgctaatattttgttgaggattttttcatatatgtttatgagcaatattgagatatagttttcttgcaatgtctttgtctggttttggtatcagagtgatgctggactcatagaatgagttagaaagtattctttctgcttctgtcttctggaaaagattgtagagaactggtattaatatcttccttaaatgtatggtagaattcactagttgaaacctgggctttatttgctttttaaattatgtaggaaataaaaagtgaagttagaaaccaaaatactcaaatcctggtttttatatttgcccatgtagtcatctttacttgagatatttatttcctaatgtagctttgtgataccgtctagtgttcttttcttttaacctgaagggcttcctttagcatttttctgtggagtaggctggttggtactgagggcctcagcttttgtttatctgaaaatgtcttaattcttaaattttctctcatttttgaaggacagtttgccagatatagaattcttggttgacacttttattcttttagcattttaaatatgttatcctgctgtctctggctttcagagtttctgctgagaaatcactggataatcttaatgaggatttcttgtaaatgatgagtttttttttttttttttgctgcttttaagattctcttttgtctttcagtaatttgactataatatgtctcagtgtgggtytctgaatgtattcttcttagagttagttgagtttcttatatttctagtttcacatcttgcatcaaacttgggaagttttcggacattatttcatcagattatctccttgccactttctcttagtcttctcctggtgctcttatcctgtgtatgttggttcacatgtgggtgtcccacaggtcccttaggttctgctcatttaatttttttattttctcctcagagtaatttcaattgttttaycttcatattctctgatctttcttctgcctgctcaaatctcctattgaatccttgtagtgaatttttcatttcatttattgtacttttcagctccagaatttttcattattttcctgatttcctttagttctttgtccatgttttcctttacctctttgaatatatttaagactagtttaggctgggcatggtggctcctgcctgtaatcccagcactttgagaggccaaggtgggcagatcacctgaggtcaagagttcgagaccaacctagccaatgtggtgaaaccctgtccctactaaaaatacaaaaaatgagccggacgtggcagagggtgcctgtagtcccagctacttacgaggccgaggcaggagaatcacatgaacctgggaggcagagcttgcagtgagctgagatggcgccattgcactccagcctgggtgacaagaagcagaactccatctcagaaacaaaacaaaacatctcaaaaaaaaaaaaaaaacccactagtagtgttttatagtctttttctagtaagttcagtgtctatgcttacttagggatagtttcttcatttyataccttgtgatttttttaattgaaaatggggtatttatacattataatgtggtaacgctggcagtcaaattttcctcttttcccaagctttgttttttttttttttgatatttaatgtcatatatgtttgcctagtgtctttttgcaatgacttttccagagactatattttttgtcatttgtggtcactgaagtccctgtttcttcttattgtttctttctttcttttgagacagggtcttgctctgttgcctgggctggtcttgaactcctgtccttaagagattctcccaaagtagcctcccacagtgttaggattacaggtgtgagccaccatgcccagcctgtttcttaacttgtatatttgacagaaattttcttgaacaccaggaactaaaaccaagaaacaacaaacaagaaaactcctggtcttgaaattgtctctgtgttggggctctcctttgatgcttagccaaacttgaactaaggtttgagatcagctcaaggttaaagtttaaggttttctctggtcttttattttgtaatagtgttttcattttcattcaacttcttttcttatttcccctctcagatcttttctgatcgtgtatctcatcctaggcatacatgtgtctttctgaattctccctattcacgggtgcttttgaatgcactaatttcctaaagacactctctgttttttttttctcccatatcttaggtggtttcaacagtaatcttttgcccagacatctgcaggttgttcctctaccttaccatgatttaaagaaatgcctgctacatttccagcctggataagttctgagttaggtgaaacagagatgtgttccttgtgtcagtccttcaggcagcccacagacaggttagagcagacatatgcggaaatttgtgaatgaggtctgctctgcttcctccagaaccagggaggaaatgggacaagtgtaattaaaaaggcacagagctttcataccattttcttttatttttttgagacagagtctcactctgtcacctagtctggagtgcagtggcatgatcttggctcactgcaacctccttctcccaggttcaagcaattctcctgcctcagcctctgaggtagatgggattacaggtgtgcaccacgctcggctaatttttgtatttttagtagagacagggttttgccattttggccaggctggtcttgaactcctgacctcaggtgatccgcccaccttggcctcccaaaatgatgggattacaggtgtgagccaccacatctggccatttttttttgttcttttagagacagagtgtcactatgttgcccaggcaggtctcaaactcctgggcttaagcagtcctccactttggcctcctgagtagctgggactacattgtctttttattgttgatttctagggcctggcttgtgacttgcctatttatttcctttcctttccttttttttttatttgagatggagtctcactctgttgcctagagtggtggtgcaatcttggctcactgcaacctctgcctcctgggttcaagtgattctccttcctcaagccttctgagtagctgggagtacaggtgcctgcaaccacgcctggctaatttttgtattttttagtagagatgaggtttcaccatgttggccaggctggtcttgaactcctgacctcaagtggtctgcctgcccgacctcccaaagtgctgggattacaggtgtgagccactgtgccgggccatgtttttattcatgaatggatattaaattttttcaggtattttctctacatctattgagatgttcatatagtttttttcctttatttaataatttcattagttttcacatgctgaaatcaaccttgaattcttgggataaaccccacttggacatgatgtattactgtttttttgagatggagtgttgctctgtcacccgggctggagtgcagtggcatgatttcagctcactgcaagctccgcctcccgggttcacaccattctcctgcctcagcctcccaagtagctgggactacaggtacccgccaccacacccggctaatttttgtatttttagtagagacagggtttcaccttgtcagccaggatggtctcgatctcttgacctcgtgatctgcccgcctcggcctcccaaagtgctgggattacggtcatgagccaccgcgcctggcctactgtttttgtatatattgctggacttgataatgtgccttacttaaaaagtaaaaatttttcatttatgtttttggtctgtattcttttctgatgatggtccttgtcttgctttggtattggggtaatactggtctcatagaattaagttggaaactcttctaggaggggagatttactagtaattgagctcctactctgtgctgctttatagattccatttcctttactccttggaactatgctaggaggcagtatcgtccctactttgcaggtaaggaaccttaggtcaaaaggcaaagtaatttctcaagggcacgttgccatcatcagtggagccagaatctgattggaagctctgaggactctctaagaccagcccttgaatgctgcctcccactgatggctccctgcggcaaggccggctgtgtctcagctggcggcagccctttggtctgtagtgagtctgtagtagtctagttctgggcctctttggccagtgacagacaggtggattcttcatcttccctgtttcctggagtttgaggggtccttgttaccattctgcaacaaagaagtgttggtgcctccacagaaaccagctttggatggctgctgaggacaaatccccattgtggatagaactgggaattgcctggatactcagtatggataatctctctctttctaggatgcttggatattaattcatctgtgaaaggggctcgttttgtcagattctgtgatgcattcaatattccactcatcacttttgttgatgtccctggctttctacctggtaagtttttgacagagtgggggctaggagagttgcctttcccagtaaggtgcccactttatttggagatcttcttgcagaactccccgaggacttgtgacttctccatgtattctgggtgtccagaagatagggctgtgtaaggaatggccctctccagaggtgggaaagacctcacagctgagagtggcaggataaccatgtgaggacttgtgggtatctagtaactcttcctcatgtctaggcacagcacaggaatacgggggcatcatccggcatggtgccaagcttctctacgcatttgctgaggcaactgtacccaaagtcayagtcatcaccaggaaggtgaggacctcatgttggaggccatgaccctgctcactttcctacagcatagccgtggtgggaggtctggcagagttttaccagggctggaaggagtacaccttgctcatccttaaaaagatctcttgaggatgttgttcccagccccgcagaaatgtctgtgcttttttaacacaggggaactgaaggcagtagtgggaaaaagccagaaaagataatgagcattaactttgaaaggtcttacagaccgtgggccttcaggagcccagtagggctattcttgttctttgtcccaattttacctggtttcctggggtctttcagggacatgatctggctgtctcaggctctaacactcagcatttggatctgttttaggcctrtggaggtgcctrtgatgtcatgagctctaagcacctttgtggtgataccaactatgcctggcccaccgcagagattgcagtcatgggagcaaaggtgagggcctcttgcttttccctttctgggtccaaggactcgactctaccagcgagagctcaaggcatagctgggaaatgttggagagaggccagggcccctaggttgagccaggactgaggtgaatgggacctagaccttggtaagtctccctcttggggctccagagatagctctgcctcctgtcctataccctttcttcaggcccacgctggtgtcttcatgccaaggtgggtgcggcaggtgaaaggaaagtgagaggggtccagagtggttttgagattgtaagtaaagggggcaaagggttgagtcaactgaagtcaccttcagaagtattggacattctcccagctccacctcagcttccagggagggccccagagctactcttttaagctcataagaagctaaactgtaggtccgaccctagtgacgttggacaaggtacttcctattgcttgacctattcctcactcctccctgctttgaagtagctattgtggtcgaatcagataacttccaggtcccctagagttgacttataggtgctctgacttgaaggccaatccttctaatttccagttcagtctggtcgcctctggccaccgaattgtrtactcaggtcttagggtaccgaaaaagggaaatagcacatttaattccccttgatacaagaccatggatttaataatggaaaacagggctaacatctttggctcaaagaartatgatgagtgcaaatggagatggtagaatgggctctggggagagaagctactggcttttgcctgactgccccttattggggccacagggaagcatcacatcccatcatgcagccccttgtgtcatgatggtcagccccaggcagttcctccctctatgctatggcctttagagatggcacttcccctcagtacactgatttaccaagaaatttgcacccacacacagtgataatgagttgaaggagatctgtccaggttgggacgaccaaagatgttcatgaactcctctaatcacagggcrctgtggagatcatcttcaaagggcatgagaatgtggaagctgctcaggcagagtacatcgagaagtttgccaaccctttccctgcagyagtgygaggtaggggactgtggtgaagagggcagctttgtttgtttggtcaacttgctcattctttctctacagaaattgtcacataactgcctttttgcctttgcagtctaatctgttgactagtgagggttgggactgtccctgggcagtcatcacttggactaaggactgtgggacaggctgctttggtaaccacaattaaaacaacattgccaaagtgtattaaatttctaggtgttgttccagttgtctagtgctgtgcagaaattcaccctataactcarcagcttaaactaaccaccgtttcccccactgcttatggttctgtggggtccacaatttggtctgggcccagctgagtggttcttgtgctggtcttgcctgggatcacccacacaggtatagtcattctgtggcttgaccggggcttgacagtccaaaatggcgtcacttacttggtagttgctgttagctagactcactccccacgtggcctctcacccttgaggaggctagtccaggcttccttacatggtgtcccgagagtagcaagggggcaaagggaaactgaggcctagatttggaagttgcacagtgtcatttttgccacattttataggccaagaaaactcaacaaggttaagcgaaggaatacaaatccacctcttgaagagagaagtggtaaagtcacattgcaggacttgtgtacaaggatgaattgttatagccatttttgaaaacctagatgtattttctttatttcctattgaattcattgtggcaggatggaggcattggagcaagcagggtatagggagggtgtccgattttccttttcttgccaagtgctcctaggccagaagttggggagctgtcagaacaggccagctcctgggatacaagggggaattcacagggcctaccatctctgtatcaggttgggcactgcttatactgctggccccagggatggtgcccaggctgagcagaaggttgaggggtggcatcatctcgggatgcagatgatccactcccttttctgtgcttcaccagggtttgtggatgacatcatccaaccttcttccacacgtgccygaatctgctgtgaccyggatgtcttggccagcaagaaggtacaacgtccttgragaaaacatgcaratattccattgtaaacaaatcaaaggaaaagaaaccaagaactgaattactgtctgcccattcacatcccattcctgccttttgcaatcatgaaacctgggaatccaaatagttggataacttagaataactaagtttattaaattctagaaagatctcttttgtgccttactgtaaaattatttacttttttaaacattttaagttgtattttttgagcataaattcgatttttttaggtggaaatctgaaaaatcaatacaactagaaagaaaaatagtacacagtgttatcatctagagctgatttttatttcacacctctgggtattgttctttttcctctcgagttagtttttttatccataggtgagatatatagtaagtttttaaggcaaagtatttcttaggcttaagtttccttattttaaaaatagggtaatatgccctatctatctcctaattcctccatgaattgaggattaaatgtgatgtttgcaattgtggtatatgtgtttagcagtacagatgctcaataaggcatagcaccctatgttgactcaggttatttccagaaatgtgttcttaaaattaaaaaaaaactttttaattgcgaaaattttcaagccgatagaaatgttgcaagaagtgtattgtatccacttcacctagattctccagttggtaacattttctccatttgctttatttcttccatacgtagatatatctaataatatataatatgcatataagatatatctaattatattattaatataattaatgtataattatatctaacatgattatatatatttatatatttatattatgtatttatacattatataattatataattgtataacatatacaatataattatttaattgacccctttgaaagtcagttgcagattcgtgaccctgtgttcctagaaacttgtatctcctaggaacaaggtcctttgtcttacatagtctgtcgttcatgacgttgacatttttgaggagagcttacttgctggttatttggtagagtgtccttcagtttgggatgtctgtttcctgaggtttagattcagataagactaacacatattcctttcagtgcgtcacattagtaagcacattatgtcagtttttcctcctgttggtaactgattctgatcacatggttaaggtcgtggctgcaaaggtttttccatggtagttaccattttctctttgtaactgataactaatttgtggggtattatttaatcttgtctgtcaataaactttcacctgggccaggcgcagtggctcatgcctgtaatcccagcactttgggaggccaaagtgggcagatcaccttaggtcaggagtttgagaccatcctggccaacatggtgaaaccccatctctactaaaaatacaaaaattagccggatgtggaggcacatgcccagctactcaggaggctgaggcaggagaatcgcttgaacctgggaggcggaggttgcagtgagccgagatcacaccactgtgctccagcctgggtgacaaagctagattctgtctcagaaaattaaataaataaactttcacccaataattttagtattcattgatgatttttgcctcaatcaatgattctgcattgattataaaatgttgagtttctaactctctcatatttattagttggaactctaggtaaggaagggagctttcttttctcctgtttttgttttcttagtatcattttggacttgatttattttattttatttatttattttttgagaaggagtctcgctctgtcgccaggctggagtgcggtggcgcaatctcgactcactgcaacctctgcctcccaggttcaagcaattctcctgcctcagcctcccgagtagctgggactacaggtgtgtgccaccatgcccagctaatttttgtatttttagtagagacggggtttcaccatattggccaggatggtctcgatctcttgatttcgtgatctgcccgcctcagcctcccaaagtgcttttaatatatcccactgatttttttagtatttcgttattttctgacaagataatgctctaggcttatcttgtattttccttgcccagcccaggaatcagcagtttctccaaggagtttctttaataggtatgtagtagtagtatatagtagtttcttagtttcttttagtaggtatgtcatttagaagctaaaattggcactaggtattcacactgatactggatatcattgctttgaggcatttcagcagacagaactaggaaaatttatgcaaataagtgtgtgtatatatatgtgggacacatgtatatatgaatacatatttatcatacttttaaatcatgagttcatactgaaacttttaatccaacaccatgggtgcttctttgccttcccccattctgtattgtctctcttaccacagcagtaataaccctggctcccattattctcaatatatttcactcatttgctcagtgctaccataaatacaagtttcagaatcactacagctctatcaacaataaaccttctaaagttcacgacttctttgtagttcattttgtctttaaactgaagatacatggttaagctacctcaattagtaactgagtggttatcaatatgaattagtcctttttgtttgtaaaccactttaaagcctttcctcctacactgttgacttgattttactaagttaaaacattaatagttttaccgaactggagattaagtttgagcagaagtaccaaccatggagtgctgatccaagatgcccccccacctcaggcatcctctctggtgaaaccccagggccctcccactactgatggctttcccttggctccagagatctgtaagcactgcttggacagtgaatcattatttcaaggtcaacttaatgtgtgactgtttattctccacttttcccatttcaaaaatattttcccctaccccccattcccagtagcccttaagagtcattctttttttttttttttttttttttttcttaaagcatctttccactctccttcagtcaccaatcctagttgggctctgaggacttttgcagcagtctcttcactgatctctgtggcctcccactgagctggaagtcctgttctcagctaccatactaactccagatccagattttgttgcattcctctgctccagcgccacttccagagctccctgttctccagagtccttagcccacgtaggtggtcctggacagtctgtccctcccttgcttgcctagtgagttttctgagcccacagttcttgttttcgtgatctctgctatggtccataaaagagtacatacaagctcttttttttctttttggaggtaagagtccaagaagtgtttcaccaggttgtgcagtctggacaccgagatggtagaggggctgtaagatggtagaggaaccagctcaggagagcagctgggctagcagctttacggaagccttggatggtggggaaactcccgtacagaaactcagctggtcaaagaaactcaaagccacaagaccttggaagctttgtcaagtggaccagcctccatggaccacggaataccttgagagtaatgacagttgagtgttctcttgtgtgggaatgccttccccagctggtgccctcaccttaaagggaaaaagaaaatacactgaattttgtaaatgggaaatacttgggtccactgagctgatagctgacaagtgtctgtctttaaactgagagcagataatatggtgagctgtggtgtaggaagcactgctagggtcttgctggtcctgccccgccttgtgttaatccagttcctcctgagctacacagctgacaagtggtgaagctgggatttgaactcagatgggtttgaccccagccaagcctgtgttctgatcatttcaaagtactaccactcagctgatgaggaaggtgagatggacttctaagggttggcctaagagtaggggtgagggaggttggtggtctgttcccctgggcttgtcttaacccagaaagctactacatttagacagctttcctatctcccgcatgattctcttgcaaagcagtaccaacagatggccagtcatctttttgagttgctagagtaatggggagcacatccacaatacacccttctaatgcttgttagaaagtgcttttgttgcaaagttcttctagcttctttttttgaccctgtcttggtctccccagcccaactttctgcctctggttgcactgatactttgtcctggtgctggtgcttaagatgtggtctgctcagccaaagaagtctgtgaaggatactcacccacatgtggagttgatgaatcagccctcttcacctattcaacagatgtgactgttttgtctttctggttccaaaggatttctggagagctatgactttacccttttagaagtattggtcctcatactctgtgcacctctgatgtcagcatgggatttctacaattccaagcaggagttgcagccacttgataggcagtgcctcagtctggggcctctgtggaatccagctggcatattccagccaatgtggcagcctcaatagttagttaagttttgaccatgtccctactgtcctgggtggtgaaaatactccctttatgtgtccttgggagcagaaagatgctcttcaaaaagtggtgcctgatggagatctccacagaacaagacactcagaagggcagggatagaatcttacctgagcttggtctagtatgaaaagcctaaggctgggtgcgatggcccatgccctgtaatcccagcactttgggaggccaaggcaggtggattgcttgagctcagttcatgaccggcctgggcaacatggtgaaagcctgtctctactaaaaatacaaaacttagctgggcgtggtggtgggtgcctgtaattccagctacttgagagcctgaggcaggagaatctcttgaaccccagaggcggaggttgctgtgagctgagatcacaccattgtactccagcctgggtgacagaccgagaccctgtcttcacttaccgcccccccccsccccccgaaaaaaaaaaggcaagcctgagtggcatcaaacctttgtttcccatgaatatactagtccctgcttgatggactgttacctgggaacaggggcaaacagggagttacagtcaagccacaaatgggagatttgcaagcctgacccaagcctgaaagtgctcatctagtctcatactcttgtaaccatctagatgagctgttacagaccatccttaaatgaccttccttccttggctgtctggaaagcttgcttgctgatttgtctcccacacctttgccttttttgcataggcatattaggccatttaaggaactcaccccctattgccagacccatgaagtgtgtagggtatgacttcttaaagaaagagtgaggaggtctaatgccaagagaaactttttaagacagtctggctctgttacctagattggagtgcagtagtggtgcaatcttggctcactgcaacaacctccaccttgtgggctcaagccatcctcctaccttagcctcacgagtagctggtgtgcgccatcatacgcagctaatttttgtattttttgtagaggagttttaccatgctacccaggctggtctcgaactcttgagctcaagtgatccactcaccttggccttccaaagtgctgggattacaggcgtgagccaccatgcctggctgaaaacttcatttctgtagctgcattgactctatgtggtcttcaaaagggcactgccagggtgcaattatgcatgtaagcccagagtctcaagccgtgaggacccatgctacaggccagtggatgggtgttccctgaatgcctcatgcaaaactcagtttgcaagagactccctcttaaaccacagatgacttggcctacacacactccagagaaatctaaggaatgaaagaaagtgagctattcctaaattctgctttcttaaaaaaaattaaaaagccaaaacaacaaaaccaccaactcactaataaggttaacttgctgccatttaacagattatcagaaattgcaaactctctcaagagccacaggacagaaaatcatctctttaaagccatacctggtagaaacaataggatgactaccacaagcctgattttgaatagtttattaaaggaaaggtgaagcatcagtttcaaattgtacaaaaggaaaaaaaacctcatattgcaaatgtacaatttacagaattactagcaaaaccaatcaaggagacaccgaaaatacaaaaatttgattgacttcaaactgaactggaaacccattggagtagatatttagcctttttgtgtggcatggtagtctacaattctgtcagcatctgttttccatacaagactgtcacgcaaaggatcaatttgtgcatgtgccagggcacctcatggcttgctccctggccaaaaccacaggcaggcagggctggggtggacagr

SEQ ID NO: 93231 - DNA, 107289 bp, Homo sapiens
  misc_feature (1)...(107289): n = A,T,C or G
nnnnnnnnnnnnnnnnnnnnnnnnnnnnnnnnnnnnnnnnnnnnnnnnnnnnnnnnnnnnnnnnnnnnnnnnnnnnnnnnnnnnnnnnnnnnnnnnnnnnnnnnnnnnnnnnnnnnnnnnnnnnnnnnnnnnnnnnnnnnnnnnnnnnnnnnnnnnnnnnnnnnnnnnnnnnnnnnnnnnnnnnnnnnnnnnnnnnnnnnnnnnnnnnnnnnnnnnnnnnnnnnnnnnnnnnnnnnnnnnnnnnnnnnnnnnnnnnnnnnnnnnnnnnnnnnnnnnnnnnnnnnnnnnnnnnnnnnnnnnnnnnnnnnnnnnnnnnnnnnnnnnnnnnnnnnnnnnnnnnnnnnnnnnnnnnnnnnnnnnnnnnnnnnnnnnnnnnnnnnnnnnnnnnnnnnnnnnnnnnnnnnnnnnnnnnnnnnnnnnnnnnnnnnnnnnnnnnnnnnnnnnnnnnnnnnnnnnnnnnnnnnnnnnnnnnnnnnnnnnnnnnnnnnnnnnnnnnnnnnnnnnnnnnnnnnnnnnnnnnnnnnnnnnnnnnnnnnnnnnnnnnnnnnnnnnnnnnnnnnnnnnnnnnnnnnnnnnnnnnnnnnnnnnnnnnnnnnnnnnnnnnnnnnnnnnnnnnnnnnnnnnnnnnnnnnnnnnnnnnnnnnnnnnnnnnnnnnnnnnnnnnnnnnnnnnnnnnnnnnnnnnnnnnnnnnnnnnnnnnnnnnnnnnnnnnnnnnnnnnnnnnnnnnnnnnnnnnnnnnnnnnnnnnnnnnnnnnnnnnnnnnnnnnnnnnnnnnnnnnnnnnnnnnnnnnnnnnnnnnnnnnnnnnnnnnnnnnnnnnnnnnnnnnnnnnnnnnnnnnnnnnnnnnnnnnnnnnnnnnnnnnnnnnnnnnnnnnnnnnnnnnnnnnnnnnnnnnnnnnnnnnnnnnnnnnnnnnnnnnnnnnnnnnnnnnnnnnnnnnnnnnnnnnnnnnnnnnnnnnnnnnnnnnnnnnnnnnnnnnnnnnnnnnnnnnnnnnnnnnnnnnnnnnnnnnnnnnnnnnnnnnnnnnnnnnnnnnnnnnnnnnnnnnnnnnnnnnnnnnnnnnnnnnnnnnnnnnnnnnnnnnnnnnnnnnnnnnnnnnnnnnnnnnnnnnnnnnnnnnnnnnnnnnnnnnnnnnnnnnnnnnnnnnnnnnnnnnnnnnnnnnnnnnnnnnnnnnnnnnnnnnnnnnnnnnnnnnnnnnnnnnnnnnnnnnnnnnnnnnnnnnnnnnnnnnnnnnnnnnnnnnnnnnnnnnnnnnnnnnnnnnnnnnnnnnnnnnnnnnnnnnnnnnnnnnnnnnnnnnnnnnnnnnnnnnnnnnnnnnnnnnnnnnnnnnnnnnnnnnnnnnnnnnnnnnnnnnnnnnnnnnnnnnnnnnnnnnnnnnnnnnnnnnnnnnnnnnnnnnnnnnnnnnnnnnnnnnnnnnnnnnnnnnnnnnnnnnnnnnnnnnnnnnnnnnnnnnnnnnnnnnnnnnnnnnnnnnnnnnnnnnnnnnnnnnnnnnnnnnnnnnnnnnnnnnnnnnnnnnnnnnnnnnnnnnnnnnnnnnnnnnnnnnnnnnnnnnnnnnnnnnnnnnnnnnnnnnnnnnnnnnnnnnnnnnnnnnnnnnnnnnnnnnnnnnnnnnnnnnnnnnnnnnnnnnnnnnnnnnnnnnnnnnnnnnnnnnnnnnnnnnnnnnnnnnnnnnnnnnnnnnnnnnnnnnnnnnnnnnnnnnnnnnnnnnnnnnnnnnnnnnnnnnnnnnnnnnnnnnnnnnnnnnnnnnnnnnnnnnnnnnnnnnnnnnnnnnnnnnnnnnnnnnnnnnnnnnnnnnnnnnnnnnnnnnnnnnnnnnnnnnnnnnnnnnnnnnnnnnnnnnnnnnnnnnnnnnnnnnnnnnnnnnnnnnnnnnnnnnnnnnnnnnnnnnnnnnnnnnnnnnnnnnnnnnnnnnnnnnnnnnnnnnnnnnnnnnnnnnnnnnnnnnnnnnnnnnnnnnnnnnnnnnnnnnnnnnnnnnnnnnnnnnnnnnnnnnnnnnnnnnnnnnnnnnnnnnnnnnnnnnnnnnnnnnnnnnnnnnnnagcgtttcgccatcttggcgaggctggtcttgaactcctgatcttgtgatccgcctcccaaagtgctgagattacaggcctggccaacaagtgtgtttttaaaggaaaaaagaggccaggtgtggtggctcatgcctgtaatcttagcactttgggaggcccaggcaggaggatagcttgaggccaggaatttaagatcagcatgggcaacttgcgactaccaccaccccaccgaaaataaataaataaataaataaatagaagaggcagttcctaaactgtttgccaatcacttacattaacacagcgtaaggtatttgattggctgtacgttgttctttgtgtcacagattccacgaacatgaagataatgggtgaggcagctagtcagggaccaaatgcctttaaaccattgcccccaggcatgggtcggggatttgtgactgaagtcccatactcatgtctcgctgggcctgataattttgcatacctcacatagttcagactgctttaagctatttttcttttctcatcctgatgcatagaatgatattagaatagagattgcagaatacaagcaactatacctcagaagagaatatagtttccaaatacgttcagtcaatggactttcctttttttgttttgagatggagtctcgctctgtgcccaggctgaagtggagtggtgcgatctcggatcactgcaacctctgcctcccaggttcaaggcattctcctgtctcagcttccagagtagctgggattacaggtgcccaccaccacgcctggttaatttttgtattttagtagagacggggtttcgccacgttggtcaggttggtctcaaacccctgacctcagttgatccgcccgcctcggcctcccaaagtgttgggattacaggcgtgagccactgtgcccggcccagtcaatggactttcaggtgcagaatgaggatgtggtttggggtgaaggtgaagtgggataagaaaaaggctacatgttacacgatgtgatgcaggatgaaccaactctagcataatccagaatgggaatgacattgtgatcaacagtccaaccccctctcttgtacattttctaaagcaagcgaaataaaaattgtggcagggcacggtggctcacgcctatagtcctagcactttgggaggccgaggtgggtggattgcctgagctcaggagtttgagatcagcctgagcaacacggtgaaaccctgtctctattaaaatacaaaaaattagctgggcatggtctcagctactcgggaggctgaggcaggagaatggcttgaacccgaaggtggaggttgcagtgagccaagattgcaccactgtactccagcctgggtgacagagcgagactctgtttcaaagaaaaaaaaaaggtaaaaaaaagggtaatcttccttttcttattaactttatttatttatttgtttatttatgtttttgagacagagtctcactcttgtcgctcagcctagagtgcagtggcacaatctgggctcactgcaacttctggctcctgggttcaagcgattctcctgcctcagcctcctgagtagctgggattacaggcgtgcgccaccacacccagctattttttttgtatttttagtagagatggggtctcaccatgttggccaaggatggtctcgatctcctgacctcgtgtcccacctgcctcggcctcccaaagtgctgggattacaggcgtgagccaccacgcccggcctcatttttttatttttagtaaagacaagatttcaccatgttggccaagctggtctccaactcctgacctgaggtgatccgcctccctcggcctcacaaagtgctgggattacaggtgtgagccactgtgctgggccgaatggattggattttaaagcatacttcaggcagatggaataagggaatagtctgagtaacggggatgagaaaagaaagaattggccaggtgcggtggctcacacccatgatctcagcactttgggaggctgaggagggcagatcccctcaggtcaggagttgaagaccagcttggccaacatggtgaaatctcatctttactaaaaatacaaaaattagtcaggtgtggtggcgggcacttgtaatcccagctactcggggggcagaagttgcagtgagccaagattgtgccactgcactccagcctgggtgacagactctgtctcaaaataaaataaaataaataaataaataaaaaagaaataattgtatttgatgacttggtgagtcagctagcataagacatgtgtaccagggagtagtataaaactacaaggttgtttagcttggagttagagcaacttgtcaattttattcccgaggcaatgggaggtgtttaaagtttttttgcgatgctgtctgaactatactttaggaagcctatggtggcaggatgaattgaaggcacaggaaaaggtttcaatattcaatagtccagggaaaagaaacggaggacctgcaactaggtgttggcactaagggatggagctttgcctagattttccctttgtagattcttctcttcctggatggaaaatgataaaaggaaattcttctgatagtaaattataatgttgactccaaaatcaattctagataaaggcgattaaattgcaaacccaggatgcctgtctgaatggtccctgcattcaaagatattttcccctttacaggagcaccggataaatttaactccctaatctgtcaagggctttgtggaagagcctggagggggatcgaaggcggaactgatactgacacacctgggtctgcaaactcccaaaactgaggctcagaattagtaaattagggcagggcacttccctctttggaagggaagttcctattttcaaagttcttccaacggaacttttacattagagaagtgtaattgactgagaagtggaagtgaccaggaacagcatttctgttccctgggcgggagagagaaccccctcgggcggagccagcagcaggtcagcttctgagggggccctcatgctggcggcgccgacctgtggtgcaatgctctgagtaggagaatcttaaatacatgtttgagattcaattcccagaaacgtaactagtcttcacaagccaaaaaaataaaaataaaaaataaaaaaaggaagtgatttcttttcaagaggtcaaagggcctggaagaagaggtcctggcttgagtgtctcaaggctttctggggcctaatccggctggaatgggccgcagcattcatattcctgtccttggtcgtgtcttaatgaagaattgaaaataataaggggtggagaaataactttcctttttctcccaccatcctcccacagtgtaaataaacaaataactctaagctcgatttcctcatttgtcaggggtggggaaagacttgacatcaggactcttccattccatcgccacctgtcttaatttaaacattcccatgacccaccccagaagcgccaacctcccgcccacaaggagcatggaagtcttggtttctggctactgcgcagactccaccttggacctactccccaaccccccgccgctcctttccccgtttctccagcagagggcgcaggcccaaaggttccgccgaccccgccccagcctggccccgccccgccccggcgtaggggcggggaagacgggcacagaaacctggccgcggctttccgggagctgtgggcacgcgagctgctcgaagccggtggcccggggatcgtcgctgcccagtccggccgcggccggccgcttccccgagcttaccagtaagccggtccgcctccgggacgcgccccgcccgccccgggctcgcgcgctctgaaggggcgcgtcccgcgcactcccggcgccgcccactcccctccccacggccgctcctccctccgcccggatagccggcggcggcggcggcggcggcggcggcggcggcggcggcggccgggagaggcccctccttcacgccttgtttctctccctcgctcgcagtcgagccgagccggcggacccgcctgggctccgaccctgcccaggccatggccggcaacgtgaagaagagctctggggccgggggcggcagcggctccgggggctcgggttcgggtggcctgattgggctcatgaaggacgcttccagccgcaccaccaccaccaccaccacctcagcccccacccgccggggacggtggacaagaagatggtggagaagtgctggaagctcatggacaaggtgaaaggccggctgagcgcccgctgttgcagggtgggcgtgggcggagggccgcggggaggggaacgagcggacggaggaagcgggggaggggacgggtctggtgaagccggggaggcgcggagccggggtgaccggccgggggcgtgggggcagggacgaggccgggagggtggggggcggcgtgggggaggggctgccgttgggagtcggggaacgctggggtgccgcgtttggggtagccagacaaagatggagtgggggctggggcgaaggttaactgggaagtcagtggggcggaagtacaatgaggggtgcggagtttggggctctgtgcagggtgtagggatgtaggtcacggaattggcctgggaggttagcagggagggggtgaggaagagtgatgtaccggctggggctcttggctgggtgagatctgactagggaattaggttcatgggctctgactgaggaacctggctggggtcaggacagctctcagggaagctgtgctctgggtgagagtatagtcctttctcattaagatgtaacacgaagataaaagacatattgatgtttaagtgaggcaaggaaagaactttcctccccatctagcgccggctcaagttttttgttaccctcagaaacactggatgtgatccattgctggtgctgagatatgcactgattaaaccacaagttctggttagaactattatcttctgaaagatggactggctgagcctgttaagcagcagcagattctgacttcttaataacttcctccctactacatcgcttgagctgggttctttttttctggtaacggttctgactccttattacaggtcctgactttaaacttgttcgttgagcttctttgattacgcttttttgtttgtttgctttttgcaagtgcgaacaaaaataactcctttatatttagccactaagtttgtcatttgggagaattttacttccttatagttgtgtctatatgatgaaatgtagtcagtctcaagtatttaactgtttaagcagtcggacgctttgtcagaattcaatacgttttcttggtatttttcatattctttaattaattactttgacaaaattcatattgcgtatgaaaagtgattagaagtatctggcacgttttaagagaatggtgttatttcctccagggtaaaatttggttttctttggttcctccctgggcctcggttcctcttctgtaaagttcttcatgggttgctttggactagaaaccgctaataaratgattatgaagcacttagccaatgtaatgtgcaatttaaatgcttaataagtcctgtgtgtgaattaacactccagtagtgcatgccagtggtttcatagccacctttttagggctggcttttctcatgttaaataattggtattgtaattaatgacacaagtattcgtgtgttgattatattggtggtgtagtactaattttattgttagaaattataataaaatccttacagaaagtttaggtgtgtaaaggaaactttaaatgtgtcgactcctttaaaaaaaacacatcgaagatattcaaatgctaaagtttgttagtttgctttttagggatttatcgttaaggactacaaattttactctggcatagaaaaaatacttttctaatgagtgtctcgtatcagacatgtgggtgcmgtacaatcaaaattgtgttgattagtggcctctgcttaagaataatctgtttactaaagagtttctgtattctgtattctttttttttttttgagacggagtttttcgctcttgttacccaggctggagtgcatggtgcgatctcgactcactgcaacctccgcctcctgggttcaagacattctcgtgcctcagcctcccgagtagctgggattacaggtgcgcgccaccacgcccagctaattttttgtatttttagtagagacggggtttcatcatgttgaccaggctcgtctcgaactcctgacctcaggtgatccatgcgccacggcctcccaaagtgctgggattacaggtgtgagccactgggcctggccctgtattcttaaagaataagagtattctgtattcttattaaagtgtttctataaatacagagtaagttgtagatagtcctattctacaaggtagcccaaataaaatcctcccttaagtcttactccttcatctatttaaagtatgtgtattgaattttgatttattctgcagaatgtttaattatttgggaagaataaagaggactcaaagtttagactcaaattgcttttcaggtttgatagtttcacggaaagtaggcttctagcttttcccttccagtgtagggagagggatgttttatttttgtattacttgcctcggaagttgattttaatactgtctgttcccctcttatcacgtatttctagttgctctgaaaacgtagtactttctaatgtgttagtctgatacgtttatactgctttccagattttctgaatacctctgtgatgttactagattgcaccatctcttttacccttgatgttttgagcataaggtgtcctcttttttcactttatttttattgttgaaagtcttaaatgtgtcaccacaccttgacttcatgtgctataagtggtgaagaacctactgtcaaatccacagatgtcccacacatttaattctttttaacaraatttctgggccgggccccgtggctcacgcttgtaatcccagcactttgggaggccgaggtgggcggctcacttgaggtcaggagctccagaccagctctgccaacatggtgaaatgctgcctctactaaaaaatacaaaaattagctgggtgtggtggcagacgcctgtaatcccagctacttgggagactgggacaggagaatcccttgaacctggggcagaggttgcagtgagccaagatcgcaccactgcactctagcctgagcgacagagtgagactccgtctcaaaaaaaaaaaaaagtctgtttaattcttttaaatgacacacatttagttctaagtcaccatctcatacctgctttatctttgttgttgaagctggatgaatattattccagccaactcttaatcagtttattgaattagcactgggagctgttagtctctttccttcccccaatattggatatatacagatggaaaaagttggcataagtcatgggttctggttaacataggcccgatttactaatccattatggaacttaaacttaactgttggaaaaatgtttgtgctagaatgcttgttattaaacaaaagttagacagagccactggttttctttttgccaccccaggatattgtaataaacatgtgcataaatacttgtatgtgaagtggcttgtaagccaaaagacaattaggcagggaggagaggagtgggaagtggagagaaaagagaaaaagtcacctaaattggccttaaatgtatgctgggctcacacctgtaatcccaacactttgggaggatgaggtaggcagatcatttgatcccagcttcagcccaggaattccagaccagcctgggcaacatgacgaaaccctgtctctacaaaaaatacacatattagccaggcgtggtggtgccttcctctaagctcgagctgcttgggaggatcacttgagcttgggagatagaggctgcaatgagctgttgagtcagccactgcactccagcctgggcaacagagtgacaccctgtttcaaaaacaaataaattgctttaaatgtaaatttaaaagtatcaaagtgtttaatttagtaagagactttatttatttatttatttgctctgtcacccaggctggaatgcagtggcatgatctcggctcattgtttcctctacctcccaggttcaaatgattttcgtgcctcagccaccaagtagctgggattataggcatgcgccaccacacctggctaatttttcaatttttttttttttttttttttttttactagagacggattttcaccatgttggccaggctgctctcgaactcctggcctcaattgatctgcccacctcagcctcccaaagtgctgaggtgggataacaggcatgagccaccgcgcctggctcaatttagtaagagactttaaattccattatgaaatagaacagaggttggcaaactttttctgtaaagggaggtttcagggccactgtaaatacagtaatcctccattattctaggggatatgttcaagacacccagtggatgcctgaaaacccccaatagtactgaaccgtgtacatatactatgtttttcctatacatacctacctatgataaagcttaatttataaattaggcacagtgagagattaacaacaacaataatgaaagagtacaattacaaaatacactgtagtaaaagttatataaatgtagtcttccaaaatatcttattgtaggctgggcgcggtggctcatgcctgtaatcccagcactttgggaggccgaggcaagcggatcatctgaggtcaggagttcgagaccagcctggccaaaaaggtgaaaccctgtctctactaaaaatacaaaaattagccgggcatggtggtgggtgcctgtaatcccagctacttgagaggctgaggcaggagaattgcttgaacccgggaggcggaggctgcagtgagctgagattgcacccttgcactcccgcctgagcgacaagagccaaactccctttccaaaaaaaaaaaaaaagcttcactatatatttatacctgttaaacttcttcaagtttctgagatggagtttttaaaatttgaagctttaagagactttagaaataaattgatctaactctttcatttacagagacccggaagggcaaataacttgcttgaggttgtatagccagttaatgtcagtcaccagactagagcccaggtctctggacttgtgctctagtatcctcctctcttcttgacaggaggttaatattcatccttttaaattataatgacattttacatgtatagctccacatattgaatacttgtttttgtagcataaaactattcatttttaacatnnnnnnnnnnnnnnnnnnnnaaaccctgtctctactaaaaatacaaaaattagccgggcatggtggtgggtgcctgtaatcccagctacttgagaggctgaggcaggagaattgcttgaacccgggaggcggaggttgcagtgagctgagactgctccattgcactccagcctgggcaacaagagtgaaactctgtttcaaaaacaacaacaaaaaatcttattgtatggtactgcaggtaatggaaacctcagatacggggagatactgtattttagactttgctgggcacacactaagtctcatgttctttgttgttattgttacaactctttttattttttattttttgaggtagaggctccctctgttgcccaggctggagtgcaatggcatctcagctcactgcaacctctgcctcctgggttcaagcaattctcttgccttagcctcccaagtagctgggattacaggtgcccaccagcacacccagctaatttttgtatttttagtagagatgaggttttgccatgttggctaggctggtctcgaactcctgacctcaagtgatctgcctgcctcagcttccaaaagtactggaactaaaagcatgagccactgtgcccggttgttgttgttacgactctttaaaaatgtgaaagccacaaaaaaaggatgcaggtgattaatttgcccactcctgaagtagagcatctattttaggtttgaattttatttttattttattttttttattatttttgagatggagttccactattgttgcccagactggagtgcaatggcatgatctcggctcactgcagcccctgcctcccaggttcaagtgattctcctgcctcagcttccccagtagctgggattacgggcatgtgccaccatgcctggctaattttgtatttttagtagagatggggtttctccatgttgggcaggctggtctcgaactcctgacctcaggtgatctgcctgcctcggtcttccaaagtgagccaccacgcccagcctttatttttaattagcttatataattgaaacattaaggtattggtgatttttaaatggagtatagtttattagaaaaatacatttaaaatcatgagcttaaaaaaaattacatttttttgaattaaaaaaatattttattggccgggtgtgtggtggctcatgcttataatcccagcactttgggaggctgaggtgggtggatcacctgaggtcaggagttcaagaccagcctgaccaacatggagaaaccctgtctctactaaaaatacaaaaattagctgggtgtggtggtgcatccctataatcccagctactcgggaggctgaggcaggagaatcccttgaacccgggaagcggaggctgcggtgagccgagatcgcaccattgcatgccagcctgggcaagmagagcaaaactctgtctcaaaataaataaatgaatgaatgaataaataaataaataaataaattttatttttattcattattattaactagtagtatttttaaaaatagagacagggtcaggctgggcacagtggctcacgcctgtaatcccagcactttgggaggctgaggctgggggatcacctgaggtcagcagtttgagaccagcctggccaacatggtgaaaccccgtctctaccaaaataccaaaattagctgagcatgatggcgggtgcctgtcctggctacaggaggcagaggttgcagtgagccaagatcatgctactgacctccagcctgggtgacagagcaaaactccgtctcaaaaaaaaaggaaaaaaaaaaaatagagacagaatcttgacagtgttgcccaggctggtctcaaactcttgagctcaaataattctcccacctcagccttccaagtgttgggattacaggctgagccactgcgccccagccaagaaagtatttttaaaagatgattatttccttccttctaacttttcctgccttaccctatccaccttgccttccctgtgcctcctaaaagcaccttaggaaacttcctgtattttggaagtgagatacacttagaatttgcaaattagtatatagcatttaattggactactacttcactccctcccttccttcttaccttcctgtgtttgtgtacacaagcatagtggtaggtattgtcacactctaggagattacattataaatgatatataagtgatgtgactataggagaaatatgtctgaagtgatgaggatctcttaagtttaaacatctttcttctgtgtgtgaaatgtgtcaatattttttctgtatttatcttaacctctcaggattgtaaagtccttgagggtagcacctgtaacctgcttgtctcctgcaatatccagttatggagccttctgtaatagtagatactttgtaagttttttggttttgttttttttaaaaagggatttatttatttattttttagtacacttggaagagggccaagcgggtgacttgagaccaagtgcctatttttatttttatttattttttacttaagagacagagtcttgctctgatacccaggctggagtgcagtgtcacaatcatagctcactgcatccttaagcgtctgggctcaagccttcctcccgctttggccttccaaagtgctgggattatagtcacaagccactgcacccaactagtagttggctttgtgtgcccccaaggaataactgcatggaaaaggtatggaggggggcattcatcttttcttttcttttctttttttttgagacggagtctcgctcttttgccccaggctggagtgcagttgcgtagtcttggctcactgcaacctccacctcctggattcaggcaattttgttgcctcagcctcctgagtagctgggactacaggtgtgtgctaccacagccggctaatttttgtatttttagtagagacagggtttcactatgttggccaggttggtctcaaactcctgaccttgtgatctgctctccttggcctcccaragtgctgggattacaggcatgagccaccccgcccggactttttttttttttttaaagtcagagtctcgctctgtcacccaggctggcgtacagtctcggctcaatgcaatgagtggcgtgatctcacctctgcctcctgggttcaagcaattctagtgcctcagcctcccaagtagttgggattacaggcgtgtgccaccacaccagttaatttttgtacttttggtagagatggggttttaccatgttgaccgggctggtctcaaacttctggcctcaagtgactcgcccactgcgacctcccaaagtactgggattacaggtgtgagccaccgtgcctgggcagtagacattctcttgaatgatactaagatagtgtttaactagtattattcaatcaaatatctgttgtctacttaaaggttggtgtttcttcaaattatgtgtgctagttactttgtgtggtgatcatagaggcttttgtatacttttccagttatacttaatttatgttgtccacttcattttttatttttttctgatcagatagtttagattgtagttcaccttttagcttcagtttattaacatytytytytctcgcccattagagctccttaggaccaaggctttgtcttaacacagtccctcattttctgtctaattaattgaggggatctggtagggaawtttttttttttttttttttttttagtgagtgctcattaaggtaacatttactaaaagaggttttaccttataaaggtagtattataattattgtaaaacatgatttgtgttttatgcctatgaaaagctcacccaaaggatgtaagattcttcataattccttaatgtaaaacatgagccggttgagtatttcatgtaatcagcagtaggattttgaaaggcatgtagaataaaagtagagttagaccagggaagaagattgtatgctctctccgttttgtgagtttggttgaagtttttgctgactcttgatataggaaaaacctatttttagtatgttttcagccagcagtatacatataatgaacctgataaatcatggtcaaattggtcctggagtcttcgtcttcagcagagttcaatgttatattcaaacatacaataatatttatactgtgataagtaatttccctaatgattaacctagagtgctaagagcaaaatggactaaatattcgtttgaaaacagcctaawttttttttttttttttgaggttgcgtcttgctgtgttgcccaggctgaccaacatggtgagcttcatctctactaaaaatacaaaaattagctgggcttggtggtgcatgcctgtaatcccagctcctcgggaggctgaggcaggagaatcgtttaaacccgcccgggagggtggaggttgcagtgagcggagatcacgccattgcactacattctgggcaacaagagtgaaactgtctcaaaaaaaaaaagccgagggttgtggcatgcgcctgtaatcccagctactcgggaggctgaggcacaagaattgcttgaacttgggagatagaggctacagtgagctgagtttgtgtcactgcactccagcctgagcgacagagctagactctgtctcaaaaaagaaaaaaaaaagattkgttagaagaggggcatttaacaagtcactatgaaatattttcatgattagcaaattttgtgctggaagaawataggtaggagtaggcacctggaagccagcgtcagctttgtccccacagtgctccttcctgcagcagcttccgcaaggagggagagggggtgctaatgatggcactggtggtgcacatccactggggatcccagcactggggagatgtgatgccactatcatagatggacctgtggttctctcacgagaaataagcagcccctctgggtcccctctctgctgtctttggaatggctagtgagtcgtgtgtaacagcctccactgcctgggcaccttctcacaaccaccactgtttgctgccttccctgtggcttggatctgccatggaggaaggactaaaatgaggccaattcattggtgcttcattgagtggagatgggatcctaactcctgccctcctcctctcttggacttattgtaatttatttatttatttatttatttatttatttatttatttattttttgagatggagtcttgctctgtcaccaggctggagtgcagtggtgcaatctcggcttactgcaacctccgcctcccgggttcaagccattctcctgcctcagccacccgagtagctgggattacaggtgtgcgccaccacgcccggctaatttttgtatttttagtagaggcggggttcaccatgttggccaggctggtctcgaactcctgaccttgtgaccttgtgatccacccaccttggcctcccaaagcgtagggattacaggtgtgagccactgcacccggccatgcctggctaatttttgtatatttagtagagatggggtttcaccatgttgggcaggctggtcttgaactcctgacctcaggtgatccgcccacctcagcctcccaaagtgttggtattacaggtgtgagccactgcacctggcccatttttgccttttaaaagtagaactggctgggtgcagtggctcattcctgtaatcccagcactttgagagatnnnnnnnnnnnnnnnnnnnnatttatttatttatttatttatttatttatttatttatttatttattttttgagatggagtcttgctctgtcaccaggctggagtgcagtggtgcaatctcggcttactgcaacctccgcctcccgggttcaagcgattgtcctgcctcagtctcccttgtagctgggactacaggtgcccaccaccatgcccagctaatttttgtatttttagtagagatggggtttcaccatgttggccaggatggtctcgatctcttgaccttgtgatccgcctgcctcggcctcccaaagtgctgggattacaggcttgagccactgcgaccagcctcttggacttattttaaacagcagcacataactgtagcaatctttgagaaaaccaaaaacaatttatgaatcataaaagatacagaacgaaatgtagaagtctccttttacccccatacccccaaataactaccctcccaagaggtatctactgtgtgtagtttggggtccattccctcccatctccctacctgtcttatcctcggttactccgagaaggttggagaaatagcattgattgccctggaattatttatatacttaagcaagtygttgacttttcagcatgtcatcatgttaagactgacaagtaagaactaataatttgttatattgtagagcagtttacaattttacatctgcagataagttcaatctcaaaataatgtgtcttattacagttaaactgagattcagatagattaaacaagctacttaagtcacctagctcgtatctttttttctgagacacagtttcactcttgttgcccaggctggagtgcagtggtgcagtattggctcactgcagcctccacctcctaggttcaagcaattctcctgctcagcctcccgagtagctggggttacaggcatgtaccacaggcccggctaattttgtatttttagtagacggggtttctccatgttgatcaggttggtctcgaactgctgacctcaggtgatctgcctgccttggcctcccaaagtgctgggattacaggcgtgagctaccacgtgcagcccatatttttgttttttatgtggatcttgaactgatgttcagactgtgtcaagtratttcttataaaccagtacttctcagattttatcatgaattcagatcaattcaggggatcttgttaaaatactgactttgaataggtctggagtggggcctgagagattttgcattcctaatcagctctcaggagatgtcattgcagcagacccaggtaccagacttgatataggaaggctgtatgccacagttgcttttattttggataagcttggcggattttttttttaaataaatggaagttgggcatcttatttaagattttaattatgatgttcttcaactatgaaggtaatacttactttaaaatacaaatttttggctgggtgtggtggctcacacctgtaatcccagcactttgagaggccgaggcaggaagattgcttgaagccaagagttcaagaccagcctagtcgatgtagttagaaccccatctctacaaaataaaaaataaaaaaattagttggccgtggtggtgagttcctttagtcccagatactcaggaggctgaggtgggaagatcacccaggagtttgaggctgcagtgagctatgatcctgctactgtgcatcagcttgggcaacagagtgagaccctgtctctaaataaaggaaaggaaaaaggaaaagaaacagctgattcttagttacctcaagtgaaaattatgttgacacttttccacagtcccacttaacataaatgtartagttgctggggagttaaagatgacccggcactcacacttacaatttgtgtgatacaactgaaggtatgtagagggctctgggaaccctctatgctatagagtcactggggctcatgaggcaaaccattaatctctgaggagacaaaaaggggatggggaggaactttagaycagtcaggctcttctgtaataccctcatccacaattgtgtcttaattagtgtatggcatctaaaagtgatactaaaacatttacagtagtcccttcatatccatagtttcgcttcctgctgtttcagttacctgtggtctgaaaatattaaatggaaaattccagaaataatccataagttttaaattgtatgctgttctgagtaacgaggtgaaatcttgcaatcttacgctgcttctgtcctgggcatgaatcatccctttatgcagtgtagatacatactgtggatatagtagtgtatctacaccgtctacactacccaccggttagtcacstagtagtcatcttgattcttagatcaactgttggcagtcttgcagtgcctgtatttgagtcacccttattttgcttaatgaccctcaaagcataagagtaatgatgtcggcattttaaatatccaaagaaaagccagaaaatgccttctttaagtgaacaggtgaaagctgttaagaaaagaaaaaactcatattccgaggttactaagatgtacagtaagaatgaatcttctactcatgaaattctgaagaaaggtctgggctcaatggctcatgcctgtaatcccagcactttgggaggctaaggtgggtgtatcacttgtgtccaggagttcgagaccaccctgggcaygtggtgaaacccttctttattttaaaaaaaaattttgaagaagcaaaaagaaatttatactagggccgggcgtggtggcttacacctgwaatctcagcactgagggaggctgaggctggtggatcacttgaggtcagaagttggagaccagcctggccaacatggtgataccctgtctctactaaaaaatacaaaaattagccaggtatggaggcgggctcctgtaatcccatctacgtgggaggaggctaaggagaattgcttgaacccaggaggcagaggtggcagtgagccgagatagtgtcattgcactccagcctgggcacagagtgagactctgtttcaaaaaaaaaaaaaagaaagaaagaaagataatcatactaggcttgctgtcatacttcatggccctggtatatgataagtgcttcattaagatggagaaggtgttaaatttgtggatggaagacatgcacagaaacgttttctgattggtgcaattgggtttggtattatccttggtttgaggcaaccactgagggtcttggaatgcatccccctaaaataaagggggaccactgtaatctctagttcatactaagtatttggtttgaaattgcatcgataactctggacaaagaaccatttttgcctttttttttttttttattttgagacagagtcttactctgttgtccaggatggagtgcagtggtgcgatttcagctcactgcaacctctgcctcctgggttcaagtgattctcctgcctcagcctcccaagtagctgggattataggtgggcaccaccacgcccgactattttttttttttttttttgagacggagtcttgctctgtcacccaggctgtagtgcagtggcgtgatctcggctcactgcaacctccgcctcccgggttcaagccattctcctgcctcagccacccgagtagctgggattacaggtgtgcgccaccacgcccggctaatttttgtatttttagtagaggcggggtttcaccatgttggccaggctggtctcgaactcctgaccttgtgaccttgtgatccacccaccttggcctcccaaagcgtagggattacaggtgtgagccactgcacccggccatgcctggctaatttttgtatatttagtagagatggggtttcaccatgttgggcaggctggtcttgaactcctgacctcaggtgatccgcccacctcagcctcccaaagtgttggtattacaggtgtgagccactgcacctggcccatttttgccttttaaaagtagaactggctgggtgcagtggctcattcctgtaatcccagcactttgagagattatggtgggagaatcacttgaggtcaggaatttaagaccagcctggataacatagcaagaccctgtgtctaaaaaaatattagccaggtgtggcacatgcctgtagtcccagctactggggaggctgagggaggagcatcacttgagcctagcaggtcgaggctgaagtgagctgtgatgacgccactgcactccaatgtgggcgacagagtgagaccctgtttcaaaaaaataaaaataaaatccatatataaaaactgcatggttaagttttcagagcatacattgtattgaatgtattttttctgcagttgatgtggtaggtgaaagtaatgagattggtaatgaattataagtggcatggtgtttttaataagtgctgttgggtgatatttgagaagtatactgtagtaactacaattcaagaacctgaatggagttttgagaaatcaaaaattgagaataataattacaagtaaggcgtttttcaaattattgtctaatgatggggctattgtctagtgatgacacttttttttttcctgtgatcagttgactttaaaatatgttkgttaaaaaaaagtataggtggccggatgcagtggcttacgcctgtaatcccagcactttgggaggccggggtgggcgatcatttgaggccaggagttcgagaccagcttgttcaacatgtgaaaccccgtctctactaaaaatacaaaaattagccgggcgtggtagtgcgcgcctgtagtctctgctacttgggagactgaggcagagaattgcttgaacctgggaggtggaggctgcagtgagctgacatcacaccactgcattccagcctgggtgacagagcgagactccatctcagaaaaaaaaaaaaaagtataggtttccggctgggcaccgtggcacatcctgtaatgccagcactttgcgaggttgaggtgggcggattgcttgagcctaggagttcaagaccagtctaggcaacatagtgagaccccatctctatttttatttaaaaattaaaccaaaaacaaaaaaggatgggtttctgatttgtctttgaaaaacagtcatgagttttcgtttaaaaaagcttcactataagctgggcacagtggctcacgtctataatcccagcactttgggaggccaaggtggatggatcgcgaggtcaggaattcgagaccagcctgaccaatatggtgaaaccccctctctactaaaaatacaaaaaaattagccaggcgtggtggcgcatgcctgtaatttcggttacttgggaggctgaggcaggagaattgcttgaacccgggaggcggaggttgcagtgagccaagtcgcgccactgcactccagcctgggcaacagagagagactccgtctcaaaaaaaaaaaaaaaagcttcactatatatttatacctgttaaacttcttcaagtttctgagatggagtttttaaaatttgaagctttaagagactttagaaataaattgatctaactctttcatttacagagacccggaagggcaaataacttgcttgaggttgtatagccagttaatgtcagtcaccagactagagcccaggtctctggacttgtgctctagtatcctcctctcttcttgacaggaggttaatattcatccttttaaattataatgacattttacatgtatagctccacatattgaatacttgtttttgtagcataaaactattcatttttaacatgggaaaacattgaaaatgagaaatgcttgtatcaataagttggagtctttagagataaaaaatatttattttagtcttacatgtgtatggttttctgcctaattagaaacacagattccttagtgttagaaaagattctgtattcacaacagcattaggcttaggcattgttgttctctataactttttgctctttaaaagtttagcaattttcaagcatagttttattcctctttattgtgatcataacactttccaaattttttctattgaccattgagtcttggcagaagcaaagggaggagctaggccagtgagaaagctattatgaatggagtgcatggcagctgtacaaggatactgttggtttcccggagctaagcacgtttctttttaacattgttctgagtgatgctgtaaatgtacaggcagaagtaaacaaaaggcagccatttttgccactgcaggatttggaatgcaaaataaagttagccaaatggaggacagactaagcaggaaaatatttgtatcttttagaaattttttggtgaatttttgttttttggttcatgtttgttttttgaaggttaactatgactgccagtttaaaattcactaaataatataggcagattgtttgggtttttgatgtttgttaactattgacttgaattattcacacagggcctttaggaaccattttttaaaagaggttatacataataaggactttttttcctttccaaagaatattaatatcgagagtatcaagagcatggccaggcgtggtggctcttgcctgtatataatcccagcattttgggatgccaggaggcaggataacttgaggccaggagtttgagaccagcctgggtaacatagtgaggccctatcgctgcaaaaaatagtttaaaaaattatcccaggtgtggtggcgtgtacctgtagtccccggnnnnnnnnnnnnnnnnnnnnacatgagccaccatgcctggcctttttaaaatttttggtttttattttattttactttattttattttgttttgttttatattttattttgaattatgttatgttatgttatgttattatgttatgttattttattttaagacagagtctcgctctgtcacccacaccggagtgcagtggcctgatctctgctcactgcaaactccatctcccaggttcaagcaattctcctgtctcagcctcccaagtagctgggactacaggcgcccgccaccacgcccggctaaatttttttttattattatttatttattttattatttatttattttgagacagcgtctctctctctctgttgccaggctggagtgcagtggcgtgatctcagctcactgcaacctctgcctcccaggttcaagtgattctcctgtctcagcctcccgagtagctgggattacaggcacgtgccaccacactcagctaatttttgtattttttgtagagatggggtttcaccatgttggccaggctggtctcgatctcctgacctcatgatctgcccactgcagcctcccgaagtgctgggattacaggtgtgagccaatgcccctggcaatttttttttgagactctatctcttaaaagatgaagaaaaaagagtacctacctgtatattctttgaggtctgtgttagtgttccatagttgaagacttaagagttagtgcagtgctgatttccctggtcatgatgattcattttcaaaagatcttgagaaaaccagacatttagtatacaaatgaactttaagaggtgacatgctaaagaaggacaaataacacttgtggaggggacatggtactagtttaaaaatactaattcatgaaatgttttggaaacattttgtgttacattgtgagggctgatacattgtcatgaacatttattgattgcatatgatacaggttttagtttagttttttgttgttgttgaagggatgtgtggttgaccctagaacagctaggaggttaggggcacagaccaccccacgtcccatccacctcagtccctgtccccctcattacctccagccactgccccccattgaaagtcacacataacttttgactccctgccaaaagttaaccagtaatagcctactgttgaccagaagccttactgataacataaaacagcttattaacatgttattttgtacatacatgtattatatcatgtgttcttacaataaagtaagccagattaaagaaaacattattttttgtattttttgtttgtttgagatggagtcttgctctgtcgccaggctggagtgcagtggcgtgaccttggctcactgcaacctctgcctcccgggttcaagcgattctcctgcgtcagcctcctgagtagctgggattacagaagaaaacattgaaaaaatcataaggaggataaaatatttacgattcattaagtggaagtggatcttcatcctctttgtcttcatgttgagtaggaggaggaggggttggctgctgtctcgggtggcagagatggaataaatagaagaggtggagcgggaggcaagggggcaggcacacttggtataacttttattgaaaaagaacttcgtataagcagacccacgctttcaaacccatgttgttgaagggtcaactgtatacctttttttcagaggtattaggcaagtactccgttttatcctaaactctttggggkgtgtgtgtgtgtgtgtgtgtgtgcgcgcgcttgtaygtatgcatgtatttatttatttatttgagacagagtcttgctctgttgcccaggctatgagtgcagtggcgtgatctcggctcactgcaacctccacctcccgggttcatgcaattctcctgtctcagcctccccagtagctgggactacaggtgcatgccaccatgcctggctaatttttgtatttttagtagaaacggggtttcatcatgttggtcaggctggtctccaactcctgacgtcaggtgattctcccgccttggcctcccaaagtgctgggattacaggtgtgagttactgtgcctggccttatgttttgtttttgtttggagacagggtctcattctgtcctacaggctggagtgtggtgatgcagtcttggttcactgcagcctcagcctcctaggctcaattgatcttttcacctcagcatcccaagtagttgggactacaggcatgtgcaccacatccagttaatttttggtattttttgtagagatagggttttgccatgttgtccaggctagtcttgaactcctaggctcaagcgatctgcccacctcagcgtcagcttcagctcccaaggttctgggattacagatgtaagacaccgtatccagccaatataaatattttctttttttttttttttttttgagacagagtttcgttcttgttgcccatgctagagtgcaaaggggtgctacctcagctcgctgcaacctccgcctcccgggttcaaccgattcttctgcctcagcctcccgagtagctaggattaccggcatgtgccaccacgcttggctaattttttgtgtttttagtagagacggggtttcaccatgtcggccaggctggtctcaaactcctgacctcaggtaatccacctgccttggcctcccaaagtgctgggattacaggcatgagccaccgcatctggcctaaatattttcattgggagctgtacttggtacttggtttgaaccttktaagggctggattctgtagcttttgcagattgttggtcacccaattcttgtgttacctgctgctgccttttctctatttcttggttaccagagaccatgcaggactgggacagtagttgtgttatgggcccaaatgataggactaatgctaccaggttctgggaatcatcaaagggtgatatgaggtccactattctgtctttagtaggtaattcttgcctcccctgcatataagccactcagatggtgtggaaatgagaaggggagctaacatttattgaatgcgatttttttggaaactgtgcaatccttttatgcaaattttattatgaggcattatctttgattttgtggttaaaagaactaaggctcagaggttaagaaatttactcaacttaaatgactgaaacaggacatttttttttttgagatggggtctgtggcatgtctcagctcactgcaacctcctccttctgggttcaagcaattctcttgcctcagcctcctgagtagctgggactccaggtgtgtgccaccatgcctggctgattttcgcatttttcatagagacggaatttcaccatgttggccaggctggtcttgaactcctgacctcaagtgatctgcctacctcagcctcccaaagtgctgggattacaggcatgagccaccacgccccgcctgaagcaagacattttgatatggctatttgattcaatctggtcaaagtactaaaatgttatttagtcctttaaaaatttaattgaaaacttaaaaacttayagcttaggctttagcataatgtctctttggtgacttccttacctgttccacaaatctctctcattaccttctccaccttgttcactatgctttaatctcactgacctttctattcttcaaacaaatctcaaccacttaccactttaagaccattgaagtacaatggtttgatggtacggtggtttgatttgggatttttcgactttatgatggtgcaaaagtgatagctattcagtggaaactgcgctttgaatatccatataaccattctgccattctgttttcacttttagtacagtattcaataaattacatcagttattcagcactttataataaagtagtaggctttgtgttaagatgattttgcccaactctaggctactgtgttatgaacatgtttaaggtaggctagctaagctatgatgtttggtaggctaagtatattaaatatactattgacttatgataccttcaacttaggataggtttattggaatgtaactccattgtaaattgaggaacatctgtagttgttcgctctttttgggctactcttctgctgtagctggcttttttctctaatttcaactcttagcctcaatgtcgcatcagaaaagccttatctactagtcacccagcactttcttatcatattagcctattttaattctatagtgaaccttataattttcttttttttttttttatgacggagttttgctcttgttgcccaggctggagtgcaatggtgcgatcttggctcaacgcaacctctgcctcccgggttcaagcaattctcctgcctcagcctcccaagtagctgggattacaggcatgggccaccacgcctggctaattttgtatttttattccagacaggatttctccatgttggtcaggctggtgtcgaactcctgacctcaggtgatccacctgccttggcctcccaaagtgctgggattacaggcgtgagccaccgcgccccgcaaaccttataattttcttgttgaattcatttttattgttttattgcttgattcctctcacattcagataccttgtctttttacttctgtgtccctgtgcctgacacatatttgttgaatgaatatgttgagaaaaataaaaactggtacaacctttaacttacagcctccatatgtacmaattggtctctgtctgaacctatgctcactcttttttttttttcctattctaggaggcgtcctcttcttttaaaatatatgtattttaatgtattctcttttttttgagatagagtctcattccgttgcccaggctagaatatggtggtgtgatcttggctgactgcaacctccgcctcaagcggccctcccacctcagcctcctgagtgactgggaccacaggtgcccaccaccatgtctacttaatgtttttttatatgtttttgtagagatggggttttgcaatgttgtccaggctgaattttaattttttagaaatagacacaaagcattttgggaggtcgaggygggcggatcaccagagttcaggagtttgagaccagcctggccaacatggtgaaaccctgtctctactaaaaatacaaaaattagccgggcatggtggcgcatgccagtaatcccagctacttgggaggctgagccagaagaatcacttgaacctgggaagcggaggttgcagtgagctgagatcgcaccattgcactccagcctgagcgacaagagcaaaactccatctcaaaaaaaaaaaaaaggaaatagggacaaggtcttgccatgtggcccaggctggagtgcagtggctgttcacaggcatgatcatagtacactgcagcctcagactcttggactcactcaagcaatccttctgcttcaacctctggagtagctgagacttacacccacaccaccaccactcctagctaattccttctctctctctctctcttttttttttttggagacgtggtttcgctcttgtcccccaggctggagtgcagtggcgtggtcttggctcactgcaaactttgcttcccgggttcaagtgattctcctgcctcagcctcccaagtagccgggattacaggtgcctgccaccatgcctggctaattttttttgtattttttagtagagacagggtttcaccatgttggccagttgtcacttatctccttttctcttctggatctttcttaatataaagcatgtttagttttcagtttttgctagatcttaatctctagttacagtgtcggtcttccccacttccttccacagactaacataggaaactacaattttaatatttttgttgtgaaatgtagtctstttataaatacctgacttacttttggaatgtagcacttgtaaactgggaactgtctgtatttgttttattaatatgagttattaactctgttgtacttagaatatagttatcttccgaggtggagtcttttttccctggccatgttcttcccttttgacttgaacacttgataagaatgaagagctttctaaaatgctgtgaaaatattcatgaaccaaatgtttttgttgattcagcttgtctttgtttgctaggcttatatatggggctagctggatgtggtggcatgagcctttaatcccggctattcaggcagtttaggcaggagggttgcttgaatccaggagttcgaggttgtggtgagctatgattgagctccagcctgagagacagagggagtctttttctcaaaaacaacaacaacaacaacaaaaaacaaaaacttaagaaaacaagagttcaagaaatgttgtattgagaatgatgtatttagttttacaattttcatattatcatttgaagagttgtgttttgttttttttttttcttgagaccagaatcttgctgtggcccaggctggagggcagtggcatggtcttggctcactgcaacttccacctcctgggttcaagtgattctcctgcctcagcctcccgagtagctggaattacaggcatgtgccaccatgtccggctaatttttgaagaattcttgatcattagtcattaaacaggaatttatcctaaggaaataatctgatgtatagaagaatgaaatatccaagcacgttcatcactgtgatgttgcagtagtaaagacttgaaaacaaaagaaatgttaaagttggggggagatggttaagatatgttattgtctatccatagactagaattatttaaatatctcaaaaaagtttataatgagctttcggtgacacaagaaaataggtttttgttttttgtttttttttttgagacggagtcttgctctgtcacccaggctggagtgcagtggcgcgatctcggctcactgcaagctccgcctcctgggttcacaccattctcctgcctcagcctctccgagtagctgggactacaggcgcccgccaccacgcccggctaatttttagtatttttagtagagacggggtttcaccgtggtctggatctcctgacctcgtgatccgcccgcctcagcctcccaaagtgctgggattacaagcgtgagccaccgcgcccggcctgaaaataggtatttttaaatgtgaaataaaaacgagaatgtcaggcttatgcttccattaatgttagcttaggttgttttgaaccaaatatactgctaatagcaagaaaacttagaagacatagaattgttatcaagacagtgagaaattatgccaaatttgggaagttgaggagagctgtgagaaatttattttcatgtaatgtgtaagggatctagttttattttttctcatatggataacaaagttttcaatagtttttcttttgtattcttgatttgtaatgtcaccgctgatactgaatttccttgtgtgcatgtgtgagtctgtttctggactttctgttccactagtttgtccacagaaaagtccatgtaaatagaaagcacaaacaagttgttaggaataaatccaaatttatttgtatgacaaacacaaaatggactaaacttaccagttagaaaacaatgattgttacattggatttttaaattctatctatatgatctttaaaagaaacacttaaaacataactcagaaaagttgaaagtgaaagatggtacaaagaattgccaggcaaattctgagagtccaaatgtaggactctcagctctatgctttactgggtccaaggcctctctgttcctgttcctcaagcggttgttaaaactcaaaccccaggttgggtgcggtggctcatgcctgtaatcccagcactttggaaggctgaggctggcagatcacctaaggtcaggcattcgagaccagcctggccaacatggcgaaaccccatctctactaaaaatatgaaaattagctgggtgtgatggtggccgcctgtaatcccagctacttgggaggctgaatgagataggagaattgcttgaacctgggaggcagcagctgcagtgagctgagattgcaccattgcactctagcctgggcaaaaagagcaaaactccatctcaaaaacaaaaaacaaacaaagggcctgtaatcccagcaaagtgctgtaatcccagcactttgggaggctgaggccagtggatcatgaggtcaggagtttgagaccaggctgaccaacatggagaaaccctgtctctaccaaaaatacaaaattagccgggcatggtggtgcatgcctataatcccagctactcaggaggctgaggcaggagaatcgcttgaacccgggaggcggaggttgcggtgagccaagatcacaccattgcactctagcctgggcaagaagagtgaaactctgtctcaaaaaacaaacaaacaaacaaagctcaagaccctagagtacagagatttacctcccagggcagtcatgtcctttatttctgtccctgggaattttctttagtttattataggggtcaggctggacacagtggctcagggctgtaatcccagtgttttgggaggctgaggcaggtggcatcgtttgagctcaggagtttgggtctagcctgggcaacatgtctctaaaaaaaaaaaaaacaacaattagctgggtgtggttatgcatggccgtagtcccagctacccaggaggctgaagtgggaggatcacctgaatctgggggtttgaggctgcactgagtcgtggttgctccactccactccaaccgtgagaccctaaaaaataaataaataaataaaaatattgtggggatcagcagtatatttaaaagtaatttgccatatttcatctagcatgttttagggatttatgtggatgttttcccctagttgtttgttctgtgtgttatctgtaccattagtctctcaaacggatttaaaaacacattcttctgggggaccactaaaaattttaaaatggttgcctgtgggcaatggggttatggatctgcttcttatattctcatgtatttttcatattttgcaaaagagcacatatttcataactttcttaaacttaaaaaagggagctgtccttaaaattctccaagtaatagcccttctttttcatttgttgcaggtggtgcggttgtgtcagaacccaaagctggcgctaaagaatagcccaccttatatcttagacctgctaccagatacctaccagcatctccgtactatcttgtcaagatatgaggggaagatggagacacttggagaaaatgagtattttagggtgtttatggagaatttgatgaagaaaactaagcaaaccataagcctcttcaaggagggaaaagaaagaatgtatgaggagaattctcagcctaggtaatggagaaatactacacaaataattatgcaggtctgtgactgcctgaatgggtaacacatagaagtagttgagttggttttaattttatgttagtaggaatggaaagttgacatttgatttaaaggtatagtttatataaaaggttgccatggatgacgttgtactatccctaactctgattgatttgcttacctctgaaaaatcatttactgatagtaatgaaaatgagttggaggcagtaggtcctttggagaacctgaagatcatgaaagtttgtgggcaggtgggagtttggaagaaagaagactggggttaagtggagtttgggagtaaataagaggccgatcttgccaaaagctgtagcatattaggtaaatttatatgtgggataataggggaaaaagccactagtttaactttttaaaacatgaagcaaagtgaaatgacattttctttataggtaaaagtaacttttcaaataaaataggtagaggtgaatgcagttaattcaataaatatttgaaggatcactatgtattcttttatattaattttattattatttttttgagacagagtctggctctgtcgcccaggctggagtgcagtggtgcgatctcagcctccaggttcaagtgattctcctgtctcagcctcctgactagctgggattatagatgtgcaccaccatgcctgattaatttttgtgtttttagtagagatggggtttcaccatgttggccaggctggtctcgaactcctgacttcaggtgatctgcccgctttggcctcacaaggtgctgggattacagatgtgagccatcacgcctggccctcttttgtgttaattaaataccagaaactataggctatcctgcatattgttagcttagctgtcgtaaattacatactgggagagaaataagttaactgtatgtgtggatgtaattgtgttttattttgttcaatttgaactaaatattaactcatctagaatgagtaataaaataattccactagaattttttagtgagtaaattattcttgagtagtgacttgaattagaaggaacagtatttctgaagtcatctggttaccatgcatgactctagcagtaacatactaaatggtgtccttgttgtctacctttcctttgggcctgttggcctagattctggcaaccctagctttcaattaaaattttatgcacatgattatccatattaccgttattgcaacaaattactcaggtgtagtctgagtaatggactcaaaatgtccatcttttctttctttctttcttttgttttgttttgttttgtttgagacggagtcttgctgttgtcacccaggctggagtgcagtggtgtgatcttggctcaccgcaacctccgcctcttgggttcaagtgattcttctgtctcagcctccttagtagctgggattacaagcatgcaccgctgtgcccggctaatttttgtatttttagtagagatggtgttttgccatgttggcaagctggtgttgaactcctgacctcaggggatccgcctgcctcagcctcccaaagtgttgggattacagttgagagccacttcagctggcctgtccatcttttcttaaaaagattctgagtgaattcaatccgtaagagcctttgtaacttctcgtttatttggaagtgaactttattccttttaaatattcagattttgtaacttttgttaaaacctcgactgtatggaccttttagctaactagtcattttgtattgtattgctgagtttctaaaaaataattttaattcatgaggtaccaaaacttaaaaattttgtttaccatgtacgtgaactaggttctggttctaggaggtgaaaaggaaagttaagcattcaaatttgaggtaatatgacaaatgcattaatagagatatgtacaaaattctgttgggagccgggcacagtgacatgcacctgtaattctagctactcagaagactgaggtgggaggattatttcagcacaagaaattgagaccagcctgggcaacacagcgagaactcttcttaaaataaatgaaacatttaaaaagtgctgtgcgaatacagttttgtccagtggcattagagaaggtggcatagaggacttgtaatttgaattagagtttgaaggataaataggaattttctaggcagagaagtcaagaaaagtcttttaacacagtggcatgaaaatggaggctctggtatgtttaaaatgagaagtttggtttggttagaattgtgggagacagatacgctggaaagacgggttgaagtcagattgtaaagggctgttttttgacctctagactttctcttatagatgataggctgtcatagaacaggtttattttaaagagcatttcttttttctattttttttcttttttttgagatggagtctcactctgttgcccaggttggagtgcaaaggagtgatattggctcactgcaaactctgcctcccgcattcaaacaattctcttgcctcagcctcccgagtagctgggattacaggtgtgtgcatcatgctgggctgatttttttgtatttttagtagtgacagggtttcaccatattggcttggctggtctcaaactcctggcctcaagtgatccgcccgccttggcctctattttatatgtattctcacaataaagtgtgctagagaaaagaaaatgttactaaaatcataaggaagataaaacatttattattcagtaagtggaaatggatcctcataaaggtcttcatcctcattgtcttcaggttgaataggctgaggaggaggagtaggaagaggaggggttggctgctgtcttggtactgaaaattccagtactggtttttctgtggtagaggcagaataggtggagggggtggaaggggaggcaggagaggcaggcacacttggtgtgacttataatgaaaaaaaagtctgtgtataagtgaatccacacagttaaacccatgttgttaaggctcaactatatctaatttgccgttaccaaatgacttcagtacatgttgacaagttcttttgcctctttttaaacctcactgtcagtgtgcctgtctgtatcaattttattccccctaacatgaggcttttaatattttatggatttgatttgtacaaattatatgtaaaatgagagtaaacagatttcaagtgagaatcaaggagttcattttttcaatcaactttctcaggttgaaagggtttttgtaaatagggaaaaatatatagggtttttgcgaatgatctttgtggtctttttgattacttagaggtttttttttcctattcagtttttaaattgagatataattcacataccataaaatttgcccttttaaagtgtacaatttagtggtttttagtgtattcgcaaagtcaggcaaccatcacccctctgtaattccagaacattttcaccccccaacaggaaaccccactcccattagcagtcactctttgttcctctctctggatctcccctggcgcttggtaatcactaatacctgctttctgtctatgtggatttgcctgctctggacgtttcgtgttaagtggaatcacataacggtggccttttgtggtttttttttgtgtgtcttctttcgcttagaatgtttttacaattcacccatattgtagcatgtattggtacctcattcctttttatggctaagtcatatttcaatgtatggatataccatattttgtttatgatatttttgtcatttctactttttggctactactgaataatgttgctatgattatgtgccagtttttgtatggctatagccatataaacatatatacatatatgttttcacttcttttgagtatatatatatatatatatatatatacccataggagtggaattgctgagtcatatggtaattctgtgttcaacttttgagtaacctccaaactatttccacagtagctgtaccatttttctttcccctagcaatgtatgtgggttctgattttttgctaacaattgctattgactttttttattacagctattctactaggggtaaagtggtgtcttgaggttttgaaatgcatgtgaatactttttcatgtgcctcttggatgtttgtatatagttgtccccctttatcctcagtttaaccttccttggattcagttactggcagtcaaccatggtttgaaaatattaaatggaaaattctagaaataattcataaattttgaattgcatgcccttcagagtagtgtgatgtaatttcrcaacgttctactttatcccagctgggatgcaaagcatccctttgtacagcatctccatgctgtatacactagcacctattagtcacctagtagctatcttagttatcagagtgagaaaacataatatacacagggttcagtactatctgtggtttcaggcatctgcacatcttggaatgcaaagggggactatttatcttctttggagaaacatctattcaaatcctttgcccattttaaarttgcattatttgtcttttcattgttgagttgtaagattttccttcatattctggatgctagaccagatacatgatttgcaaaactttactcccattctgtgggtcatcttttcactttcttaacagtatgccttgaatcacaraagtttttaattatggtgaagaccaatatttatttggtttttgtacttttaagaaattattgcctaattcaaggtcatgaggcctgttttttcctattttatagttttacctcttgtatttaggtctttgatccatttttgagttaatttttgtatatggtatgaggtagaggtccaacttgattctcttgcatgtggatatccctttgtctcagcaccatctgttgaaaagtctgtcctttttaattgcatggacttgttgccattttaggaaggaagtaagttgaccataagtgtaagggtttatttctggactctcagtttcatttcattaatctacatatctatcttaatgctagtaccacaccatcttgattactgtagctttgtactaaagctttggaatcaagaagtgtgagttcctcagctttgtttttcaagattgttttggctgctattctggatccattgtatttcttttttttttgagatgaagtctcactctgtcacccaggctggagtgcagtggcgccatcttggctcactgcaacctcttcttgccaggttcaagcgagtctcctgcctcagcctcctgagtagctgggattacaggtgtgcaccaacaatcccagctaatttttgcattttcactagagacggggtttcaccatgttggtcaggctggtcttgaactcctgacctcaagtgatctgcccactgcagcctcccaaaatgctggcaggtgtgagccactgtgcccagcctcccttgaatttctgcatgaatttagaatcagcctgtcaatttgatcccaaatacaatttttttttttttaatagatagagtcttgctccgtcacccaggctggagtacagtggcatgaccttggctctgcctcccgggttcaagcgattctcctgcctcagcctcctgagtagctgggattacagacatgcaccacaacccctggctaagttttctatttttagtagggatggggctttaccatgttggccaggctggtctcgaactcctggcctcatgtgacccgcccgcctcggcctcccaaagtgccgggattgcaggagtgagccactgtgcccgacccctaaatacaatgttttcttatcaaaaagagcagcaggggctgggtgtggtggttcacacctgtaatgccagcactttgggaggccaaggtaggtggatcacctgagatcaggagtttgagaccagcctggccggtgtggtgaaatcccgtctctactaaaaatacaaaaaattagccaggtgtgctggcgagtacctctaatttcagctactctggaggctgaggcaggagaatctcttgaacccaggaggcggaggatgcagtgagccgagatcaagccactgcactccaggctgggcaacggagcgagagttcatctcaagtaaacaagagcagcaggaattttggtagatattgtattagatctgccgatcattttggggattactgccatcttaacaatactgttttccgctacatgaatactggatatatttccacttatatttttattcatttttgtctttgttgttttagacagagtctcactctgttgttgcccaggctggagtacagtgactcaatctcagctcactgcaaccttcacctcccaagctcaggtgatcctcccacctcagtctccctagtagctgggaccacaggtgcgcaccatcatgcctggctaatttttgtatttttttgtagacacgaggtttcgtcgtgttgcccatgccggtctcaaactcctgggctcaagcaatctgcccatctccacctcacaaagtgctgggattataggcatgagccaccttgcctggccttacttatatcttctttaatgtatttcagtaatgttttgtagttttcagtgttcaagttttttgccttcttagttaagtttattcctattttgttcattttgatgctattgtaaatggaattgttaattttaggttcatatatagaaacatagttgacttctgtatgttgatctggtactccacaactttgcagaacttacttattggctctagtagctttttagtaggttccttaggctttcctagataccagatcatgtcacatgcaattagaggtagttttacttcttycttttctttctgcatgcattttatctctttttcttgcctaattattcttggctatgttgaataggaatatcaggagtggccatctttgtctttttggtattgaggaggaaaatgttcagcctttcaccattgagtatattagctgtgagatttttgtaaaggcttttcatcaggttaaagaagtttccttacatgtcttgtttttcagtttttggttgttgttttttttttgcttttttgttttatcataaacagttgttagagaccttttatgtttcattcgtggtttttctttttttgataggtgagttgtggacagctgagtgctagttaaatatagtacatagaaagaatcttgaaaagaaaactagtttgaataagccaaagtagaaacttgttgactcataaaattctagaaaaaatgagtatcttaaattgcactaaagaggctgggcatggtggctcacgcctgtaatgccagcactttgggaggctgaggtgggcagatcacttgaggtcaggagttggagaccagcctggccaacatagtgaaaccccatatctactaaaaaattcaaaacaattagctggacatggtggcatatacctgtaatcccagctgcttgggaggctaaggcacgagaattgcttgaactcggttggtggaggtttgcrgtgagctgagatcatgcccctgcactccagcctgggtgacagggtgagactgttaccaattaaaaaaaaaaagaaaaaaaagaaagaaaaagaaaaattgcactaaaggcaagaatgcaggtaagcctcaggaacaactgaaaccaggattgaaatgttgccaggactctgtctgttctctttgattcttctggtattacttccatactcagtgcagattaatgcgtaaattgcagaaaagtttggtctctattacacccaagtttatatcttaagagttctgctgtagcagaagatatgactcttagttccagttttcactttggcttggtatagagcatttgattgtccctggaccaacctctggaaggagaggttaagtactgggattagtacagcagaggccagttgcagacctctagactaatcgactgtggcttgggagacatatgtgttccttcatagccatgtgcatgggggagtttgttcctagttttttgggtgttgaggagccagtctcttaaatcttctctataagagtgtacataattggctgggtgcagtggctcatgcctgtaatgccagcacttggggaggctgaggtgggtggatcacctgaggtcaggagttcaagaccagcctggctaacatcgtgaaaccccgtctctactaaaaatacaaaaattagccaggtgtggtagcgggcacctgtaatcccagctactcgggaggctgaggcaggagaatcacttgaacctgggaggtggaggttgcagagccgagattgtgccactgcactctagcctgggcgacagagttagattccatctcaaaaataaaaaataaaaaataaaaaagaatgtacataattctatctattattgtatagtattgttgcttcatgattttattttagttattattagctggtttaagttctccaaagataaatttgccctcatttttcttagactttataaaaaatgaattaagtaaaaccataagcctctgttttgcctttgatctttctgggttttgcacctgttttcatttgtgtacaggaagttacagtagaagccgaatgggattatacagtgcagttaattttaaaaacttgattgtattcattgtgcaagtaggattaagcttttctaatgtaattctgccttcttagaggtaggaaaaggaaaaaaaattagtattgagtattttgtctatggtaggcactgctcctgaatagtacatagtcccttcttttcatgaagcttataagcttatattatgtctttttccattagtttccaaagcataacctccatattatcatccggtggaacagtatttaacaagcgagacaaaagtgtttgtgcagctataatcttttcctagcaccatgaaaataggttttcaataagtgtgcaaaattcttctggtaggtaatggcagtttagatctttgtgttcaggaatttgggcttggtgggaagagattttcacttaggttaaaaatgtccttgcatttaggaaagggacagcaacatgggtcctgaaaaasattttcagtccaygagagagacaatgatggcttggaccaaagtgatgggtgtagagatggaaagaagtgggcagaatttgatgtattttaaagctaacataccaggacttgctaatgaattggatagatttctagtttgagcaactggatagatagtgcaatgggaagccactgaacttttgaacaggtgaaggatgtgatccacttgtattttacagtgacagtattggctgctgtctggaaaataggtaaggtcttgtggcaatgatggaaatagatggataggttactaaattagtattctaggccatgttagattgatgagactagggaggaggaatttaaaatgaagagaggtgggcaaataagaaatagattggggataggtatggtgyaattcctgtaatcccagtgatttgggagactaaggaggatcagtggaggccaagagtttaagaccagcctgaaactgggcacagtggctcacgattgtaatcccagcactttgggaggccaaggcgttggatcacctgaggtcaggagttcgagaccagcgtgaacatggtgaaaccccctcccttctaaaaatacaaaatcagctgggcatggtggcgggtacctgtaatycaagctactcaggaggctgaggcaggagaattacttgaacccaggaggcggaggttgcagtgagccaagattgcaccactgcactctagcctgagtgacagagtgagactccatctcaaaaaaaaaaaaaaaaaaagaccagcacggcaccatagagagaccctgaccctgtctctacaaaaaatttaaaaaagaaaaattggctgggtgtggtggcatgcatacctgaagtcccagctactcaggaggcagttgaggtggggaggatcacttgagccgctgcactatagccttggtgactgaataaggccctgactctttaaaaaaaaaaaaaaaaaaaagaaaccagtttgctaggcctaaaataattgtttcttttggcttgcaaaagtggcaaaaatggcaaatctacttttttttacttttttaaaaaaatttttctctcaaatctatttatgatgagtattccaaaagagggtgcagggacatgggtattgccataccaggttgcattaggggtgaaattagtttaacctttctggggtggtggttatatcaaaagatttagaattttcagccaggggtggtggctcattactgtaatcccagcactttgggaggctgaggcaggcagattacctgaggtcaggagtttgagaacagtctggccaatgtagtgaaacctcgtctctactaaaaatacaaaaattagctgtgtgtggcagtgcacgcctgtaatcccagctacttggcaagctgaggcagcagaatcrctagaatccaggaggtggaagttgcagtgagccgagatcatgccagtgcactccagcctggacgacagagcaagactcaatctcaaaaagaagataagacttagaattttgcttaataagttcactggtaggatatttatttatttatttatttttaaagagagattggtctgtgttttccaggctggtctcaagtgatatgcccgcttcaccctcccaaagtgctgggattataggcatgaaccactgcgcccagcctactgttaggaatttatcaaagagaattgatcaaggatatgagaccccgtctcaaaaaaaaaaattttttttttttttttttgctgatgaagagtaacgatatgacaatatgttaaataggctatagaattgtatgtttaataatattccatttttgtagaaagtattttaaaatacaaaaacaacacctagaaagaatgataccaaaataacaacggtaagtattagaattacaggtggtttaaattttctacaatgaatatgcaattgatcaaaaaactttttttttttcttttgggaggcagggtctcttgtcacccaggcaggaatgcagaggtgtgatcacagctcattgcagcctcagcctcccaggttcgagcaattctcttgccttagcctcctgagtagctgtgactacaggtgtgtaccaccatgcctggctcgtttttaaattttttgtggacatcgggtctcactgtgtttcccaggctggtctcaaactcctgtgcttaagtgatccttttgccttggcctcccaaagtgttgggattacaggtatgagccactactcctgacctcagattctttttaaaagaagaaaaaaaatgtggtaacttcttaggtaacagcacgaattcacaagaacagttctgaaaattttcccttttgttgtagtaatatgatcgctagattatggtgaagttcagtgaacctagctagagagagtgcaaagttgctagctagaaagactggaaaactgggttagtttatgaaggtgaaaagtcacagttagttctcagcatcatcctgtacaaggtaatagtgcttgtagagcagtagatcataaattactatggtttgtttaattatgaaaacctgataatcagatcatctgttttcttagaaattctaatgtartggtaggttatattagtgcttcaaacatggtttgctttttatttttaattaattttttttttttttgagataaggtctcactctgccgtgcaggctggagtgcagtggcacaatcttggctcaccgcagcctcaacctccagggctcatgtgattctcccacctcagcctcctgagtagctggaacaggtgcatgctaccatgcccggctaattttttttttttttttttgagacggagtctcgctctgtcgcccagcctggagtgcagtggcgtgatctcggctcactgcaagctccgcctcccgggttcatgccattctcctgtctcaacctcccgagtagctgaatttttgtattttttgtagagacgggattttgccatattgcctaggctggtcttgaactcctgagttcaagcaatccgccccaccttaccttaccatagtgctgggattataggtgtgagccagcatggttggcctgtttatttttgtgagacagggtcttgctttgtcacacaagactggagtccagtgacacaatcatagcttactgctgcctcttccaggatcatcaatttacctgcttcagcctcccaagtagctgggactacaggcacacaccccaagtagctgggactacaggcacacaccaccatgcctgggcagttttttaatcttttgtagagatggggtcccactttgttgcccaggctggtcttgaatgcctggcctcaagtgattctcccaccttggactccgaaagtgctgggattacaggtgtgagccaccttgcccgaccagtttttttkttttttttaaaccagatatctacctgcttgtctagagcttttttttattaatgcagtttttctctcagccttttggtttgaggacccctttacattctaaaaattttttgaggacctcaaagagcttttgtatatatgggtcatatcgatcaacatttaccatatttgatattaaaaccgagagatttaaaaatatttaggtttttaacctttaaacacttaacaataataagcctattacatgttaacataaaaagttttaatggaccaggtgcagtggctcatgcctgtaatcccagcactttgggagaccgaggcaggtggatcacttgaggtcaggagttcgagaccagcctggccaacatggtgaaaccccatctctactaaaaatacaaaaattacccgggcatggtggtgggtacctgtaatcccagctactcgggaggctgaggcaggagaatcacttgaacctgggaggtggaggttgcagtgagctgagattgtgccattgcgctccagcctgggtgccaagagcaaaactccgtctcaaaaaacaaacaaaaaagaaatagagacaaggttttgctcaaccttcttcataactgggactataggtctgtgtcaccatgcctggctaatttttaaatttttttgtggagatgggatctcactatgttgcccgggctggaatttctgttgttataaattaactagtctttggtattttgttaatagcagcccaagcaaactaagacagacgcattctttgcaaatcttttttttttttttttttttttttttttttttttttgaggagatggaatctctctttgtcaccaggctggagtgcagcggcgcgatctcagctcactgcagcctctgcctcctgggttcaaggaattcttctgcctcagtctcccaagtagctgggactacaggcgcgcgccaccatgcccagctaatttttgtacttgtagtagagacagggtttcactatgttggccaggatagtcttgatctcttgacctcgtgatccgcctgcctcggcctcccaaagtgctgggattacaggtgcgaaccaccgcgcccggccttacaaatctttttaatacatagtttaagagaatacagctggagtttcatatctgctgcattcagtgtgttacagtgtgatattttggttgaagtttatggagaaaattcagctacccacaaatatgtagttggaaagggggaggggtattcatactttaccaaaactgaacgagtgttagtttcttttttcttttgagatgggagtcttgctctgttgcccaggctggagtgcaatggcacaatctcagctcaccgcaacctccgcctcctgggttcaagcaattctcctgcctcagcctcccgagtagctgggactacagacgtgtgccaccacacctggctaatttttgtatttttagtagagatgaggtttcaccatgttggccaggctggtcttgaactcctgacctcaagtgatccayccacttcggcctcccaaagtgttgggattacaggtgtgagccagtgcgcccaggcgagtattagtttcttaaaaggttagttgcagtgtgcaactgcttcaattaacattttgtactttaagattcatgctatcttgtaattggaatgattgttttacttgtgcatgatttcgtaacacacattggtcacttggaaaatattgattgactaggttatagagatttttccatatattgatatatatcaaaacattaaattcattaattaaatctcattagaaaagtttggtattgggaagctgttgctgatggttgtggatagaagtttgaaaaatgaaattttgcttaaaagcttgagtttcattattgacaatgaaaactgccagtttatcatcaggtgacagggcacttcattttggagaaacactctgccagttatgcaagtctgaatagccatagttagtctattcatcattctttcaagtaaaaatgatgttccataccgtacatgaaaacacagttaataacttgatggtgaaagactgaaagccttccctttaagatcatgaagcagacaagatagcctacttttgccacatctcatcaacgtggtactagacgttccagccagagcaattaggcaaggaaaagaaaagaagcctaattgctctgctgcaacttctaagaaaagataggaaaaagagccatttccatttgcatgtgacataattctgtatgtagaaaattctaaagaatccattaagaaaacactaaagccaataaatgagttctgcaaagttgcaggacacaagatcaatatacagaaatcatttgccgggtgtggtggctcacgcctgtgatcccagcactatgggaggccgaggcagacggattgcttgaggtcaagagttcaagactagcctggccaacatggtgaaaccctgtctctactaaaaatacaaaaattagctgggtgtggtgatgggggcctgtaatcccagctatttgggaggctaaggcaggagaattgcttgaaacccggcaggcaggggttgcagtgagtcgagatcatgccactgcacttcaacttgggtgacagagcaagggtccgtctcaaataaaaattatagttttatacataaggaatgaacaatccaaaaataaaattaagaaaattccatttgcagtagtatcaaaaataataaaatacttaggaataaaattaaggaggcaaaagacttgtacactggaaactacaaaacattgctgaaagaaactaaagaagacctaaataaatggagagacattctgtgttcatggattataacttagaattgttaaggttgcagtattccccatgttgatacacagtcattgcaatacctatcaaaattccagtagcacttttttcagaagctgactagtggattttaaaagtcataaaaaatcttaagggacctcaaatagccaaaacaatcttgaacaagaataaagttggaagacttgtatttctgatttcaaagctttactgcaaagctgcaataatcaaaacattgtggtactggtataaggatagacatacagaccagtagactagaattgagagcccagaaataaaccctcatacatatggtcaattgatacttttttgacaagcttctcaatggagaaacaacagtcttttcaacaaatggtgctgggaaaactaaattatcacattcaaaagaatgaagttggatcctttccttatgttgcatataaaaatcctgcagaaggatgggccaaaaaaatgaaaacaaacaactctcaaaatgtatcaaagacctaaatttaagaactaaaatacaaaatttgtagaagaaacataagtgaaaatcttcatgaatcttggattaggcaatgatttcttaagtatgacaccaaaagcataaagatagataaatcagacttcatgaaaattaagaactttgttcatcaaaggacatattaaggaagtgaaaaggcagcacacagaatgggtcaaaatatttacaagttatatatttgataagggatcaacatccagaacatgtaaagaacttcaaaacaacaacaaaacaaaccaattcaaaaatgctcaaaagttttgaatagatttttcttcagagaagatatacagctgtccaataagctcatgaaaggatgctcaacatcattaaatcattaaggaaatgcaaatcaaaaccacaatgagataccacttcacagctgttaggtggatattattttaagaataaaaccctcatgcattggtgataggaatagaaaatggtacagccactgtgggaaacagtttggcagttctttagaaagctgaacatagaattaccataggatctagcagttcttctaggtacataccccaaagaattgaaagcaaggacttgaacagatatttgtacacccatgttcatagcagcagttttcacaacagccaaaaagtagaagcagttcaagtgttcagcagatgagtgggtgaagcaaatgtgttatagccatatggtggaatattattcactcataaaaaatgaaattttcgactgggcgtggaggttcatgcctgtaatcccagcactttgggaggccaagcagggcagaacacttgaagtcaggagtttgagaccagcctggccaacatggaaaaaccccatctctactgaaatacaaaaattagctgggcatggtggcacacgcctgtaatcccagctagttgggaggctgaggcaggagaaccgcttgaacccaggaagcagggttcgcagtgaggtgagacgccactgcactccagcgtgggtgacagagtgagactcggtctcaaaaaaaaaaaaaaaatgctgtgggcacattatagagaattgaaatcaaataacaaaagggaaaggaaagtgactaatattgctattattttggtacagtttctttctttcctttttttttttttaattgagacagggtctccctttatctcccaggtggtatgatcatgactcactgcagtctcagcctcctgggctcaagtatcgatcctcccacctaagcttcccaagttgctgagaatacaggcacacactaccatacagactaacttatttttttgtacagatacagcctcattatgttgcccaggctggtctcaaactcctgggctcaagtgatcctcctaccttactcagcttcctagagtgctgggattttagatgtgagccactgtgcctggcttttgtctgctaattctgtcatctttgtcactcatagatttaattctattggtttatttttatcctcagtaagagtcatatttttctgtttcagtccatgctgggcaatttttgagtggatgccagacatcgttaatcttaccttgttctacactggattcttttatattataaatactcctaagctgtgttctgggacacagctatgttacatggaatagtttgatccttttaaaccttgtgaggcaggaccaaaatgacctttaatctagggtaaatttcccctgatgtccattgaattgtaagatttttttcctctcttgtccttgtgtgagatctagggattattccctctacccctttcaggtggttctttccctagcttcaggtattttcctgtgttgatcagtgcttagctgaagacttagaaggtcccctctgtagctcttcaaagctgggctttctttatgcatctctctcctctcttgtattttgcactgtgaactccagatgccttggctttcccaggccccaaattctgtcttctcaacccagagtgaccgtcaagtctgcctgaattccctttctagtgctgagacatgaaaactctccaggcagtaagttagatcaatcacagggcttgccttatttgttttcctttttcagggggtccctgtccgctattgcctggtgtccagtttgtgaaaattatttcaggtgcaccagctcatgtctgtaatctcagcactttcagaggctggaggtgggtgtattccttgaggccaggactttgagaccagcctggccaacatggtaaaaccccgtctctactaaaaatacaaaaattagccgggtgtggaggtgcgcgcctgtaattccagctactcaaggggctgaggcaggagtatcacttgaacttgggaggcaaaggttacaggtagccaagatcacaccactgcactacagcctgggtaacagagcaagactctgtctcaaaaataaaaaaatattttaaatattttgtctaatttttttagttctttcaggtgagagagtaaatccagtccttgtagttccatcttggatgaaagaagttgtcccagtctaaaatttaatttggggtacttccaaattctggtgcaattaatatttatcatgtgcttgctgtgtgcctgatatattcaaaactcaacctatccttcttcccttactccctacctcactatacacgttagttgagcactttctctgtgtcaggtattctgtattcattgtggagctaaataacctggcctttgcctttatgtaaggacagtatttttctctttagagttgtggacaccgaggctcagagagttagattaacatacgtttaccagcctctcttccttagaaacacacaatggttcaacccaaaaaaaagataagataagtctgcctttacccaaggttttcaaaatgttaatgagcagttctgttttgtttgaatgtaaaggaatggtgactgtttcatttcatattacagaagtgattctttggaggccatacttcaaacatcatataaagtagtaaactacataaatttaagagaagttacacatgtcttaataacctaataaccatgccttttggacacaaaaatattcagtagtgtgatttacagcaggattatatgttcacataacgagagtttcactcctgaaatttctaatggaacataggctagatgatgcagagagaggaattacaaagaaaccctcctgcacccacccccaagaatcagtgataacttttgtaaaactacggtattatagagaagtaggctgtgaatgtcaagtagaaagtgcagaagctttttccaatcactttactctaatattgccaaccaagacttgctctaaaaccataatacttgtgaagtctacaactgcatttaaattaggacatcttaaagaacaagccccaaaactggctacaagaacgtctttcctgccaggctttagtatacaaagccarcaaatgcctgctagagatacctagtagtgtgaaaatgttagcagcattgtaaacttcaatcctggcagcttagttttttttactcttatttgttgtgatttgaatttaataatacattttcttcagaaagcttaaatcctgtgtgttaaatttgttacagaaatggaaaaaaaaaaaaaccttttgttaacatttttcttttctctctttccataaaccctccccctactccatttacatgcagaacactcatccagtctagtgtctaatatatctaggtggttgaaatccaagttaagtatttagatttagtgtttcttaacttgtttccttatatttatggtatttttttcagggtatttacatttaaaataatcagttgaatattttctttctaaagttgaaccagataatagtgattcctttcctcctgttcttttacttcattgagtatgattaaaaagccacttagggaaagaaaatcttccattgtgctttctgttaaatagcaatctaagtgctattgacatcaaccattgtgcagggctttttaggcctatgtatgactaaatattagatactcttaaaatcactagattgaggccaggtgcggtggctcacgcctataatcccagcactttgggaggccgaggcgggtggatcacctgaggtcaggagttcgagaccagcctggccaacatggtgaaaccccatctctaccaaaaatacaaacaaacaaacaaacaaacaaaaaaacttagctgggcgtggtggtaggcgcctgtaatctcagctacttgggaggctgaggcaggagaattgcttcaacacaagaggcggaggttgcagtcagccgaggtcatgccattacactctagcctgggcagtaaaagtgaaactccatctcaagaaaaaaaaaaaaaaaagattaaaaaaaaataaaatcactaggttgaggttttataaattatcttccttgcagatcctaaatgattaacatattgttggtagcatagtttcttagtcattttaccagttggcacacttacgtgtcagtagatacaaagtgtttagcagtgagatgaaggcagtgtagaataaggttacatgcacatatcatggagctggaaacaagttgcttttaaaaactcagatttctcatttcaagtgttctcatagtttaatcatttcaaagtataaacgttatcaaaacatcacattgtaccccatgaatatagacaattatttgtcatttgaaaaaaaawtttttttaagtattctcataagattgttacaaagtacttagaataatgcctggttcacagaaaacaggacatggtatttgattaaaagaaaattagagccatgcaccgtggcatatgcctgtagtcccagctattcaggaggctgagatgggaggatcacttgagcccaggagttcgatccagcctgctcaatatagcaagacctcatctcaaaaaaaaaaaaaaaagtcattgatgaaaaattatgtaaaggagaaagtgttaataaaagtcacccaggctggacgatgtggctcacacctgtaatcccagcacattgggaggccaaggctggaggattgtctgagcccaggagtttgagaccagcctgggcaacatagcaagacctcattgctactaataataaaaaaggccgggtgtggtggctcacgcctgtaaccccagcgctttgggaggccgagacaggtggatcacctgaggtcaggagttcaagaccagcctggccaacatggtgaaaccccgtctctactaaaaatacaaaattagctgggtgtggtggtgcatgcctgtaatctcacctactcgggaggctgaggcaggagaattgcttgaacctgggaggtggaagttgcagtgaaccaagatcgtaccattgcactccagcctgggcaacaggagttaaactctgtcttaataataataataataataaaattatctgggtgtggtggcgcatacctgtggtctaagctgttctggaggctgatttgggaagatgcttgagtgtgggaggtttaggctgcagtgagctgtgatcatgccactggagtctagcctgggcaacacagtgagaccccatctaaaaacaaaaacaaaaacaaaaacaaaaatatcatcagccagtcttgttggctcacgtttgtaagtaatcccagcacttttggagactgaggtgagatcacttgaggccaggagtttgagtacaacctagtcaacagagtgagaccttgactcaaaaaaaaaaaaaaaaaaaaaaggacatacactgattgatgaaaaattatagaaaggggaaagtgttatcaaaagtcagctggtcttggtgcctcacacctgtaattctagcacttttggagatcgaggcaagaggatcacttgaggccaggagtttgagactagcctgtgtaatagcaagacctcgtctctataaaaaagaaaagtcatgttcactgaattatacacttaaaaatgcttaaaatagtaaattttggtaagtatattttaccacaatatttaaaaaagaaatgtcacaatttaaagtccattgaaattttcttttatgtaagtgcaaccatgtattgctaacgacaggatgcattttgagaaatgtattgctgcctgatttagttgttgtgtgaacgtcatagagtgtacttacagaaacctagatgatacagccgcccacacacctaggctatacggtagagcttattgctcataggctaccaacctgtacagcatgttactgtactgagtactgtagacagttgtaacacaatggtaagtatgtattttaacatgtaaacatagaaaaggtgcagtaaaaatgtggtattataatctttttttatcttttttttttttgagacagagtctcgtcctgtcgcccaggctggaatgcagtggtgccatcttggctcacggcagcctccgcctcccaggttcaagcaattctcctgcctcagactcctgagtagctgggattacaggtgtgcaccaccacgcccagctaatttttgtatttttagtagagacggggttttgccatgttggccaggctggtctgaaactcctgacctcaggtgatcctcccacctcagcctcccaaagtgctgggattacaggtgtgagccaccacgtctggctgcgagtattttttgagaacttgttctcagtagattcatggtgagcatcagtgacatcatttagactggaattcatgggtagaagtaggagcaggtacacagttctcctattctcttggtgtcctgtggagtggcgtgcttggattggggcataggtggatgtaccatgagactgggctccatgaaagaattctgcctgccttcccctaaccttctttatgggattgagcgtgataagtgaagttaaaaagcgtgagtttgggtactgactttacaggagttgctgacaactagtgccctggtacctagagactgtgtggagcttcgggaaggtgctttggagaaactcctggccagagggagggaggagccaggagccccagatcctcattagctctttgctaagcaatccagaaagaacaaaaagatcagttggccaaatttggtaatccaggtgagatcatgatggcttggactaaggtaacaactcgactaagatggagataaaaagctgttggcactgtgagatgattatatgttttttccctgtattatgttactgcagtgaattgttcataaatttgcaaagttaaaccatccttgcataaattctagtctgtaattatatatttataattatataaaaatacatattttactatttctctggattctagtaatcatttaggactttttccatctatattggtaagtcaagctagtacatataaattttttcatggtctttgtctcattacggaagtaatcaaaatgagttatttatcttcctgtatttgtgaacagtttgtaaaagagtttgcttttgcagggtacatttagcaaaattctataatatatcacagcttaatgtttgtgcttatgcacaaatgaatgtatgtctatatatgaatgatggagaatggattttgatacctattctatttaatggttattgttttattcagggtttaaaatggcccatttccccttaatttatactttaaaaaaaaaaaaagtagaggcagggttttactgtgttgcccaggctggtcttgaactcctggtctcaagcagtcctcctgccttggccttgcacagtgctgggattacaggcatgagccactgcacctggccgatacatttaaaaataatgcctgccatctagtaggcattcagtatttatggagtgaataaattaatgaacgttattgaaatagaatccattgcattttgttgttgcagtaacgtctatatgttaagcctccattctacttgatagtatttgtacattcttttttttttttttttaaagatggagtctcgctctgtcgcccaggttggagtgcagtggtgcgatctcgactcactgcaacctccgcctcctgggagtaatcccagcctcccgagtagctgggattacaggcatccgccgctacgcccagctaatttttgtttttctcagtagagatagagtttcatcatgttggccaggctagtcttgaactcctgacctcaggtgatccacccaccttggactcccagagtgctgggattataggtgtgagccaccatgcctgaccatatttgtacattttgaagatttttactgatttatcatgatagatttaagttgatgctcttttttttagatttttctttttaaaaatttcagtaactttagggatacaggtgggttttgattatatgaatgaattatatagtgaagtctgagattttggtgcacccattacccgagtagtgtacattgtacccagtatgtagtttktttttttttttttttaatccctccctgccctcccacctccccgcttctgagtctctaaagtccattataccaatctgtatgcctttatgtacccagagcttagctcctacttataaatgagaacctgtgatattttgttttccattcctgagttacttcacttagaataatggcctccagctccgtccaagttgctggaaaagacattatttcatttttttctatggctgagcagtattccatggtgtatatattaatgtatcacattttctttatccactcattggttggcaggcacttaggttggttccatatcttacagttgtgcattgtgctgtgattaacatatacgtgcaggtccttttcatacagtgacttattttcctttaggtagatacccagtggtgggcttgctggattgaattggcagacctacatttagttctttgagaaatcttcatactattttccacagaggttgtgctaatttacttcaccaccagcagtgtataagcattccctattcaaatgaacaaataactaaatgaagcattccctttcactatgtacacatcagcatctattgttcttttgattttttaaataatggccactctggctggggtaaggtggtatctcattgtggttttaatttgtatttccatgatgattagtgacgttgattattttttcatttgtttgtggccacttgtatatcttctttagagaaatgcctatttatgttgtttgcccactttttgatgggattatttgttgttgttgttttccttgctgatttgagttcctcatagattctggatattagacctttgttggatgcattgcttgcatgtattttctcccattctgtgggttccatttatttttgtttttgttgcatttgcttttggggttttagttataaattctttgcctaggtcaatgtccagaagagtttttcctaggttttcttctagaatttttgtggtttcaggtcttagatttaagtctttaatacatcttgagttgatttttctatgtggtgaaagatagggattcattttcattcttctacatgtggctatgcagttttcccagcaccatttattaaatagggtgtgtcctttccctaattcatgtttttgtatgctttgtcaaagatcagttggttttaagtatttggctttatttctggtttctctattctgttccattggtgtattagtccattcttgtactgccataaaaaaatacttgtggccgggtgctgtggctcatgcctgtaatctcagcacttttggaggctgaggcaggcgggtcacttgaggtcaggagttcgagaccaccctggccaaaatggtgaaaccccctgtctaccaaaaatatgaaaaattagccaggtgtggttgtgcacgcttgtaatcccagctactcgggaggctgaggcaggagaatcgcttgaacctgggaggcggaggttgcagtgagccgagattgcaccattgcactccagcctgggcgacaagtgagactacgtctcaaaaaaacaaaacaaaacaaaaaacaaaaagacttgagactgtaatttttaaagaaagagatttaagtggctcatggttctacaggcagtacaggaagcatagtggcttctgcttctggggacgcctcaggaaactgacagtcatggtggaaggtgaaggcagagcaggcaccatggcccgagcaggaggaagaatgagggaggaggtgctacacactttcaaaggaccagatctcctgagaactctatcactgtatagtaccaagaggggatagtgctaaaccattcatgagaactctgccctcatgatccagtcacctcccaccaggcgccatctccagcactgggggattacatttcaacatgagatttaggtggggacagatccaaaccattcaattgatctatgtatctttctttatacctgtaccatactgttttggttactatagccttaatagtataatttgatgttgggtaatgtcatgcctttagatttgttatttctgtttaggattgctttggcttttcaggctcttttttggttccgtatgaattttaggattgttgcttttaattctttaaaaaatgatgtgggtattttgttaagaattgcattgaatctatcgattgctttgggcagtatggtcattttcacgatactgattcttccagtccctgagcacgagatgtgtttccatttgtttgtgtattctgtgatttctttcagcagtgttttgtcattctccttgtagagatctttcatctccttggttaaatatattcctaggtttttatgtgttgttttctttcagctattgtaaaagggattgagttcttgatttgattctcaggttggtcattgttgatgtgtagcagtgctgctgacttgtatacgttgatttcgtaacctgagacttaactgaattcacttatcaaatctagttgtcttttggaggagtcttcggggttttttttaggtatgtgatgatattattggcaaaacagagatagcttgacttcctcttccaatttgggtgccctttctttctcttgcctaattgctgtgcctgggtaagttggtagtcttatgtggctttaagtttcttgtattctgcttaagatacatttgtgatttttttctcccatgtattgtttattcttatgtttttccccatttattgaatatacctctgcttatttgacaatactgaaattttgtgtatttacttatatattagagccactatgcaaaagtaaacagtatttactaaatttatgtgaatttagtaaacacagtaaatactatttacttttgcataggggctctaatgttcaagttccatataaatataaatatttctggtgggagaattatgatagataccactggatgggtgttagaactccccaaaattgataatttttgaggtgctaagatactaaatgtgttttcatcaagcttatataaaagatactgagaaacaaagattgggtctcaaagagatggcattagtttctgccttaggtgagaacaactaaaaaattggcatcgttttcttataaatatagctcatttgggacatggattgtatttccaaatacctgtcacatggatttattctgccttttgtaggagaaacctgtaatattgttcttttgtatccttccgattctatctcacttacctccacactcttctcaaagggggaaactcagtttcagcttgattatcttgtacaagggcactakyaaatggaccgttccattcccagagatgccaacaatcttacacagattattcacaaatctgttttcccaagctacctgctagttatactcatgttagtatcttcccaacactcaaaatacctgaacactgaatgtatcctcttcatcagcaaaccaacttcctctttcaagtccccgttactgagttagtcctgtataatgtagtgagtagtgatgatgagcatggattgattattggcttagcttctttttttttttttctttttcttttcttttctttttttttgagatggagtgtcactctgtcgttcagactggatttagtggtgcaatctcggctcactgcaacctccacctcctgggttcaatcaattctcctgcctcagcctcccgagtagctgcgactacaggcacgtgccatcacgcctggctaatttttgtatttttagtagagatggggttttaccatgttgaccaggctggtcggctcagcttctttatgcctaaattgtctcatctgtaaaatggggataatattggaatctgatgggattgtaagtgagaattagttaaataacaaaatacgtaaagtgcctggtacttagtaagcccttaaaaaacattagcttttacattattaccaatatattattggtaataccctaggtttatctcctctcttactcagtcatactcttgattttactgctgcagtctgtctcaaatctgtctttattttactgcccctgttacttttctatctcaggctcccattacttttctactgcactactatgctgattgatctctctgctttcgcagtttcttctttcattcaccttctacattgctatcattttcggtcttaaaatgatcagatatcactccccagtcccagatccttaatgactccccactgcactgcatttgtattttctttcactttggcagttaaatctctacttttttttttttttttttttaatggaggcaaagtctccaggctggacactacaacctctgcttcccaggttcaagcgattctgatgcctcagctatccgagtagctgggattacaggtgtgcgccaccacgcctggctaattttttgtatttttagtagagatggggttttgccatgttggccaggctggtctcgaactcctgacctcaggtgagccgtctgccttggcctcccaaagtgctaggattacaggcgtgagccaccgcgcctggcctctarattcttttccatggaacatttattgaagatttctctagtttttgtcccttttaatagtcttatattcggacagagaacattccatgttctttctcaagttttgcaaagcttagtattagctactctgtttatttgttcagggaaatgctatgtttaaatggaaatcgatgtctaagttacatactcaggagttaaataattaatggtaactagatatagactttctacatatttgattagattctattagtgctgtctcagtataatttgtatctgtatattttaagttgattgcattagctttctaaaaggtgcttggtggtggttgtcatttgttgagggagagggtatgagaagttttaaagatttcagcattatcttactgatatgtttgtatatgtctttaaggaactggtgtagagaagtagtaaccagtactgagggttaatatgctttcaattgtgggcaaatgctccagtgcatgtaattctacttattaaagttgtctttcagagctcgggttaagtgaactcaaaagttattttgaaatacagagaaatctgattaaacaggaccgtgaagtaacatagctagtgaacacttgctaaatgttcacaatgattgttttgaaccatttttgtttttttctaaccacactgaaaactaaagatactaatgtaaaatatttgtgctttaatgagaatgtattagagtcatttaaaaatattattgactcttgtataagtgatttttttaaaaaagatataagaaagaaggtgtggagaagtaaatatttttcactaatagcttcacctgcagaatcatggcatgcaaacactaagtgatcgagttgaacattttcagtgataccatgtagatattatgacttgatgtgttgagaagggcacttcacctctgttattctttccataaactcgtaactccagtcaaaatatcagaaagacagacagacacactgagagacatcctttaaaatacttgaacagcgctcagaactgtcatgaaaaacaaggaaagactaagaaatgattacagaccagaggagactaaggagatagggtgagtaaatgtaaagtggtatccttgattggatcctggaatagataaaaacattagtggaaaaaactggtgaagcctggatatagcctgggattcagttagtactaccatactgatgttggtttcttagttttgaagaatgtcccacagtaatataagatggtaacattaggggaaactgaaactggatttgggttttatgggaactccctgcgtggtctttataacttttctgtagatgtagaattattctgaaattaaaaatttgtcaaaagtaggtaatattttccagttcagttctacaaatgtattgaatgcctgttatgtgcccagtgtgaccagggttgcaggggataaagtgtgtaagagatactttccctgcctctgcccttaaggagttgtcttccagattggggaataagacaattaatatgaagcagaacgtgatggaacctgtgaaaaactatgagcaagttgctgtagggggttcagaagctgagagtagacgttaaatatagactggagagtcctccccaaggaggcagtgtttgagaactttgaagaatgggcaggatttagtaaccgtagtcattggaaaggaaatgtgtcataaccaaagagccctggctcttgaatttcatagacctatgctgccccttactagctttgtgaccttgcaaattatttaatgtcactaagtctttgtttctcatttgtaagatacggttagtaattcctatttcaaagcattatgagaattaaatgcactttatttagcttagtaaagcatctaatccctagtaaactcttagtgttaactgctagagatggagagaagcatatattgttgatgcagtaccaataccacaggcacagagcctggaaagcgtagatagagtgtttggtggaacattgactggtattagaaaggtgaattaggactacattgtgagtgctttcatgtatcaggtcagcagtttgaactttttaagtggtaattgagaagtcattaaagattttcatgtagggggagtaaggagattgagtctgttttaggattaatttgatagaaatatgaggggagtgttggaggctctcatgtgggttgctgccttcccatttacttggtgagttagatgtgtcccctttagctttagaattcagtgaaacagttagcttgaaatgctctggatgattagtaggaatctgttactgtgtaacttgggaatttcaaaagcaggaccatgagtatgtagtatcaaatacacttaatatgtgtttagtaaaaagggccattgctatttttagatgtattggctgagaactccttttgtaggtgatggttttcgttttgttttgttttgttttgttttgttttttaacagcttaagtcgatgataagagttaaacagtacttcattgacttcctgtgaggctttgtggaaaacagttccgttgtatctatttttaaagctgattactgtgagcagaggatgctgctattgagttataaatgtcatctcagtatgttctcactcagcattctttagatgacactagtgtttggatataaggtttctggagtttatctgataggaaaagcagcagttatcactgaaatagtaccagtaaatgaaatacttaaaagcagtgatcatgttacccttcagcagtataattatcatcatctatatgagtcttaagcctataccatcactgaatggcaaaaaattgtaaccttattttgggaatattttgcaaccctgtaatcgtattgtataatgttttacagcttttttgttaatcattgtattaaaagtattaaatcatcttggaattttcctcttgagaacgataggatcatttgatttacaaatattgttaaaatacacttacctgtaaattattgggggttttcttcagtggattttttggtttgtttttagagacagtcttgctatgttgcccaggctggtacgaaactcctggccttcagccatcctcccatcttggcctcccaaagagctgggattacaggtgtgagtccctatgcctgacctccagtcttttattatgatctttcttttcttttctcttctcttctcttctcttctcttctcttctcttctcttctcttctcttctttctcttctcttctcttctcttttcttcttttcycttttcttttcttttctttttttgagacagggtctgtctctgtttgcccaggctggaatgcagcggcatgatctctgctgactgtacctccacctccagggctcaagccatcctcccacctcagcatccctagtagctgagactagaggtccatgccaccatgcccagctgatttttgttttttttgtagagacggactttcaccatgttgcccaggctggtctcgaacttgtgagctcaagtgatctgcctgtcttggcctcccgtaagtgctgggattacaggcataaggcaccatgcccaacctataaggaaatttttcggtcctacagaagagttgaaagaattttataaccaccatataccaatctgcaattagctaaattacttttctttgtttttcattattattatttttttaagacagttttgcttcgtcgcctaggctggagtgccgtggtacgatctttgctcactgcaacctccacttgccaggttcaagctatcatcccacctcagcaaccctagtagctgggactacagctgtgcaccaccatacctggctaatttttttgcattttttgtatagatggggggtctcactatattgcccaggctggtctcaaaytcctgagttcaagcaatctgccggcctcagcctctcaaagagctaggattacaagtgtgagctgctgcgcccagcctaaattactgtttttaaaatgaaagttttgtttccttctctttttaaataccatataaacttttttgagtctttaaaccatttttaagagacttttgaagtaggtgagatgatttttgatatttctgtgttaattcttcagaacaataatattcaagtaaaataattctaatagtctgaggtttggcaaatctgttttagaatagataatactagtttagtagattactttttctagccctgtatagggtttatacagttaactgttcatttaaattccctaagacataaattcatttaaattatctgcagacagaaaatatacgttaaaaaattatttctgctaaggtgtgaggagcccaggagttggagaccagcctgggcaatatagtgagacccccatcacacataaaatagaaaaagtggctgggcgcggtagctcacacctgtaatcccagcactttgggaagcccaaggtgggtggatcacctgagatcaggagttcgagaccagcctgaccaatatggtgaaaccctgtctctactaaaaatacaaaaattaggccgggcgcagtggctcacgcctgtaatcccaacactttgggaggtccaggcgggtggatcacctaaggttggaagttcgagaccagcctgaccaacatggagaaactccgtctctactaaaaatataaaattaaccgggcgtggtggtgtgtgcctgtagtcccagctacttgggaggctgagacaggagaattgcttgaacccgggagagagggtgcagtgagccaagacgtgacactgcataccagcctgggcgacagagcgagactccatctcaaaaaaaaaaaaaaaaagaaagaaagaaagaaaaattagccaggcatagtggcctctggtccagctattcaggaggctgaggtgagaggatcgcttgagtctgggaggtcgaggctgcagtttccttgtcttaaatgttaataaatgcgtctttaatagaaggagttaatttatctcctcatactgtatttggtttcctgtttcctctttctcttcaaagtaccttatgagcaagagttacaagataactttttcagtattctatatagtagtgactgtactggtcaaaatagtttcagagatttttctgtttacctcatcattcatataaaggccacttttcacctcctgtcttgcttaagatggtgattgtgattcctatgaagttgtatttatatttttacttttgaagctaaaacaatagctatagttgctcatttaatttttaagatacttgtgtattggtgatatgtaaatcttagttctttattatgtgaagttgtacacaggaaaatgcataacattgctttgggcctgaggcacaaaggtacgttggctttgaaggtaggccctgaggtagagagaaaagaaatgacaccagtcttgaattaaaaaaaaaagatactgcatacagaatcagcatttgattatgagtaagctgtgagaggaaaagagaagaggaagacggaagctgtagagtagaatttgtagttccgtagatttggatggttagagctgaaggcgaaggttagagtggaaggcgaatgacctccttcctcagcactgtgttactgggttagagaaaagccagtactgctcgctgctgctggaactgaaggaaggaaagttctgtcttcagggtatttacaaaaagttgaacagttgtgttcctttgtggatctttggagaatcgttagaactcactgtgtgagttaaggtaactgctgacagaattttttcaagtattgcttaccatgtaaactcaaatgtctgtatcatacctcattctttttacatgttaagacagattctgctgattaaattctgccccatatactgtagacactgaaccataagcttcagattggttacaaaatgctctgacccatggacttttgtaaattcattatttccttttaagaagtatgatgcttacagtggatatctctggtggttttaagaaatgtaagcaggctttttggagggatgcattctggagtaggaaaatgtcttaaattgatttcccgtaacagtttcagtcagcactttgaactgctcttaggtacctggtgccattacatctttgtggtcaataactttttgtttgtgtggcttacttcacaaaataaaaatgctttctgtgtcctgttattttggtatgcatattttatctttgatccaacatagtgctaggtacctggtagattttcggtagaaaattattttaagagccaaagataaccagcatggtccagttattccaagacccactccctgtattcacttcagactcagcttaaaaagcaacactcgataaggtctctgagactaccctccctaaacagcaatcctgcatggcttctcatactctgtgttattcttcctcacagcacttttctcctaccatctgataacactctcgtgggaatgtacatgtcataaaagcaagaattttattttgttcattgccatattcaccccgagcctagcacatagtaggcactcaaatgttttctgaaggtatattgatcattagaaatttttgccgttcgcttggcccagagggatataaatacaagtcagaaatagatttagccattgtgtacacaaatagctatagtcaaaatgggttcagatgatgtaagagaactgcagagaaaacactgggattgttgagcattttattatgtctagctggctcctaaagaaatgacatttaaactgggtcttatttcagaccagagaaacaggcaaaggccgagaaacaaagaagagaggcaggtgtaagaaaaggtgaagtacttggtttggctagaacatactagtgaagaactaagaagttagttagaaagataggttagatccaggtcaatggaaagccttaaaatccaagctgagtttggattttatcccattggctgtgaaaattgattgtttattttttcccttcttcaaaaggcagttaaatgtcataagaattggatctgcatagaaagagacactgaagaccaaggctggaattttaattttaattttaattttaattatcaccaaggagtttgcattaggccaataccacataaatagaaggtaggaatgaccacagattggcaacaaattgactagtcagatatggagaacaaggtaaatgaaagaagctaagaagattcttcaggttttgaacttgtgggaagtaagatggtgttgtcattaaatacagaagtaaagtacatgaagaaagagcagatttaagaaagattagtttaattctgaacatgttgctttgaggtgctagcattcgagtggaggaaatgtggtagagtagatagttggaaaaactaccaaggcctaagatttgggcattgtttgctaagtagtttttaaagccctgagattgcaaaggaacaggagagagtacacggagaaagaactgaaaatagcagagagcagattcttgggaaataccgcttaagacgatgggggagaaaagccaagaaagaacaaaaggaagtaggagaaccaagagaagacaacactgcaaaacccaaggcaagatcgtgttcaggaagaagtagaattcaaacctgtttgcttcagaaagagctctggtataacctcagaagtgtgacacggattttttctatcatctcattcattatcctgctatactgttcagcgtagttcttcacacacatagtaggttctcaataatctagtttagggactactacttgacagaatgttatgtagatgtagatgtctgagccacaggctgctgattgtgcagtctagggtcctgcggaacactggaaagtaaatacattgggattaacttgtgctttgtagggtttctttcacgttacctatttcatattccatttgtgatatattcttgatcttgtctattttctctttggtacatggtagaaattctattaaacaataatcaaaggatctcaaggtgctaggaaaaaaacagttaatggactttaaagattggataagtgctttttttttttttttttttggaccgagtctcactctgtcgtccaggctggagtgcagtggtgcaatctcagctcactgcaacctctgcctcagcctcttcagtagctgggattaaaggcatgtaccaccatgcccgcctaatttttgtatttttagtagaaatggccaggctagtctcaaactcctgacctcaagtgatgcatccgcctcgacctcygaaaattttgggattacaggcgtgaaccaccgcacccggccaaaaaaagatttcaatagcatttttcgaacaagtcatggatataaagacttggataatttggtgctgcattttatccacgaaagacaaagatagcactgatggtgaccttccagtatagcattaaaaaagaaaaatctgttcctaatagaggattgttaggcagtcagtaattgatcacgatttgacttgaaattttatagtacatttatgccgggcgcggtggctcacgcttgtaatcccagcactttgggaggccgaggcaggcagatcacgaggtcaggagatcaagaccatcctggctaacacggtgaaaccccatctctgctaaaaataacaaaaaaattagctgggcatggtggcgggcgcctgtagtcccagctactcgggaggcagaggcaggagaatggcgtgaacccgggaggcggagcttgcagtgagccgagatcgcgccactgcactccagcccaggcgacagagcgagactccgtctcaaaataaataaataaataaagtacatttatatgacaagaataaacttttgaatacataaatacaaattattgggtcaaaggaaaatagacacgtattcagtagcttgtttagtgtaatagtatctatatcatctgtatcctgtttctgtggcaatagcattaaagagaacaaaggtaatctgatcaaaggacacatggaaaagtagagactacatctggtatgttaaatggtactgtgtgacatctttttttttttttttttttttgaggtggagtttcgctctgttgcccaggctggagtgcagtgacacaaactcagctcactgcaacctctgcctcctgggttcaagggattctcctgcctcagctctcccaagtagctgaggttacaggcgcacaccaccatggtcagctaatttttatatatatatatatatatatatttttttttttttttttgagacggagtctcgctctgtcgcccaggctggagtgcagtggcgggatctcggctcactgcaagctccgcctcccgggttcacgccattctcctgcctcagcctcccaagtagctgggactacaggcgcccgccactacgcccggctaattttttgtatttttagtagagacggggtttcaccgttttagccgggatggtctcgatctcctgacctcgtgatccgcccgcctcggcctcccaaagtgctgggattacaggcgtgagccaccgcgcccggccatttttatattttttagtagagacagggtttcgccacgttggccaggctggtcttgaactcctgactgcaagtgatcgcccactttggcgtcctatagtgctgggattacaggcgtgaggcaccactctcggcctgtgtgatatctttataaccatatccattaaacaggttgtgagaacaaaattaagtaattgttaacagtagcatatgcacttatgtagaaatttttgtgtggtttggatgttagcatctcatttttggtaaaggaagaggagtttgggtaaaatttatctctttaaggtctggttcagtgaaagaaagcatttattaggtctggatacttaaaaattcttttwattaagacttatttatcttttatttagatatgttatatgatgataaatatacttgataaatacacctgcaaagcaggaaataatacattggtttcctaacattttttcttccgtgatagagtgattatagcagtgcataagttcttacacttatttgttgaattctcttacctgtcatcctaaaaaagtaaatttgtccatgttcatgcttagctattaagctttattaattcaagattaaaagctttaagatatatgactaaattttttctcttgtttacttcataatatctatttgaatggaggagatacaagtggaggcagtgaatgcaacagtatttcttcattgtgtttgtatctttcatatgatcttacagcaaaaagtttctaaaacccttctttaaataaagaacaagatcactgaatatgtaacatcctcaacagcgcatttcttttctcttctctacttttttatatccttgaataatactggccagaaagaatatttgaagaggttctttctaaatgtattttaatattcatgttaattatacatcttgtatggtgaatttggtgcatttaaaataaaaataattttatgtgtttaattattgcattctgatcatttgtaggcgaaacctaaccaaactgtccctcatcttcagccacatgctggcagaactaaaaggaatctttccaagyggactctttcagggagacacatttcggattactaaagcagatgctgcggaattttggagaaaagcttttggggaaaagtaagtctcagaataatgaatttgaactatgaaaaactaaagcttacgagttttttctttacttttttactaatgaaatatttaaaatttgggaactctgagaaaagtaatatatgtgtatgtatttcctggctttggttaaatattaagtttttgctctgttcattgtttttaaaaaatagttttgcagattaaattgaaacccatgctctttgaatactcttccctttctctccccatccattgtggtttctttttgagacggagtcttgctctgttgcccaggctggagtgcagtggtgcgatctccacttactgcaagctctgcctcctgggttcatgccattctcctgcctcagcctcctgagtcgctgggactataggtgcctgccaccacgcccggctaattttttgcatttttaatagagacagggtttcaccacgtcagccaggatggtctcgacttctgacctcgtgatccacctgcttcggcatcccaaagtgctgggattacaggcgtgagccaccatgcccagccccattctgctcttaatggacatgtacatttcacattatttgctatcagcagtgagcaatatctaagttgtcttcatatgcaagaaattgtctttatttacatacgcaggagtggaattgctaagtcttggggttttacatcttttgctttgctaagtattgtccaatttctttccaaaatggtgtaccagttcatattttacagtagccccacagtttggctaacgctggcgatgtgaattggtgtaatattttgctttatattccctgatgagaagggagattgagcttcttctcacctttatgaccagtcaagattcttattcttacttgcctgttcctatttctgatttacccattttcttattgagtggtttatctttctgttattataggttactagttctttgttagatacttacattacaaatatcttctcccagtctgtggcttaccttttccgttttgctgtattgtctctctatatattawataggktgatttatgcatcaagcttgtatttttaagtataaatataaatatcctaggttttgtcgttttatttttttttttttttgagacaggatgtcactctcttgcctagtctggtgtgcagtggtacaatcaatcatagctcatcgcagcctcaaactcttggattcaagcagttctcccaagtagctgggactacacgtgtgtgctgccaggcccagctaatttgcagagacaggattttgctgtgttacccaggctggtctcgaagtcctggcctcaaataatctttccccctggcctctcaaagtactaggattacaagcgtgagccactgtgttaggcccaagtttctctttaaaggccttcatttttggccaggcacagtggctcactcctgtagtcccagcactttaggtggccaaggcaggaggatttcttgaggccagaagtttgagactactaccctggatgacattacaagacctggtctttatttgtaaattattttttatttttcttttcttkttttgcagcaaggtttcactctgttgcccaggctgtagtgcagtggcacgatctcacttgcaacctctgcctccaaagttcaagtgattttcccmcctcagcctccagagtagctggaactaattagtctggctaattttgtttgtttgtttgtttttgtagagacaaagtttcaccatattgcccagtctgggctcaagcagtctgcccactttggcctctcaaagtgctgggcctcccaaaggcatgcaccrtggctcctggtccccttctttcttttcttaaagaagttgacctgtattttgaattacgagaattgaaattggtattgagagcttaatgtggctctccttcctttccttgattatggcgatgcctggaattatctctgttatttcactttatgcctcctctccaccccctccccaggacaatagtcccttggaagagctttcgacaggctctacatgaagtgcatcccatcagttctgggctggaggccatggctctgaaatccactattgatctgacctgcaatgattatatttcggtttttgaatttgacatctttacccgactctttcaggtaggacactaaaaaagttgactaaactggttactgctacttcggtgaagagaaagctttttttttttttttttaaataacatttggggtttttgtctgtatgaaagtattttaattcattttaggaactatgccaaaaaaaagattaaaactatctcatattaaaaatatatgtatgtgtgtgtatgtatatatagtgaaaatgacagctataccaactgctttcttctcctcacatctttccttgttattgaatattcttcttttgtatcattttaatgtttgtagaatggccagaatatgaatatattagttttctgatattggatatttgtgtatgtttgcaactgtttctcctgttttattgaaattgactgttaatattgagatgtttagatgcttcaaaaacaactcctttctttttctctaaaaataatgctttctctggtgttgtctgtgccaatttgcatacacatttatttggaacttattagttgcacctataggccctatcctggttttcagtttgttgttgttcarccccactactgttaattagagctgctttacaaattctagaattttcattttgkgtcaagtttctccctataagcatatattcttttcttcgtagcttttcagagtttttaatctcctgaacacatgtgtcttctctctgagtgatggtataattaaaaatttctgacaatgaactgagagttggtgttgttttttttttttctcattgccctctgagttggttgtacatctgacctgaatagtctgtgattgatctkgtttctttagccctggtcctctttgctcaggaattggaacagccttgctgtaactcatcctggctacatggcttttttgacgtatgacgaagtgaaagctcggctccagaaattcattcacaaacctggcaggtcagttcaatgacgcaaagagatttattcttctgaatttcgttatcttgagacttctgctagtatagaagaaacatgaccttaattagtttcgcaatagccaaggttctgcaataggattgatacctgtttatcagacgtattgacttaattcagatcctataatttgataaatgttttcaggccacttaagaattgaatttatggccgggcacagtggctcacgcctgtcatcccagcactttgggaggccgaggcgggcagatcacgaggtcaggagtttgagaccagcctggccaaagtggtaaaaccctgtctctactaaaaatacaaaaattatccaggtgtggtgcgggtgcctgtaatcccagctactcaggaggctgaggcaggagaatcacttgaacctgggaggtggaggttgcagtgagccgagatcatgtcattgcactctagcctgggcaayaagagcgaaaccccatctcaaaaacaacaaaaacaaaaaaagaatagagtttatgtgtcttttgcttctggtgtggagtcatggaagaagttactctctttttaaaaatattttctttcttttttcttgtcactgacttgaagctcagaagtagttattcttggctgggtgtggtggctcacacctgtaatcccagcactttgggaggccaaggtgggcagatacttgagatcagaagtttaagactggcctggccaacatggcgaaaccccatctctactaaaaatacaaaaattagccaggtgtggtggcacatactgtagtcccagctactcaggaggctgaggcaggagaatcatttgaacccaggaggtggaggctgcagtgagctgagattgtgccactgcactctagcctgggtgacagagccagactccatcttaaaaaaagaaagaaagaaaggaagaaagttattgttattcttgatggttcttttgatttttgtctgtatcttgccttgccttccaccstaataccagcataatctactaaagcttctgtttatgtctgttcatagttatatcttccggctgagctgtactcgtctgggtcagtgggctattgggtatgttactgctgatgggaacattctccagacaatccctcacaataaacctctcttccaagcactgattgatggcttcagggaaggcttgtgagtacctactgcataccatctgttagagtctgggaacttaggggctgtccaacctcatcattaatgactttattccaggtttcttaaactgcagactaagattcaggaaaatattaacagatgatattgatttgaccttcaggtcctggaagacttttgtttttcttttttagggattccatgagtgaaattattctctaccacttcagttattaccataaataaactttatctttcttttttccaaatgttaacttattttcaagcctgtgttaggttttaaaatataccaattagcaggaaatttgaccagttatttaactagtyggcattcaagtgattcaatgttcctaatagccataggcctcagtggccttcatctgctttcatcctcacttcgcttttgttcagcagcatttcttcaggccttgggctactgtaacctatgctgctatttataactaagtccttatttattccagaattgctattcctttgagaattcaaattaattatcagttggtaaacacttaaaaatactaacagttgaccagatggcagaaaactagcttgtgttttgaagtgattaggaaaatacattttatattatacattatcttttacttacaatagcattgggactgaaaggagtgctgccccaaatgtcagaacagtttgatgctagaaactgtggatctccctggtagatgatctcagtagcttaatttgcatattgttacattgcttttaaattggtgtctctcattttcttaaacctgtaaaccttctttgatcaaaagcaaatgcagtttaaactaagaagttaagccgggtgcagtggttcacacctgtgatcccagcactttgggaggccgagacgggtggatcacctgaggtcaggagttcaagaccagcctggccaacatggcaaaaccctgtctgtactaaaagtacaaaaagttagccggacgtggtggtgggtgcctgtaatcccagctacttgggaggctgaggcaggagaatcacttgaatccaggaggcggaggtttcagtgagccaagatcactcactgcaacctcaaaaaaaaaataagaatctgtcgcgrcacacacacacacacacacacacacacacacataaagaatttctatctggtggccatccattgattaaaaatgggttggtaaactgtgacccatgggccacctgtttgtycccccggggagccmagatagcttttcctaagagtcgttttgaaaaaaacmatcagagaagaatatgtgacacagactaatgtggcctacaaatcctaaatgattttctatctggccctttacagaaaagcttgctaaccaaccccttgattaaaagatagagcctatggcattgttacctggagaaggaataatagtttttggagaatatctttaaactgttctgtgttttttatttttttgaagtattattttttggaagtattttttttttgaagtaagattgatctttatacttacaccacgttgcccttttagaatggagmaactcccagattccatttgtctatattagcaagcactggcaaattggcttaaataaaacccagggttggttactctttacagctatttgtttcctgatggacgaaatcagaatcctgatctgactggcttatgtgaaccaactccccaagaccatatcaaagtgacccaggtgagttttgtttcacatkataaccatatcactggacacaagctttagtatattctttatagaactgacagcataattgaattcattggaacccattgactagattagtgaatttgtgtgtatgtggtttcactttaaaccctggagcttaaaataggacccagactagatgctttctggtttaataaaaaataaaccactgttgtgacatttttatataagcaaaatttgtataggaaacaagtcttcactttttctgttaacatttataattgcagttatttattcaactaatagtcttttaattttttttaatcaaaggaacaatatgaattatactgtgagatgggctccacattccaactatgtaaaatatgtgctgaaaatgataaggatgtaaagattgagccctgtggacacctcatgtgcacatcctgtcttacatcctggcaggtacggatctaaacagcgacttttttcagctatgtaataaccttggaaaattcggtattatatagcctttactgatacaaggggtggcctggcttttggggttaggtttaaacttttacttttttttgrtctctaggaaatgtattttctagtagattaatattttaagtattttcagatgcatctgttactatcttttgcttcttctgcaggaatcagaaggtcagggctgtcctttctgccgatgtgaaattaaaggtactgaacccatcgtggtagatccgtttgatcctagagggagtggcagcctgttgaggcaaggagcagagggagctccctccccmaattatgatgatgatgatgatgaacgagctgatgatactctcttcatgatgaaggaattggctggtgccaaggtaagatggcagtttaggagactggcaaaatccattgtgagttgtcttctaaagccgtaaaacacttaacgatatccaaactacaatgataggtagtattaatagctaatatttattgagcatttactatatgacagatattgtgttaagcactttacttgttttttactcaatctttactacagccctatgagtacatactactattatccttatttaacagatgaagaaactgaggcacaaagaggttaaggaatttgccgaagaccacacagctagtaggttgaagcatctgtgagctgcatctatgaccaggcattccagcttaaggcccatgttcttactgtctgtattttttaggactaagactttattcatatctgttggtggagaatatgagggagaaataaaagaactggaccctcttttgctaatgcaactagaataagttctgttccctttttttttttttattttaatggagtctkggcattagaaggttggggctgggcatgcccatagctcatgcctataatcccagtactttgggacgttgaggctggaggatcagttgagcccagtttgaggccagccttggcaatatagtgagaccctatctctacccctgactccaaaacaaaacaaaaaaaagctgggtatggtgttgtgcacctgtagttctaactactctggaggccaaggctggaggatcagttgagcccagcaattcgacatagcaagaccgtatctttaccaccactgcccccatgcccccccctaaaaaaaaaaaatagctgggcatgatggtgtacgcctgtagttctaactagtctggagactgagacgggaggattgcttgatcccaggaattcaaggcgggagtgagttgtgattgtaccactgcactctaggtkgggtgacagagcgagaccctgtctcataaataaatagtaattgtatacaatgtgtagtgtgacttatttctgtaaaaaaatttttttaagcatatacgtagaaaaactggatgactacataccaaactaatcactgttatttctgaggataggaattcagagcacttaaattctgtggaatatttgaattttttacaattaatgcatattactttttcaaagtgtttgttgtgctagatggttgagtgctatatgggataagaagtctaagacaaggctttcaaggagctaattgttttatttaggaaaaggacatatgtgcaggtgaaacacttcaacacaaggcagacagtgaacattgttccaaattgttgggtacactataagtcggataggagtttagaggaaagaagtaaaggaacacactttccctagccatgtagaaatgtaaacagaaaaaaaaccagcctcatgtattttgtcatttggccattccataatttattttgtcttccttttaatgaacattcatattgtttgcaggcttacgtatattggcctgcttttacaagtctgtctaggctagcagtgggattgctgcataagggagtgtgtatttcaactgtgatagaggggaggttataattaacagaggggcttatgggaatatcacagtgataatggtattttgttttttagctggatggtaggtaagtatatggatgttttattccttgtactttatagttcattatatattttgtatgagtaaaataatttgagtgaaaatatttaacttttggttagttattaaagtttatcccccttttttggtcttgaaatcactcttgaaggtatggaaaagaatgagaatgcctgtttcttcacatcctggtagatgttgtttgttgttttattttgattttttttaatatactgaatctacttatagttggtgaatgcacatggattttttttaaggtttaaaagaattgctaaaaaaaacttacaaaaacattggttccctgcctctgccccctccagcacctctctgtcccctcgttcagagttttaattcttgaaactgtttactacctctgtgtttcttaaccatgtgcttatactgctttttctggattcttgatctcttcacctcagatgttgtgggagagggtttaggtctcttatatctccctcctccctactccatatcctcccactacagttatttgaatttggcttagtactagtgtttacatgatttcactccttactgtgccaagtaacatactatacaataattacttttgctttcttatacaactttctgcttttcctggtataattatttttattttcttagttttcagtttgtacctgtcactaccaaatcatatcatactctcaaacatcctctcaatatagtttctatgaaataaaatctgttagtatagtagtatgtgataccgtgtactgctttgtaggaaataggagtcatctgtgttccgctccagtctgctccagttactcctgtgccacactacttgtcaccctgaggtgtcccctcgccatcctcatgggacttcattgcctctcctctgttggagtaccttggttcccatgttttcctcttttttgcttctttgtttatgtccttaaagtagctttctgtgaaagggtgagagataaacttcttgagatctttggtatcttaaaatgcctttattcaaccctcaaacgtgaattgactagttacagaattctagattaataaatattctgctctaaattgttaaggcttcactgacttctagcttctaatgtatttttgcttttcagcgcttcctttccctctgtcaccaaaagccttttttttttttttttttgagacagaatcttgctctgtcacccaggctggagtgcagtggtgcaatctcggctcactgcaacctctgcctcccgggttcacaccattctcctgcctcagcctcctgagtagctgggactacaggcgcctgccaccacgcctggctaatttttttttgtatttttagtagaaacagggtttcaccatgttagccaggatggtcttgatctcctgaccttgtgatccgcctgcctcggcctcccacagtgctgggattacaggtgtgagccactgcacctggcccaccagaagcttttaagatattttcctcatccttgatttgatgaaaattgtaagggtatttttggtttgtttgttgtgggtttcctttctttcattgagctaggtatgtaataaaccctttctatttggatatttatgtcctttaagtcttgaagtcttggaaatgtttgtatttctctgatcacttattttccatttataaayttataaaggttccaccttttctggagccttatatgctatgataaaagaatattgcggccgggtgcggtggctcatgcgtgtaatcccagcactttgggaggccgaagcgggcagatcacctgagatcagaagttccataccagcctggccagtgtggtgaaaccctgtctctactaaaaatacgaaaattagccaggcatggtggcgcatgcctataatcccagttacttgggaggctgaggccagagaatggcttgaacctgggaggcagaggttgcagcgagctgagatcgcactatttcactccagcctgggcaacaagagtgagactccatctcaaaaaaaaaaaaaaagactattgcaaggatccattatgatgttgagacatgaatgtaaaaatatgattagttcaaccctctgtgcctaaggaatgagagaaagattgatgatcggcagagagggccttccagaatggggaaaggatttaaagaatgatacggaagtcgaaataatcattagaatgtgcaggaaacactgaggagatgagcctgaatagagcagcgttgatgcttgttagggagttgtgggaaatacctttctttggttgcagagaccagattagaaagacttgtgaaagctgggcaggagrgtgagattttgtaacagggcaaattgggagttactggtggtttttgagttggtgagtgtttaagaatggctaagctgatagtggtaagcagaaggatgtggtgagataaactacaagttgggaagttcactaggttgttttaataaatcacggccacccgcggtggctcacgcctgtaatgccagccctttgggaggccaaggcaaggaggatcactttagcccagaggtttgagtccaccctgggcaacatgacaagaccccgtctacccgtgccttccccgcgccccaaaaaaaaaaaagccacatgtggtggcgcacagcttgtcccagctacttgagaggctgaggcaggaggatggcttgagcccaggaggtcaaggctgcagtgcaccatgtttgtgccactgcagtccagcctgggctacagagcaagaccctgtctcccataaataagtaaggtctggggttggtaagtagaatgaaatgaaatatacaggtatgagaatcttttagggaaaaatcagcaggatatagctactgacaaaataattatgatgaagtgagaggaggcttgactagtaactttgacttttgtcattgagctgtttagctgctcatgctgcattgtcagctaattgggaacccgttatcttaagcatgtggataaagcaaagagttaaagatgagagcttttctgtcatccaccacccagcactaataacatgactaaatatggctgtttttctgtcagtgttgctttgctgttggggaatttaaatgcagagtagcattttttttttaatgaattactgtgtatctcttgacagcttactttgacaagcttatcagctattcctaagcctgctataggcagggaaatggaaaaggttatatatgtgttctttcttctaatttggtacctcattttttagagctcaaattgacagaaaatattaatcctttttaattctttctttttttttttttttttttttttttttttgagatggagtcttgctcttttgcccaggctggagtgcagtggcgctatctcggctcactgcaagctccgcctcccgggttcatgccattctcctgcctcagcctcctgaatagctgggactacaggcgcccgccaccacacctggctaattttttgtatttttagtagagacggggtttcaccgtgttagccaagatggtctcgatctcctgacctcgtgatccacccgcctcagcctcccaaagtgctgcgattacaggcgtgagccaccacgcctggccttaattattgaattgaaataatttatttctttggaaggactcaagatgctttttagtgatattcttgatcatttttctttacaaattcaccttaaaaaaatttttagttaaaattttttagagggatctcactatgttgacaaggctggtcttgaactcctggcctcaagcaatcctcctgcctccccaaatgcaggattacaggtgtgagccactgtaccgactctcatcttctttcttaccttaataacccatagagaattcaccgtcatcgatctctttctttattatgtcccttaaacattgttttcccaggtactttgttaagaggttaatatctgcaccccccgccccactgccatcctttttttttattttatttttgtcgagacaggctcttgctctgttgcccaggctggagtacagtggctagattatggttcactgcagtctcaaactcctaggctcaagcagtcttcctgttttagcctcccaaatagctgtgtgccaccatggcccagctaattttttattttattttttgtagagatggggtctcattatgttgcccatactggtctcgaactcctgcctcccaaaatgttagtattacaggtgtgggccactgtgcatggcctgccccttactttttatatggattcctatttttaatcttgaaaagatttttttctttctccaaagatgagggggtagaaaactgttgtaatttttaaagttgtaaactaggaaactttttgtagccctgtcctttctagatagattacctgtagcttgccatgggtatggtgtttctgtgattgagagtgccctcttatggtgacacaaaaattattcaggaagtgctagagtctctggaagttttttaagagggtgtgtgcgacctcaaacctaggtctggcccatttgtagtttaagtgttcccatggtatttgccatccacagctttaggakagttgaaagatgccatttccccaaacgaaagtaatctgttaaattttttatgtaccctaggtggaacggccgccttctccattctccatggccccacaagcttcccttcccccrgtgccaccacgacttgaccttctgccgcagcgagtatgtgttccctcaagtgcttctgctcttggaactgcttctaaggtaaagcattttccattactgcagtttttggattctttgctgtgtactagtgggtttttactgatttgctttcaccctgcttccacaggctgcttctggctcccttcataaagacaaaccattgccagtacctcccacacttcgagatcttccaccaccaccgcctccagaccggccatattctgttggagcagaatcccgacctcaaagacgccccttgccttgtacaccaggcgactgtccctccagagacaaactgccccctgtcccctctagccgccttggagactcatggctgccccggccaatccccaaagtaccagtatctgccccaagttccagtgatccctggacaggaagagaattaaccaaccggcactcacttccattttcattgccctcacaaatggagcccagaccagatgtgcctaggctcggaagcacgttcagtctggatacctccatggtgagtcttaattttgaaactatctaacctgttaagaaatatgtgtgggccaggcacagtggctcatgtctgtaatcccagcaatttgggaggccaaggtgggtggatcgcttgagccgaggatttcgagaccagcctgggggacgtagtgaaaccctgtctctacaaaaattacaaaaattagctgggcgtggtggcacttgcctgtaattccagctactcgggaggctgaggtgggaatattgcttgggcccaggaggccaagctttcagtgagccatgatggcgccactgcactccagcctaggcaatagagtaagaccctgtcttgaaaaaaaagaagaaagaaaaagaaatatgtgtggatagaagtttatgggttgaaattttgtgataagttttatatggaattcagagatgctataacataattcctaccctcaagaaatatggctgggcgtggtggctcacacctgcaatcacagcactttaggaggccgaggcgggtggatcacctgaggtcaggagtttgagaccaccctggctaacatgatgaaaccccgtctctactaaaaatacaaaaaattaactgggcctggtggtgggtgtctgtaattccagctactcaggaggctgaggcaggagattcatttgaacctggaggcagaggttgcagtgagctgagatcaggtgattgcactccagcctgggcaacaagagtgaaactttgtctcaaaaaaaaaatgtgtatattcacagaccagatgaggcagtttgtaaatattgcagtaaatgtcctttcataaatgccatttgtaatctaactagaaaacacttaagttttagagaaataagaggttattcccagatagggcaatcatgagaactttatagaaggagtggcatctgagatctgaagtatttctttggaaagtggatacggttttcagattgataacagccacaatgacagaaatgcctaaggtgtattgtggaatgatgattaggttattttaagtagagcagaaattttgtcagtaggagaaagaactggaaaggaacatcacactagattagagagagttgaataccctctcccaaaagaattttaatttgtatggtaggaaatgaagagcatttgaagggggtaggttattggtcctttgtctaaatatgcaagaaagggtccagaactgagaggtgggagaggaatatttgatgttttgttcatttatgcacttaacaaaaagtcttgccctcacaaagtttatattctaatgggaggaagatggaatataaacatgttaattgaataacatagtatgttcacagtcacaagtgctatggagaaaaatagcccaaagaagggtatagagaaagctggcataggagtgggaggtatgtgaagttatagagtacaattctgagcagaaacctgtagcagtaggaggatgtgccatgctgatcccaggggagattattccaggatgaaggaaaaagcaagtgagtttgggagagactgaagaataacaaaggggtttaatatagccagtactaaatgagcaagagagagaatcattgtttatgagcagagtgggcagccagatgattaggtcgaagcctttcgagagcatgaaataaagacttgttaaggcttgaaaagcagtcagtgggtggaaaaaaaggtaagtaccacacgtgcactgcatgcgcgtaaaaacgaaacttttacctggctgactgttgcatttgaaatgagcagttgatggaagcrtcagcaagtaggcagtcagaaatccaaggaggcagaatgggaagagtgaagttgagaagtgttgtggcactaagtgaatggcatctcttggttgcagagaaagggtaatgctcaagtggtacctgtggggtggatagcctaattagtgagtgtggattaggtttgactttctggcagcatcagtatagaatgaccattttgcgtttggatatagattatttaagatactaatggtatttgtgtagatagccaatttactcaaatctttttagaattaaaccaaaaagttcatttccctggctctttctagatctccacctctctaaactttacatttgaaggttcttcggagccttaaggcccctaagcgtttggtcagatgtgataacccctgggcatggcattgagagttaggtttgtatctgttattgttattttgaaaaggttcaataagagcagaggctcagctgtggtaagaaagttgtttttcaacacttttctttactttccagagtatgaatagcagcccattagtaggtccagagtgtgaccaccccaaaatcaaaccttcctcatctgccaatgccatttattctctggctgccaggtaagtctgctaaagctatattttgtacagtggagttgttacttgtaaaaagcttacttgcagaaaattgagaaaacccagaaaagtgtaaaaaagaaaataaaaatctctgcaccatgtagaaatgattatattttatgttttagagtatttccttcttttcctttttctgcatatgtgtacctagatctgttttgctggggcctgtcaattttattaatattttcaaggaagtaattttggatatctgccatctgtttcattgctctgcgctctttattcttccagctttctttaagtttaatttgctgttttcctagcttcatgaaatggacgctgtgttgatctgctcaggctgccatgacaaaataccacatattgggtggtttaaatagcagaaatttattttccctgagttctggaggctggaagtctgagatcagggtgcctgcatggtggctttccggtgagggctctcttcctgcatctcactatgtccttacatggccatcctcagtgtttgcacagacagagagagagagagagagcacgcacaagctctctggggtctcttcctataaggacaccaatgctactgggtcctcctattcttatgacttcattcaaccttaattacatccttagaggccccatctccaaatacagccacccctcagtatatatgcatgcaggggattagttccaagaccccagcatataccagaacgcacatggtcgggtcccacccttggccctgtggaaccacatatatgaaaagttggccctccctgtatgtgggctctaatgaatactgtatttttgagccaaacttggttgcagtcagggaacccaaggatacagaagcctgactgtgtttattgatgaaaatctatgcgcacactgagaataagggcttcaacagatgattttagggggaacacaaacagatgttttacggtattccacccattttgatatgtcatattttcattaagttcaaaatacatactttttctatgtgtaatttcttctttaatttatgagttactcatatgttgcctgattttcatacatttgaaaattttctagttatccttctgttactgctggctttattccaatgtggtcagaaaccatactgtcagctagtttatggtaaaatttggtaatttgtatcaccctcagttcctaagaatgtgtattttgcagtttttgggttgtagcattctatataagttaatgaggtcaagtttgttaattgtgttaaatcttgtatctccctagaatcttttttaaaatttctctgctattggataactgagaggagaatgttaaattctccacctatgactgtggtttttttcttttccttttagttatatttatttgtgttatctgtatatttagcctatgtaattggggtacatagaaatttagaatttttgatactaagtaagtttttattataaccmaatacctcttttactctgtagttctatttcttgcctgccttaagtctgctttgccatatatgaaagtggctacatcacctgtcttttagtatttgcawaacctctgtattataccatttcactcctctattttttttttttttkgtaatatggaacgcttgatgaatttgtgtgtcatccttgcatagaggccatgataatcatggtaatcatctctgtatcgtyccagttgtagtgtatgagctgctgaagtgagcacaactccttctattctttaatagttatcaagagattccatcatgcactcttgacttactagagtttgtttcatttatttatttaaagatagggtcttgatctgttgcccaggttggagtgcaaaggctcaatcatagctcactgcagcctcaacatactgggctcaagagatcctcccgcctcagtctcctgagtaactggggctccaggcattcgccaccatgcctggctaggtttttaattttttatttttaatagagacaaggtctagctgtgttgaccaggctggtcttgaactactggtgtcaagagatcctcctgtctcagcttcctgaaatgctgggaaatacagatgttagccatcacacccagcctacagagtattttaaatcagcatctctgtttgttgcccaggctggagtgcagtggcgcagtcttggctcactgcagcctaaacttcccaggctcaagtgatcctcctgcctcagcctcccgagtagctgggaccacagatgcgaactaccacactmagctaatttttgcattttttgtggagatggggttttgccatgttgcccaggctggtctcgaacttctgggctcaagaggtttgcccgccttggcctcccagagtgcagggattataggcgaaagccactgtgcccagcccacttttaattttttaaaaagatacttggctgggcgcagtggctcacacctgtaatcccagcactttgggaggccaaggcgggtggatcacatcaggagattgagaccatcctggctaatgcggtgaaaccccatctctactaaaaatacaaaaaaattagccaggcatggtggtgggcacctgtagtcccagctactcaggaggcggaggttgcagtgagccgagatcttgccactgcactccagcctgggcgacagagcgagactctgtctcaaaaaaaaaaagagatactttcactgaatacagcatctatttttgttttgttttgtttagtatgttttgttttgagacagagtcttgctctgtcacccaggctggagtccagtggcacgatcttggctcactgcaacctccgcctcctgggttcaagcgaatctcctgactcagcctcccaagtaattacaggcacacaccaccatgcccagctaattttttatttttttattttttagtagtaacagggtttcaccatgttggccaggctggtctcgaactcctgacttcaagtgacctgcctgcctcagcctcccaaggtgctgggatttataggtgtgagccactgcgcctggcccagtgtagcatctgaactgaagttgttttctttcagcagtttaaaaatatcattccactctcttttggcttccattgtttctgttgagaaattagccgtcagccttaatgttactcctttaaaggtaatgtttcttggctgtgagtggtggctcacgcctgtaatcccaacactttgggaagccaaggcaggaggatcacttgagtctgggagtttgagaccagtctgggcaacatagtaatactcccatctttacaaaaaatatcagccaaccatggtggcacacgcctatagtcccagctactggggaggctaaggtttgctggagcccaggacgttgaggctgctgtgagctgtgatggcactacttcagtccagcttgggttacagagcacgaccctgtctcaaaaaaataaaattgaaaaataaataggccagataaataggccaggtgtagtgcctcatgcctgtaatctcagcattttgggaggccgaggcaagcggattgcctgaactccgggtttgagatcagtttgagtaacatggcgaaaccctatctctatgaaaaagatacagaaatgtagctgggcatggtggtgcacacctgtggtcctagctgctcaggaggctgaagtgggcggatcacctaagcccagaaggtcgaggctgtagtgcgccatgattgtgccactgcactccagcgtgggcaacacagtgagaccgtgtctcaaaaaataaaaatatatatttttaaaaaaatgataatgcttattttcctagctgcctacaaaacgttttcccctgctctgggtcccagcagttttactgtatcttcctttgtggttttgtttatatttatcttttaatccttcataagttttcatactttttttttcgagacagagtctcactctgtcacccaggctggaatgcaatgctgtgatctcagctcattgcaacctttgcctcccaggttcaagcagttctcccacctcagccaagtagctgggattttaggcatgtgccaccatgcctggctaatttttgtatttttagtagagatggggtttcaccattttggccaggctggtctcgaactgctaatgtcaaatgatccacctgcctcagcctctcaaagtgctaggattacaggcatgagccactgcaccctggcctccttttctttttcagacactaactagaaccaaacctccgtaagtttggtaaagtttatttagtttgtgatatgtttaatcagttttaggacattgtcagccacttttcctgaaaacagactgaatattgcagtccctctttgtcctcctcttctgggactaccttttccggaatgttagaccttttcactatgtctccgagagctcttatgctgatgtcttttttttttttyccattatttttttcttggcatactttattttctttttttcttttctttttttgaggtggagtcttgctctgtcacccaggctggagtgcagtggcgcagtcttggctcactgcaagctccgcctcccgggttcatgccattctcctgcctcagcctcccgagtagctgggactacaggcgcccgccaccaagcccagctaattttttgtatttttttagtagagacggggtttcaccacgttagccagggtggtctcaatctcctgaccgtgatctgcccgccttggcctcccaaagtgctgggattacaggcgtgagccactgcgcccggcctattttctttgatttttaaatttattcagcctccctagtaactgagactatagatgtgtgccaccacacctagctaatttttgtattttgtgtagatacggggttttgctgtgttgcccagttttatttttcgatacagttgctyctcaacttaagatggggttatgtcccagtaaacccattgtaaattgaaagtgcattttgacttacagtattttcgactgggtttttccaaatattactccattgtaagtagagaagtgtatttgatgtttattacttttgcaccmttgtaaagttgaaaaattgtaagttggggatgtctgtgttgtatttttaagttctagtatttccatgtgatttttaaaaatgtatcgattccatccttttttttttcttttttgagacagagtctcactctgtcgcccaggttggagtgcagtggtgcagtctcggctctctgcaacctctgtctcccaggttcaagcgattctcctgcctcagcctcctgagtagctaggattacaagcatgtgccaccaccacgtctggctaattttkgtatatttagtagagacagggtttcaccgtgttggccaggctggtcttgaactcctgacctcaagtgatccacccacctttgcctcccaaagggctgggattacagacgtgagccatcgtgcccatcccatcttcttttttttattgaacacataaattattattttaatggccatacgtaactccaactctgtccagcttggcaagacagccaaaatatctatttagcttttcarttgctgctttctgcttgttttctcaaaatctagccccaagcgtaaacagtttagggatttgtaatagctctagggaaaattgctggcatttcaggtatacttctctgctgttccctcctctgtattttttggtcccttataccttggctgtcattataccccaaaattcctgtctcttcttagtctgttttctgttgtcataacagaatacctgagattaagtaatctataaagaaaagaagtttatttagcccacgcttttggaagctggaatgttgaaaagcatggcgctggcatggtgagggccttcctgctgccttgtaaccaggcatcagcatatgaaggtggtaactaagtttccaacatgtgaaactgggggacatatttaaatcgtagcattctcaccagcccattgagactactttaaacgcctagttcaaaacccctaatayagggcttactctaatgtattctttcttgaatcttagcctgttaagtcgtggctgcctggttgctctccagtgtcttctttcttttaaagcatatattgccaacatgctttgtgagaaggaggttcaattatgtattttatggactttattaacagagaattataattaaaatttttaaaagttaggcacggtggctcacgcctgtaatcccagcactttgggaggccaaggtgggtggaccacttgaggtccggatatcgagaccagcctgggcaacatggtgaaaccctgtgtctactaaaaacacaaaaattagctgggtgtggtggcgggtgcctgtactcccagctacttgggaggctggggcaggagaaatgcttgaatctgggaagtggaggttgcagtgagccaagatcacgccattgcactccagcctggacgactgagtctccgtctccaaaaaaaaaaaaaattattgcctttttaatggccctttttacaaaaataatacatgttaactaaaatttagaaaatataggtaagcaggctgggtgcggtggctcacgcctgtaatcccagcactttgggaggccagggctggcagatcatgaggtcaagatcgagaccatcctggccaatatggtgaaaccccgtctctactaaaaatacaaaaattagctgggtgtggtggcatgtgcttgtggtcccagctgctcggtaggctgaggcaggagaatcgcttgaacctggaaggcagaggttgcagtgagcctagatcacgccgctgcactccagcctggtgccacagtgagactccgtctcaaaaaggaaaaaaaaaaaaggaaaaggaaatataggtaagcaacactgaagaaataaatgttacctgtahtactacctagaatcagacaatagttagcaatttgatacatgttcattgccattcttccttgtatgaaatcatatkgtcattgctggttttcactaaaaatatcttgaacatctttgcatgttattacatattctgttgcaatgattttcaaattatttcacgattatacatcagtgtaactaaagtggaatctcagtttgtaaaatagataagaacagatctattgtagtagaagcagcagtaggcttccgtggctccggcttggaacctctaaggcacttggggacacagttgtgtggttcagtatttattcagtacattattatttggtattgaagttattgcctaattttccagcattataaataatgctgcagtgaatgttcttgatggtttccttagggaaaattctcagaaatggaatttctgagaccaagagtatgcatgtttggtaaatacttttgttgaattacacaacagaaacgtatcaattccttatttctacagctctgtaacmaagtacccattcatttccctacaccttcactgacaccgtgtggccaaataccacattaagaacmaactagggatgggtggggtgactcaggcctgtaatcctagcattttgggaggctggggcgggaggatcacttgaacccaagagtttaagaccagcctgggcaacatagtgagactctgtctctacmaaaaaaaaaawtttttttaattagcctggtattgtggcacatgtctagtcccacctactgaggaggctgagttgggaggatcacttgagcccgggagatcaaggctgcagtgggttgtcatcatgccactgtgctccagcgaaaaatctaggtgtttctttctgaatatggactgtcctcccgccatctcattttattgtgaaaagttacaaagatagtaaaggtgaaagaattttacagtgaacacccatatactgatcacctggattctacttttagcattttattatacttgktttatcagactatatgtctgtcttttgatgttttcaaagtaaattgtagataccaatacacttctgcctcagaacttcagcatgcrttgcacaaatcttaagtggatatttcccattaacggcaaaaaacacaattacttttgcaccaacctaataaaagtaatatgtagatataagaaaaaacctcaagtgagattaaaggggacttctatgttctgtgttaagtttctatagcacttatgtgtgtattataaatgtgttgcttttataattaggaaaactaagcatcaagcagacaaacgaaagagatgctccttgtagcatctttaggatatgcaaaaataataggaagggaggagaaacacaaattcacactccaagaagtaggtttttgtgtgtctttttttcccccctacaatttagtggggtgtttttgtatttcttgggagttttttcatttcatttcatgcggtggcagaagtcttgtttccaaagtttctgggtgaaagttacatgtggatataacagccagatccttgatgtgggagtcagtagatctgggatctagcctcagaatttacgctaactgcggtcgctttatctctctctattttaaatttttcttatataaaacaaggagtttgagaaagcttttgacaagctatgcattccttgaaaccataggtagagtttagaattggaatttagtttacagttctaacattgtcagaaaaaatcttgccgtttctctaactctagggcctgggactctataatgaaacttctgtgggggattaggactaaccagtatctcaggtgattagcccagtatatcacctctgaagcataaaagctgcacctttggtcagttgaaagtgacatttttagttagtgtacttttgctaattacttgtcttggtcagcagaaataatagttccctaggtgacatgtattttgctctgttcaatttgagttatgtctgtttttaagccatttattttatacttcaaagtttactggtttgttacttctttttctattttttattcttcatcttccagacctcttcctgtgccaaaactgccacctggggagcaatgtgagggtgaagaggacacagagtacatgactccctcttccaggcctctacggcctttggatacatcccagagttcacggtaggttcacaacaaccctttttgggccctatacctttatgtgggtaattgacacccttcacctgcttggcttgctacctgcacatactgttatccagtcagattaaagcagaaagataaagataaatctagcccttaatggtttaagccttttgtagctgtaggtaattacacttatgttttctcagcaacatgagaacctcaaaaacacatacacctataacttgccacaagagtcaactttaacatttattagtgatattggcaaaacgagaagatgaatcttcataagtttatagataacagttctatttccaaagatcattatggcactttccttctggttcagagcatgtgattgcgaccagcagattgatagctgtacgtatgaagcaatgtataatattcagtcccaggcgccatctatcaccgagagcagcacctttggtaagttgccattctgctactttaaaaatcattgatatgtcataggaatsaacatgtaatatttggcaattgagatagcttgatctaagctcaaaattcttctgtagctgggactacaggtacgtrccaccatgcccggctaatttttgtatttttagtagagacggggtttcactatrttggccaggctggccttgaactcctgacctcaggtgatccacccctcccaaagtgctgagattacaggcgtgagccaccacgcccagacaaagctgaaaattattttcagtaatctttggcaaaatatctttgacatgggcagtaaagtatccccaatcctttatttcctactcacactgctggttccttttgtgcttttctttgtccttccagggcctagagacatttgtgttctatactctggacctgtaagctccttttttttctcattgcattgatgaaattcttttatgtgggggtggtgaacactcaattcccatgttaactagcctaccagattgaaagttcaagaagcctgctctcacaggatcctttgctgatcttccaaggtggaatgtggatagaaatgtttattgaatgatctgagatgacactggagtcattggcatcggtggctattaaccttgtcaagaataacctttggcatgttcaaaaatgaaagctgcagtgttggtgcagattttattttctatttttatctctgyttacatggtgtttggcccacagtagacaatcagtaactgttgaatgagataaatgattgcatacatgtaaaaatgaatggctgccccgtattgaaatgtattagaagatgaagtgcgtcagaagaagataacatcactcatttttctccaggtgaagggaatttggccgcagcccatgccaacactggtcccgaggagtcagaaaatgaggatgatgggtatgatgtcccaaagccacctgtgcyggccgtgctggcccgccgaactctctcagatatctctaatgccagctcctcctttggctggttgtctctggatggtgatcctacaacaagtgagtctccagactactttgggtttgtcctgaatggcagtgtggcctgtatgtttatattgaaagggagatgaccttctctggtgacagtaagtcagtatgtaggctaaacattatgtctaaatgggaggaaagtcccaagttaggaagttagactgtagtcagactctttaggatttttgcagacttagaaaagaggtcattccttaaactctggctcttcttatgttaggggtaggtaggatttatagtttctctgagtatgccttatgacactggtaattaggcttgatggctcagagcacacattcctttttcctgggctctgttccattggaaagaaggcatgctagctctggaacacacactgaatgggcctggagccagcccatgttgggccttgactactggaggctgctcttcttgcacctgtggctgcctggtagggcagcagccagagttgctgtcactttggaattgaagacagccttcaggacagacagctggtgaaaaagaatacagccttcgcttgcccagacgagcaatgtcccccactcagccttggctaatgcttcttcattgcaacttatatctgtctttttccttatttgtagaaggcgaagtttagtatctttggtcccctcagaattaaaacagacaattacatgtgcacaaacatgttgcttagtgtaaagcatgatgcagatgtttatgattgcagtggttattgttcataggacaggtgcatggtatatttagaaggttgtttttattgtgatgaggaggctatatcttaaaacccttgaacctgtaaaacccagccttgtgactgaagagcacatgtacccagtttacaggaagtcagtaatatcttgatattagyacatttttattgctgttgttaaatgaggatttccccagatttgcaaatattttctttcctatttcttctagatgtcactgaaggttcccaagttcccgagaggcctccaaaaccattcccgcggagaatcaactctgaacggaaagctggcagctgtcagcaaggtagtggtcctgccgcctcwgctgccaccgcctcacctcagctctccagtgagatcgagaacctyatgagtcaggggtactcctaccaggacatccagaaagctttggtcattgcccagaacaacatcgagatggccaaaaacatcctccgggaatttgtttccatttcttctcctgcccatrtagctacctagcacaccatctccctgctgcaggtttagaggaccagtgagttgggagttattactcaagtggcacctagaagggcaggagttcctttggtgacttcacagtgaagtcttgccctctctgtgggatatcacatcagtggttccaagatttcaaagtggtgaaatgaaaatggagcagctagtatgttttattattttatgggtcttgagtgcatttgaaggtgtccttcagttcccacgtagagagagtgtggattatattacatgataacctacctggggaacagtccagaaagctatagaacaagtattttgctggaaatcctaattgaggacttaagacttcctgggttaaggatgtggccgtgtgtgtgtgtgtctgcctgtggttgtatgtgtccttgtgattataagattaacctgctgtgtgtgttaattccaggcagggaattagcacaaaaggtttaggaaggaatctttttttaaagacttccatctactgtggtattatacccaagcctagtgtgtattacaacttcaacactcccctttggcttatattaccatgtgcatagctaaagtcttctatttttagaacaccttctgtctgttctttccccatcaactccttcctcatccttcttggtgttctgtcatgggccatgggcttgctatggccagccttactgaggccaagcagcttatgggatgttctttattgtgtgtgatggtattggtttgtttggtagataagtgggaggaaaagtactgttgctacactattataggcatgtttgatactagcagctaacactggtcactccaaagcactgtttctataggaacattgaagctattaagatgttttgattatcctaattacataatgaccgatttgagatagaggcctttaaatacattccatgccctccccagaaaatagtctgtgggagtcagttgccttggtgccaggtatgtgttctgatgtaggtcatgagtctttctacttaatgggaagggaagaacatttgtttccaggatgactttctggccagaataccggaaagcttttaggaagcttcgttcacatgctatttaaatgcacaaaatagacagtaaggatttatctgttcagtttttcttcccagtgaattaatttcagcttatatgggtgtcttcatttgaacatgaggaatattaggttatattttcagcagtggttttttcctttgccctttaaggagtggggataatgtccacggtggcccagcctcttgctgatggcaccttccctgcattgctgcctcccgatgatgtggttcttttcttgtgcctgtggctttgggaatgtaacatctctttcctcctttccttcccttttcctcttcacctgaggtcctaaatactctctgtaattactgtgttcttcacggtaattagacatcattcagtgaataaattactgtagtcaaagacagtatgggctggcagtttgtgtaattgcaagttcataaagagaattgagggtccagttgggagaactattagtcagttcttttatatgctgataaatgatccctcgagttcagttagtattctgtccagagtgtttagctcactttcttagcagtgtgtaagctttctccatgtcagaagcaagcctgctctttgataaatctgtcttcctgaaaatctaaatcatgcttttgtctttagatctacacagaaatgaccctccttggatcagttttctttccagtctaatcatctttggaactaaaacttgttctaactcgtctcttggcattcagctactcctagatcttttggttttatcccctggcctcagagccatttatattcccagagtaggcagtacaggatctcgtgttgatttgctgtggttacccagtgtcttctctacatggcataaagcggcaaagcccaccattaggtgaggcggtcccgagttgaggtagagtggggcagaggaagatggcagtgaatatcaaacagtagaccgccatcaacttctaacagccagtacacacactgtttcattttgaggtaacgttcagttttgcattttgtttaaatattgaaggcctagacaaagaactagaaaaaaaaaagcagtttccaggcccatccatattgtaatttttctttatctgcagatattgcctgtagtctaaagatctctttggaagacaaagcattggctatatatcttttgccttttccatgcatctaaatcttctctggagattatctccctactgtgtaggttaagggcagtctcgacttttccttttttgagtcctgtgtggctctttgaatcagcgtgaaactgaggctccagctccctgtgttgtgtgtgtgtgccatccatgggcttgggtgtcagtttgtcacaggtatctgccagcattcaaggttttggatcatttcatgaggatctttcctttgactgggtgctgtgaggacacacctgggtctgtgcctgagattgccaggcaagattaaggaaagttttcatgtggcttttgttttgaggttattctcaaaaccttaatttcttatattttctgttgactaaggcaccagtaacccattcttcaccctccatttgtatggcaatttaaaagtctttggctttgctctgaatttaattaaaactgccttttatgaacagacttcgagttttgccattttgggcaagcccttccgcttgtcccttcctagtggctaataaagtaaaaaaacccacactactttgttctctttttctcatattcattgggctgttgtattcagccagtctcatgctttccctgggtcttcacggattgctttccaagctgccttgttgcggggttgctgcagagcagcaactggacctttccagctgtcgccatgttccttccactaaagtagagggttcttaaaatggaaaaacctgtgggctcttcatatacctccctttagttaagtaatagaccaggcagcttctcatctcagcatttacctgttaatatttttgtgaatagtgctctctacctgtgggtggccgttctcttccacttgctcgtctccccccagccccattctgcataatctaccattcttctcctctctttctcttcttatacagaccctcattactggggcccaagatgtgggatactactgttagtattatttaactattttgtagatttaaaagatttctggttaagggaggtgggggtcactgttcatcactcttaaaatatgtgttttctctatagaaaagtaaaatgtgtttatggtcccaaacagtcaactcacaaatttttataacaaaatttccttgtaaaaactagggaccatctatatattccctttaagatctagttctttttgtaggtgttcagcaatggtgataaagcagaatattctcctacctcacgtcattaaagtcagaagattatagaccttctcaaactataagtccctcttcttgccgttggcctttctgactctggaatgaccactgttcattgaaaaatagttttctgactattggtctggctctaacagtttgtttgttcatccagcaaatgtttatgagtgatgaccatgtgccagaaatgtcaggtatgtgtccttcccttggcgccacatagtagtttactaatgtttgggggattgtacttggactgtcatagcctctgcgtttgaccttaaaatagctcttcccagtaagattgtgcaatttttattcacagctcttccatgtagacttacctttcctcatagagctatcctggttaataacaggccaagattctcccattatcccctgttgtctcctgtagctttgataatgcctgggagattccttggtgtaagtgtcatggataccgactgtttttatgttggaatttgttccaacataattagaatctgtttggtgagttgaaaggtaagttggctcagagttgcacagtagggcattaaatgtttaagcaaagcatctgcccacactcccctttccaatctagtgccttccttgaactttttcctgagctgctacgtccctaatcccccttgttgggaggattttcgtatcacccttatgggacctgtcaccatgtcctgtactatttggaattggttttccagtctttcaacaaccgttgtggctaactatgttttagaagggctggaggtgtgggccctgtcttcgggtctcaggacccaaagatcctttagtcagttgttgggtcttccaagagccagacattaatacagattgaactccatcagtcccctaattgtcagcctttacctccctcccagagcaaggagtttagggattctaaagcttagtgtccacacatcattctaccagaccttagagctttagaagctcaatctaaaatactgtaactcagcataaactattactatcactcctttgaactcagtctccatgagcagtgttttgttggaaatacatagaacggcttaatgcctagagggtggtggatagtgaaggacggtcaaggttatatttttgactgcttagggattctttggatacaagaaacagaaatgttcaagcggaataaaggagggagtggagttgtggtaaggatgcagggtatttcgcagaacccaggacgggaagtgcctttggttcttgggtggagctggaactgcagagctttgcacctagtcctttctcccgcttcacagtctgcttatggtatatgtggcccccaaataggcactctagtcctcaagtctacaccaccttccaactctggggatcaccatgaacaaattctcaatttcccatacttaattttttttttttttgagatggagtctcgctgtgtcgcccaggctggagtgcagtggtgcagtctcaactcaccacaacctccgcctcccaggttcaagcagttctctgcctcaacctcccgagtagctgggattacaggcgcctgccaccatgcccagctaatgttcatatttttagtagagacagggtttcaccgtcttggctaggctggtcttgaactcctgaccctcatgatccacccacctcggcctcccaaagtgctaagattacaggcgtgagccaccgcgcccggcccatacttcgtattcttaaaaaaaactacactcagcccagcacattgatcaagtatctatctctgagcagttggccttgccagggagagcagagatgtggcaggctccttcagctggagacagggagcttctcagagaagtgagcagagactccacagacaccctaaaaaggcttctactcaagaagtaaagccactactcctgcctttttgcttagtggacaggaaggcacaggagtttgtctgggacatcatagaaattcttaggtttaacttaattctggtcattgtcttctttatttcctgtttttcttccctttgtcagtcttcgcatccaagatttcttccctccctcttgtgggccagcctgtcctgttccagagctagcctgttcctgggtagccttccttagcctccattcagcctcaggtcttttgccttcttccgtgtttatttagagagcagaatctaataacgggttccactgtagccactatccatggacttctgggtcctcttcaggtttgagtgcttgaaaatgttcattctctgggcttgtggcctgtctcctccactctcctcctcaccctctcgctccttcctgtgtgagggccgctctgcagtaatgttctcaggcaagccttcctaggcacctcagaaactactttgccagagccagtaagaatatataatattggagcagttgccaggatagaaattaaatatagattccagtttaggatagagtttttaccgagagctctttagacagtatacctgtgtcttctctggcaattgctttcattttagtcctatataaaagctttccttttctgtttttttttaaaactatgcttttgcttgcctaaatcttttgatcttatatttctctcatctcagagcctgtcctgagttgtaaggtatttcatactgccttacttaaaagttttttaaactactagagtcatttgatacacacagaagttacctaataatccaaagatgtccatcaagggaggaagggtgggtcatcagactttgcctttgatgttgtagactaggctcctgagttaagcagcagagggacagcagtgccatgtgccttcactgtgtcccaggaaatctgggttggttccagtgggaaataccagtatttcttggttctggaaagtagcaaaagagtaggagatggggaaatagggatggggagagcaagccccgcatgtccatggcgagtcaggtggggagcacgggtggaagggccggctgttgacagacagactaagctgtgtggtgctcttgccgccccttcctgggtacagagcttgagaaaaatgcagccgaccactccctgtgtttgtacagagcaaagcccaaaagccaacctcagatctcctgatttggcagctgaagaaatcagcagagtcctgattgcctgattcagtcccaaaaatgaatgtcaggccccgccccctccccaccaacattgcctct

SEQ ID NO: 93232 - DNA, 75007 bp, Homo sapiens
ttacatttttgatctaatttttaaaaatgttttaccatgctgcacgttagacagccagggacccttagtaacaaggcacaggagccggtgtgtatccagcccttgctgtgcagtgggcactgtgtggtcatcagcgtgtcactcatagacactcatttaatcctctcaaaatccgtaagacgtagtgacacaaacatctccattttacggtgaggatgtagagccctagagagcctgagtaactgcccctgcatcacgcggctcctgagagttgggagctgggattggaatcccacagtcagattctagaacccataccctggcgccgtagttcagcctctcagcccgaattaccgtcattatcgtaacggctgtagcaggtggcattttttttttttttttttttgagttggagtctcgctctgtcacccaggctggagtacagtggcgcaatctcagctcactgcaagctccccacctcccggattcacgccattctcctgcctcagcttcctgagtagctgggactacaggcgcccgccaccacacccggctaatttctttttgtatttttagtagaggcggggtttcaccgtgttagccaggatagtctccatctcctgacctcgtgatccacccgcctcggcctcccaaagtgctgggattacaggggtgagccaccgcacccggccaacaggcagcatttcttgagcacttactgtgcccgggtactgttccaagcactttgtcaacttgtttaatccttatgacaacccatcgttcggccccgtcatgtggatcaggaaacagtccagagtggaggagggaggagactgagcagggggtcgctggggctggaccgcaggagtctccatcccgcttccgcaggtggatagtgacaagggcatctcccttcgcttccctcggtttattcgagtccgtgaagacaagcagccrgagcaggccaccaccagtgctcakgtgaggtcctgggaagcaggggtgggccgcccagctgcttggccctaccagctttttagcgtggtggcctctctggaaccttgtggaggtgggagcagccagggagcttctgaccaccccgtcccaccctctctccgcaggtggcctgtttgtaccggaagcaragtcagattcagaaccaacaaggcgaggactcaggctctgaccctgaagatacctactaagccctcgccctcctagggcctgggtacagggcatgagttggacggaccccagggttattattgcctttgctttttagcaaatctgctgtggcaggctgtggattttgagagtcaggggaggggtgtgtgtgtgagggggtggcttactccggagtctgggattcatcccgtcatttctttcaataaataattatcggatagctactttgtgacagggtctgtgctgggctctgggggcaaagctgtcatgggtgtcacctgcatagcatgtagccatgtagccatggcctaggaactgccagagccagtgccagccatggaactgcctgcagtggtgggcgtcttctctatctgctctgtgcagtgtgaccgccactggccacctgcaatgcccgagcccttgacaggtggccagcatgacagaggatgcgaatttgttttgttttgttttgttttgattttgttttgagacagagtctcgctctgttgcccaggctggagtgcgatgatgagatctcagctcactgcaacctccaccttccgggttcaagtgattctcttgcctcagcctcccatgtagctgggattacaggaatgtgacaccacgcctggctaatttttgtatttttagtagagatggggtttcgccatgttggccaggctgatcttgaactcttggcctcaagcgatccaccctcctcagcccccctaagtgctgggattacaggcgtgagccaccacacccagccataccaaatattttatttaattgtattggacagcagtagtctaaaatctttacatacatatatttttttaacttgtttaaccttccagccatcccacagggaggcaccatcgtgagccctgttaaggaagacaaatgcagtgtcttaaaataacacagatgtattccctaaacagtttcggaggtcagaagttcaaaatcagttttactgggctaacatcaaagtggtggcagggccggttccttctgggagctccaggagagaaactgtgtcctttttccagcttccagaggccacctggttcctaggctcatggcttcttcctccgtcctcaaagccagcagcatcgcacctgcaaatctctctcctgaggtcatcaggtcacgtcctctcctccatcagatctctgtttctctcttccaagtactcaagtggttacatttagggccccctggatgatccaggataatctcatttcaggatcctaactcaatcccaaagtccctttagtcacataagatcacacattcacagaggccaggcacagtggctcacgccttggggaggacttggggaggctgaggtgggaggatcacttgaagccaggagttcaagactagcttgtccaacacagccagacttcatctcctctaattttattaataaaattaataaaaatgtaaaagggccaggcgcggtggctcacgcatgtaatcccagcactttgggaggctgaggcaggtggatcacctgaggtcaggagttcgagaccagcctggccaacatggcaaaaccccgtctctactaaaaatacaaaaattagctgggcatggtggcgcgtgcctgtaatcccagctactagtggggtgaggcaggaggatcacttgaatctgggagacaggttgcagtgacccgagatcgtgccactgcattccagcctgggcgacagagcgagactccatctcaaaaaaaaaaaaaaaataggtcacatcaaaggtttcagcgattaagacctggatatctatgggggctgttattattgcagccaccccacatgggatgatatgttagaggaaaaccatcgggaaatggtcagacaaggcaagcaggatgcctggaacacccacccagccctgggcaccacggggctggcttggggaaaacggctgcacgcggagcggggcccaggctcgggtcttccagagcaggaggcctctaaccccggggcccagcgtggaacaggagcttccgggcatgagagtgtcagggtgtcctgatactcccgcaggggggacacagggctcccagctgtcccctgcccctcacactctgtttctgcctctcacatctgccctccctccttcccttctctctcatcaggttcctctgcccttgtctcccacccgccctctctccccttccttctctatctgcgaggctttgctctctgccgtgcaagtctgtgccaggcttactttgctgtctgtcactgtgactcakcctccctgtctctcttcctgtgtctccatcatggtctcttgtgcacacaatctcttgggcattctgtttctatttgttgtagcccaagaagacaacattgccttccgagtctccttggggctagcagtggccctgtagccctgtgtgggcagacccaggggacataagcacaggggctgctggggacttctggagaaacatctttcctgaccaaaaaggacagccctggttgtggcagctcctcccctcctcctgccttgactagagatgatggctggagccaagtcaccaccttgtaatgatgaggaaaaagagtaacaaactctcctgacgaccctaaaccggcgaacctagggcagcagctgcctaactgtgggcttttgttcatgggagtaggggaagaataagccccagggcgattatgccactctaaaacatggctttcagccgggcacagtggctcatgcctgtcatcccagcacttcgggaggccgaggcgggcagatcacctgaggtcgggagttcaagaccagcctgaccaacatggagaaaccccgtctccactaaaaatacaaaattagccgggcgtagtggcacatgcctgttactcccagctactcaggaggttgaggcaggagaatcgcttgaacccgggaggaggaggttgcagtgagccgagatcgagccattgcactccagcctgggcaacaagagcaaaactccgtctcaaaaaaaaaaaaaaaaaaaaaagacttgtttctcatagctaagagttcctgatacagctctgccttaaagaactggcaaattagtgtgcatttgtgtttcaatttcaaataaaatgtttaaggcaaaaaaaaaaagtaaatgttgtatgtcaggggatccccacattactggctttgtgtggagaccatggttcctttgggcttggctcttcctccctgcaccagtgcagggccccaggaacacatctgccacacacggccgccatgtccctctgctgaagctagtcagggtcatcctcactcctcagtgaccctcatgatggctccaccaggtaggtacttttattctccccatttaacaggtgaggacactgaggggcacagggatgtaagttaccttccctaggtccactatctaggaagtggtgggccagggtttggtccatgctgtcagctccttgaccctgcatctataactactaactatactatggagagcctcatgagctcctgcgaggtgtagaaccttatcccgcaggcggggcagtggcatggtcaggtctaggagtgaaaagatcctgcgatggttggagttgcgggcactgaagaggtgagcctggcgttagggggagcaggggagaccatcttccccctggtgaaatcctgttctaaaattggtgatactcctgccttggcctcccaaagtgctaggattatggcctcatatctatttttaaaaaataagaattcaagctgggtgcggtggctcgcgcctgtaatcccagcactttgggaagccgaggcaggtggatcacttgagttcagcagttcgagccagcctggccaacatggtgaaaccctgtctctactaaaaatacaaaaataattagccgggcgtggtggcagatgcctatgttcccagctactcgggaggctgaggtaggagaatcgcttgaacccaggagacggaggttgcagtgagccgagattgcaccactgcacaccagcctgggcgacaaagagtaagactccatctcaaaaaaaaaaaaaaaaaaattcaaaacccatcgagttgggatgacgcttagtgctgggcttcaggaagagtaggcaggagggtagtatgggaggtttctaggagccactcttggaagcggtgctccccacagatgcccgattgcactgactggaactcggtcacatgaccacataactcgctcacatgaccacacctagctgcaaaggtgctgggaaatgtggtaccctgttgggaggccacttctgggcttcaaaccttcactgtgaatggagctcacaggttttctaaaaatggacattaaatgaaccagagttggccctaaggatctggctcactgcaacctccacctcccaggatgaagcacctgcctcagcctcccgagtagtagctgggattacaggcacatgccaccatgccgagctaatttttgtatttttagtagagaaggtgtttcaccatgttggccaggctggtctcgaactcctgacttcacatgatccgcctgcctcagcctcccaaagtgctaggattacaggcgtaagccaccacgcctggcctcaatatttctttttctgggtatttgagtatgatattatatatgatggttattagacagccagatgcataggaggattagctaatctgttttgaggaatacttatctccaatatagttatataacgacaacattctttttttgaatactggtctcgggtgcctaatgacagaagggtgacatcactaaggaagcctggaaagtcccagccctccacgtgatcccacggatgaaaatagctccgggtgagctctggaacagctgaaaaagctggagcaaccaagcagggcctacaagccgaggagggctgtttaaaggcgcaggggccattttaccctccaggttggccctgctcaggaccaggaggaaacacctccagcccgcgacctcctcccacagggggaaaaggaaagcaggaggaccacagaagctttggcaccgaggatccccgcagtcttcacccgcggagattccggctgaaggagctgtccagcgactacaccgctaagcgcagggagcccaagcctccgcaccggattccggagcmcaagctccaccgcgcatgcgcacacgccccagacccaggctcaggcaagccgtgggggcagggagggctgtttcatcccgctggggcggccataaccaagtaccagggattgggtgcaattaaataacaggatttctttttcttttttattttattttattttatttatttatttattttttttgagacagcatctcgctctgtcgcctaggctggagtgcagtgacgcgatctcggctcackgcaagctccgcctccggggttcaagcgattctcctgcctcaacctcccgagtagctgggattacaggcgcacaccaccacacccggctaatttttgtatttttagtagagatggggtttcaccatgttggccaggctggtctcaaactcctgaactcgtgatccaccccactcggccttccaaagtgctgggattacaggcgtgagccaccgcgcccggctaggaatttattttctaacacttctggaagctagaagtccaagatcaaggtgttggcagggttggtttctcctgaagcctcttgcagaggccctaatctctccttataaaaccaatcaggctgggcgcggtggctcacgcctgtaatcccagccctttgggaagacgaggcgggcggatcctgaggtcaggagatcgagatcatcctggctaacacagtgaaaccccgtctcaactaaaaatacaaaaaattagctgggcgtggtggcgggcgcctgtagtcccagctactccggaggctgaggcrggagaatggcgtgagcccggaaggcggagcttgcagtgagccgagaytgcrccactgcactccagcctagggcacaaagcgagactccatctcaaaaaaaaataaaataaaataaaccaatcaaaccaaattccaggccaccctcaggaccccactttaacttagtcacccctttaagagcctatgtctggccgagtgcgatgactcatgcctataatcccagcgttttgggaagccaaggtggaaagctctcttgagcctaggagttcaagaccagcctgggtgacataacaagacctgatctctacaaaacataaaaaatttagctggagatggtagcatgtacctgcacttccagctactcgggaggctgaggtgagaggctcgcttgagcccaggaggctgaggctgcagtgagccacgatcacaccactgcactccagcctgggtgacaaagcaagaccctgtctcaaaaagcaaacaacgaaaaagaatcctatgtccaaatacagtcacattctgaggttctgggggttacaagtccaacatatgaatttggaggtggtggggggaagctgattaatttcataaggggggtcttgaaactgccttcgcagaaatgtaagtaatgagagaaagctaacatgactgaccatcttgtttctaacctcacaggctagatttttttttcttattctagtgcagaggccaaaattaccatgagaggaatttaattcatagttaaactttgagacaaagaaaactgacccccagtccttgttgagagattgaagccacattcatttactttttatttatttatttakttttgagacagagtttcactcttgttgcccagactggagtgcaatggcatgatctctgctcactggcacctccacctcctgagttcaagtgattctcctccctcagcctcctgagtagctgggattacaggcgcccgccatcatgcccaggtgacttttgtacttttagtagagataaggtttcaccatgttggccaggctggtctccaactcctgacctcaagtgatcctcccacctcggcctcttaaggtgctgggattacagccatgagccactgtgcctggcctgaagtcacattcataagacaaggttagaatcatgaaggtgctggaactttgctaaagaacagtcgtgggttgaagaatgacctgccatyccttagcttccttttctrtatgtgctccagagtcacgtaaccaggggtcgcatgatttataacttccccagctacttctataaataatatcactgtcgtgaaacacagaactcagctttttagtggggtgtggtagctaacacctgtaatccccacttcttgggaggctgaggcaggaggattgcatgagcccaggagaatgagaccagcctgggcaacatagtgagacctcaatctctacaaaaaaattaaaactttgccagacgtggtggtgcatgcctgtagtcccagcaacccaggaggccaaggcaggaggattgcttgagcccaagagttggaggctgcagtgagctatgattgcgccactgtagggaccagccctgcagggtctgtgggtctttctccccatgtgcggagacgagagatcgtagaaataaaaacacaagacaaagagatagaagaaaagacagctgggcctgggggaccactaccaccaagacgcagagaccgatagtggccccaaatgcctggctgcgctgttatttattggataataaggggcagagtaaggagtgtgagtcatctccaatgattgataaggtcatgtgagtcacgtgtccactggacagggagcccttctatgttaggtagccaaggcgtagagagagaggatagcttatgtcattatttcttttatgttcttttcagaaagatcaaagactttaatattttaatactttcactaattctgctactsctatctagagggtgcagccaggtatacagagtggaacaggaaagtgaaacaggagtgtgaccactgaagcacagcatcacagggagatggtcaggcctctggataactgcgggcgggcctgacatcactcaggccctccacaggaggcggtggagcagagtcttccctaactcccccggggaaagggagactccctttcctggtctctaggcactgacgcaaccgctagaccaaggtccgctaggcaatgggcrtcttcccagacgctggcgttaccccaagaccaaggggccctctagtggccctattcgggcatgacagagggctcacacttgtcttctggtcactcttgacctcaagtgatctgactgcctcggcctcccaaagtgctgggattacaggcatgagccactgctcctggcaataatgtttcgttttgtttttrttttaaaaaaaagaaattgtctttgagatagttttcagagtgagcattttggcagaccaagagctaccacctggtcctgagacccgctcccaggaactgactcagctatacaaagatagttttggacacacctgtgatttcatccatagccgatcaattgttccctcagccccttgcccaccaaagtttccttaaaaaaccctagtctcaggtcggacgcggtggctcgtgcctgtaatcccagcactttgggaggccaaggcgggtggatcacctgaggtcgggagttcaagcccagcctggccaacatggagaaaccccatctctactaaaaatacaaaaattagccgggcatggtggtgcatgcctgtaatcccagatactcaggaggctgaggcaggagaatcgcttgaacccgggaggcggaggatgcagtgagccgagatcatgccaatgcactccagcctggtcaacaagagggaaacttcatctaaagagagagagacagacagagacagagacagaggcagagaaagagaaagagcgaggaaaaaccctagcctccaaattttcagagagacgcgcttgaaatatttctcccattctcctcgcttggccgcccctgagattattaaactctctctctttgctgcaacacctgctgttcgcattggttttgtctgggcagtggacaaggagaacccatgagcccgtgacagtcccagccctcccccactgtctttgctaagcccaacagtgggcacaggactaagaagagccatttctttggcaggaggactgagaattttctgaccgcagtgcaccatgggaaggtaagtcctcttagagctgaccactatggggaagcagagcatttgtgtaatggaatgcatagtragtgtcaagaggtgagggctgtgacagttcctctcgcttggtggagatagatggaaagagctgaaggttgggcatggtggcccatgcctgtaaccccagcacttttggtggccgaggcaagaagatctcttgagccccagagttcgagactagcctgggcaacatggtgaaaccctatctctacaataaaagaaaatatttttaaaaattagccaagcatagtggtacacacctgtagtccaagctacttaggaggctgagacatgaggatcacttgagtcccggtgttcaaggctgcagtaagctatgattgcaccaccgcactggtggtgggcaacagagcaagaccctgtcttattgttgaaccggggaggtggaggttgcagtgaactgagattgcgccactgcactccagcctgggcaacagagcgagactctgtctcaaaaaagagagagagaaagagaaagaaagaaagaaaagaaagaaagaaagacagaaagaaagaaagaaagaaagaagggagggagggagggagggagggagggagggagggaaagaaggagggaaggaaggaaggaggaaggaaggaaggatggaaggaagggagggagggagggaggggagggaaggggagggagggagggagggagggaggtatgtcaccatgttggccaggctggtcttgaactcctgggctcaagtgatccacccacctcaccctcccaaagtgctgggattacaggtgtgagccaccgcgtctggccccaaaattaaccattttgaaaagtgaataattgactggcattcratgcattcacagtgttgtacaaccatcacctctatctagtttcagaatattttcctcaccccaaaaggaaaccatgtacccgtgggctggtggctacctgcttggacagcccagttctaggtcaaattctgtgttttatcccttttccctgtgaattttctggacttctttgtgttttctcctgggaagctctgaagtttccataattcctgggctccagaaagaagaaaaggcggccgtggagagacgaagacttcatgtgctgaaagctctgaagaagctaaggattgagsctgatgaggtaagtgaggggaggagggtgsccccagagatcccagaatcgccccctctgtgcccagtgtccagggcccaactcagccagggagagctggaccgaaggatatgaacttctatgggayagaaatagaaggatatgaacttctatgggacaggcattgcccctgcctaagggagatcctaggtctcctccttctcctcctcctcctttctttttcttttcttttctttcttttttttttttttttttttttgagacaacgtctcgctctgtcacccaggctggaatgcagtggcatgatcttggctcactgcaacctccacctcccaggttcaagctattcccctgcatcagcctgctgagcagctgggattacaggtgtgtgccaccacacccagctaatttttgtatttttagtagagatggggttttaccacattgaccaggttggtcttgaactcctgacctcaagtgatccacctgcctcggcctcccaatgtgctgggattacaggcgtgagccacggtgcccggccccaggtacccttcttcttgttcccacctccatcctcaggctctaaacctctgatcgattttctccccaatgcctaggccccagttgttgctgtgctgggctcaggcggaggactgcgggctcacattgcctgccttggggtcctgagtgagatgaaagaacagggcctgttggatgccgtcacgtacctcgcaggggtctctggatccacttggtaagcatcactcatgtttcagattgctttctgacacataaatgggattatttttttcctcctgacaccaaatgtgtgtggttttttccaacgctgcttctcgagctctctggtactarctgggtgtcctacaattctgagcaattctgacgctggctacctggagttcacatcagattccacaggtgaaaggggctcagtcccaaaaaactgctcccacttcagacacgagttgcaattacctagccgctggtgcttctgaccgactggcaatagtttggggtttcccacagcttccgcctcatgttcaataatttactggaatagctcacagaactcaggaacacactttacttacaattgctggtgtattacaaaagatgggccaggtgtggtggctcacgcctgtaatcccagaactttgggaggctgaggcaggaagatcgcttgagtctaggagtttgagacccaggcggggcaacatagcaagaccccatctctacaaaaagtgaaaaaattagccaggcgtggtggtgcatgcctatggtcccagctactcaggaagttgaggcaggaggattgctttagcctgggaggctgaggctgcattgagctacaatcacaccactgcacaccagcctgggtgacagagagaccctgtctcaaaaaaaaaattttttttttctaaaaaagaaaattccaagggttttaggaactctgcaccaggaagcaggggaaaacaccaagtatctttctttgctacacaaagccatggacaaagcataataatactaccttctgacattaaaggaggatttacatgttcaggtgcacttttcacactgcaggtggatagaatacagcccttttaacttatcagcctctatgataaagtattgcattaatccgtgtaggactgtctcattcaggaggccccagatggcaggtatgaaacactcatgtctgcatgtttgttgccaagcccagggcagacatgactaatcgatcttggcacattttcagagcaggaggtaaggctaggcagagcagcagaggctcgagtgtgagataggcagggcagaggcatgaatgttgagcctggctggcctgatttgttttcatttctgtgctcaaagtttgatctggagctgggttctgagctggatgtggaggatgaggttcmtggaggcgacagcatgaagagcagagctgcagagcttgggagtgggaaaggtcctgcagagtcacaccggacccctctattcctccaaggctcatctaacatgttgagtgacatggcgtgggggtttagcygtactgcacattgcagaactccagggggcgctattgagataggaaccccatgatttcttctggaatctttccgagactgctgtggttaaaaaggcaggcctggctggacacagggactcacacctgtaatcccagtactttgggaggtcgaggtgggaggatctcttgagcccaggagttcaagaccagcctgggcaacatagcaagaccccatctctacaaacaacaacaacgaaagccttatatttcaacagctttgggttagttcctggagctgtcctttgtgggctgttacgagcccagacatacttctttgtgccttggtttcctccgctgttgagcattgtaagtgtggacgatgaagactgggaaaggatgtgtgtgaggaggtccttcacaggaacgcctgcctcatggagagggcgacacacagaggaaatggaaaatttacatgaaataaatataactgcagaacggtcaagttcaaaggagcactcaaaatcatctgggacagtccttccatttcacaggcaggaaaatgagagcacgatgggagaaaggcctcatcagagtcaaatgttttttgcagccagcatttattaaaggtttacatgtgacagcaacaaactgtgctgatctcacaggrctgtttgagaattaaatgatgaaacacatgcaaatcgtcccaacctgagctatcaagtagagctatgtaacatgagccacatctattctatcattttaaattttctttctttcttttcttttctttttttcttctggagacacagtcttgctcttgtcgcccaggctggagtgcagtggcgcgatcttggctcattgcaacctctacttcccaggttcaagtgattctcctgcctcagcctcccagttagctgggattacagacgcgtgccaccatgcccagctaatttttgtatttttagtagagacggagtttccccgtgttggccaggctggtctcaaacttctgacctcaggtgatctgcctgccctggcttcccaaagtgctggaattacaggtgtaagccaccatgtccggcccattttaaattttctagtagcctcttcaagaaggtaaaaagaaacagtgaaatgatccattttctttaacccaatatatccaaaacattagcattttgacacatcgttaagaaaaaaattgttaatgagatatttgacattccttttgtcagactaggtctttgaaagctgctgggcgttttatactgagcgcattccaagttggatgcagaagtctcattagatgttaaaggaggcccggggcagtggctcacacctgtaatcccagcacttcragaggccgaggcaggtggatcacctgaggtcaggagtttgagaccagcctggccaacatggtgaaaccctgtctctactaaaaatacaaaaattagctgggtgtggtggcacgcacctgtaatcccagctacttgggaggctgaggaaggagaatcacttgaatccgggaggcagaggttgcagtgagccgagctcgaaccactgtacttcagcctgggtgacaagagtgaaactccatctcaaaaaaaaaaaaaaaaagatattaaaggaaagaacttttcatacccagcttgttccaaacatacttcagagtttcccaataactgaatggagtaccagtgtttaaatttaagctaattaaaatgaaataaatattttaaatcatgctagccacacttcaggggctcaagagctatgatgtatgtttaatacattggatggtgtgagggtagatagcaccygataagcagcattaagaacatcaaaaatttttattgagcccgggcacggtggctcacacctataatcccagcattttgggaagctgakgtgggaggattgcttcaggccacaagtttgagaccagcgtgggcaacatagtgagactccatctctacagaaaataaatttaaaaatgagcagggcatggtgatgcacctggtgggtagtggtcccagctacttgggaggctgaggtgggaggatcatttgagcctgggggtttgagactgcagtgagccaagatcatgccactgcactctagtctgggcaacagagcaagacctgtctcaaaaaaaaaaaaaaawatatatatatatatatatatagactctatgtgacacaccagctcccttgccttctgccatgagtagaagctttttgcaccatgcttcttgtacagcctgcagaactgtgagctaaataaacctcttttctttataaattaatatatataatatatatttattgagtgaacaaatgaatataaagtcttttttttctttttttttttctttttgagatagagtcttgctctgttgcccaggctggagtgcagtggcgcgatctcggctcactgcaagctcagcctcccgggttcacgccattctcctgcctcagcctctcgagtagctaggactatagtagctgggactgcaaccacacccagctaattttttgtatttttagtagagacggggtttcaccatgttagccaggatggtctcgatctcctgacctcgtgatccgcacaccttggcctcccaaagtgctaggatcacaggcgtgagccaccacgcccagctttttttttttttttttttttttttttagatggagtcatgctctgtcgcccaggctggagtgcagtggcacaatctcagctcactgcaacctccgcctcccgggttcaagcgattcctctgcttcagcctcccgagcagctgggaccacaggcgtgtgccaccatgcctggctaatttttgtgtttttagtagagacagggtttcctgagtatccggcactagaggtacccaccaccacgcatgccatcatgcctggctaatttttctgtatttttagtggagacggggtttcaccatgttggccaggctggtctcgaactcctgacctcaggcaatcctcccgcctcgtcctcccaaagtgctgggattacatgcatgaaccaccacacctggccccgttcattgattttctaggattatgtgagttaataggtataaaagactaaagacagtttgttgctgtcacatataaaccttttaataagtgctggctgcaaaaaacatttgactctgatgaggcctttctcccatcgtgctctcattttcctgcctgtgaaatggaaggattgtcccagatgattttgagtcctccttcgaacttgatcrttctgcagttgtatttatttaatggaaattttccgtttcctctgtgtgtcgccctctccatgaggcaggtgttcctgtgaaggacctccttgcacacatctttccccagtcttcatcgtccacacttaaaatgcycaactcactctcttcctctgtcctccagggcaatatcttctctctacaccaatgatggtgacatggaagctctcgaggctgacctgaaacatcgatttacccgacaggagtgggacttggctaagagcctacagaaaaccatccaagcagygaggtctgagaattactctctgaccgacttctgggcctacatgkttrtctctaagcaaaccrgagaagtaagtcattcccagctggggacctggggtgggggtaggagcaaggggtctcagggtgtggggttaccaaagatgctgaccagcaccaccttttaagtccttcaggattttcaagtcatcaaaatctgggcacttcggttgatgcctcaaaactaaagtatatcaggattactgtggttgcaagtgacagaaattgactctgattcgtttatgcaacaaataaagtgatatgatttactagaaagatacacagacatccagggcaagaagaacaatgaggacttatgatggaataaggcagaaatagggaaagtgtcagacccaagacaactttcctctccatctctgcttggccatttgatgtcttgaattcactattttattttatttcattttatttttgagacagggtcttgctctgtcacccaggctggagtgcagtggygagatcatggctcactgcagcttcgacctcctgggctcaagcaatcctcttgcctcagccttttgagtaagctggggcaacaggcatgcaccatcrtgcctggctaatttttaattatttttttttttgtagagacagggatcttgctatattgcccaggctggtctcaaactcctgagctcaagcaatcctccaactactgggttcaagtgatcctcctatctcagcctcccgaagtgctgggattacgtgtatgagccactgcatccagcctatcctaacacwtcgggtttttgttgttttttgtttgttttgtttattcttgagacagggtttcactctgtcgyccaggctggagtgcagtggtgcaatcacagctcactgcagccttgacctcctgggctcaagcaatcctcycagctcagcctcccaagtagctgggactacaggcacrcaccactgggcctgacaaatttttttttttttttttttttttttagagatagggtttcgcttttttgctcggggtggtctccaaatcctgggctcaagtgatccttccacctcagcctcccaaagtgctgggattatgggtatgagccactgcacctagcctatccaagcactttgggtggctgaggcgggaggattgcttgaagccatgagttcgagaccagcctgggcaacatagcaagagcctgtctctatcaaaaaataaattagccgggcatggtgacatgcatctgtagtcccagctacttgggaggttgaggygggtggattgcttgagcccaggaggttgaggctgyagtggcccattattgtaccactgcactccagcctgggtgacagactgagacccctctaaaaaaaaaatgtggcctacgtgcagaggttccaccctstgggacccacatgcctccctcacactgtcttggcacmttctcccaaagctgcyggagtctcatttgtccaatatgaagaagcccgtggaagaagggacactaccctacccratatttgcagccattgacaatgacctgcaaccttcctggcaggaggcaagagcaccaggtaagcaaacatttagagggagggagaggtartaagggatggaacrgcacrgagtggaatggaagaatgtttccctgccctccccttggggagcccaggaagagggaagggctcaggattgcagaaaacagggtgctcagcttagacgagagaagagggaagtcccagaagtgaccagaggacatgcacttgctttgcatggatcaagaaaacctttaagaggccaacatggtggctcacgcttgtaatcccagtggtttgggaggctgaggtgggaggatcgcctgaaaccagaagttggagaycaccctgggcaacatagtgagatcccatctcaaaacaacaacattaaaaaacmaaacaaaacaaaaaaacacaataaattagccaagcatggtggcaggaacctgaagaatctacccaggagactggggcaggaggatcactggagcccaggaattcaaggcttcggtgagctstgattgcaccattgyactacagcctgagtgacaaagtgagaccctgtccccccaaaaagaagaaagaaaaaagaaaacagaggagaggagggacaaaagamaaaaaggggccgggcgcagtggctcacgcctgtaatcccaggactttgggaggccgaggcgggtggatcacgaggtcaggagatcaagaccatcctgrctaacacagtgaaaccccgtctctactaaaaatacaaaaaattagctgggcgtggcggcgggcgcctgtagtcccagctgctcgggaggctgaggcaggagaatggcrtgaacccgggaggcggaggttgcagtgagctgagatcgcgccacagcactccagcctgggcgacagagcaagactccgtctcaaaaaaaaaaaaaaaaaaagaaaaaagaaaaaagtaaagaaaactgtaataagggatgtttgaaggatggcggggtgggtgggtggggctgtctctcacttttttttttttttttgagacggagtttctctcttgttgcccaggttagagtgcaatggcacgatctcggctcaccacaacctccgcctcccaggttcaagcgattctcctgccccagcctcccgagtagctgggattacaggcatgcgccatcacgcccagcgaattttgtatttttagtagagacgtggtttctccctgttggtcaggctggtctcgaactcctgacctcaggtgatccacccgcctcggcctcccaaagtgctgggattacaggcatgagccaccgcacccggccatctctcactttttagatgtcttccttctccataggtccrattatcacccaaatgctggcagctctccagacattccagtttctcttttgagctcatctctctcctgagatccagacctccttaccctatttcctaagcataaaatgcactcacttgttcagcaactgtgtcctggtaagttctcacgatacatcaggcaatgttaccagttacctgtggttgggcgtctcctggcatctcaaggctcagaagyccccagtgtgaatggtgtttgtctgtttgtttgtttgagacagagttttgctcttgttgcccaggctggagtgtaatggcacgatctcggctcactgcaacctctgcctcccaggttcaagtgattctcctgcctcagcctcccaagtagctgggattataggcatgyrccaccacgcctggctaatttttgtatttttagtagggatggggtgtcaccatgttaatcaggctggtctcgaactcctgaccttaggtgatccactcacctccgcctcccaaagtgctgggattacagacgtgagccaccacgcccggccatgaatgttttatctctctcctcggtgtggatccttgtgctgttttctcaccagagcagatacagctgactccgtcctttccataagccccacaaattcagtcattcccagacctagaaatcaccccctcctcattttcatcctttgtgctcttctacatcayccccagaccaggtctcccagtctcctgggagactcttgtaattagttcctcactggcccgcccatcccaagctgtccacctccttccctggctacctgatggaagtttccaggatgaaaatctgatcatgtcattttcttccctggaatattctaatgactcacattggaatcatgcattagatttatgcccacagacaatcctccatgcaatcgtgtggctacactcttcccttgcactccaggattccatggagttgcagccacaatgagatggaagararaggcagggctgagggttcaagctctggaaaatattggaaacaggctgctgtggaagttatgagctgccaccagcagcgtagactcaggtctgaggatgagatccccagtggtttctgataccacacagtccatctctaacattctcctgtcatggttgtaattyctcattaatagatttctttttcctgcataccygctacattcctggttctgtgctgggactcacttgccgttgtatttcctctgcagagacctggttcgagttcacccctcaccacgctggcttcyctgcactgggggcctttgtttccataacccacttcggaagcaaattcaagaagggaagactggtcagaactcaccctgagagagacctgactttcctgagaggtcagcgctggggtcagaggggattaaaagggggtgggaagtggaggagaggcaagaattttccttctgagggtctagtttgcccagctcttaaatttcttgggggaaagaaaaggacttggtaggcttccagaaagaggaatggtrtattccttctgctgagtcttcagtgtctctcaaaggtctccttaatgcggcagatacctgatatcctatcaaacaatccaggagagggagcttaatagaggggctcaagtccagggctgtggcttccaataagcagattcagaatgtgtttgggattacatggtgctttgggaggctgacctgggaggatcccttgagactgggagtttgagaccaacctcggcaacatagcaacactgtgtctctacacaagatttaaaaattagccaggcattgtggcatgtgcctgtggtcccagctactcaggaggctgaggcagtggaaggatcacttcagcatgggagttcaaggctgcagtgagttatgatcgccccactgcactccagcctggatgacagagaaagatcttgtctcaaaacaaacaaacaaacaaacaaacaaacaaaaaactagaatgtgttttgggcaccagcaaagcaaggggcatacaattttttttaaatggggyatttccagaaaaaattacaacaaaaaccaaaaacaaaacagtcatagtgagtaaaatcagaacttgattaaatgtccttgactgtagcttacacactggtatcacttttagttgtggcttcataatcttctcagcattcagggtctgaaggcattaccctgctgggcagacagctcccctacataggaccaaccatgccagcttgagaaagtcattaatgttacctgagcctcgtttttctcatagggaaagtacttacctcaaaatgtgggtgtgagagttaggtatgatccacaaataaaacactcagcccagtgtccagcacatggtaggaaattaaggatggttgactctccatgattttagcatacacttttgagacacactaggagcctgatactattttaaatgcaggggattcagtcatgagcaggacagtgaaggctcattccctaatgaagtttgcactccagggaaggagatgatgaatgaacacacacaaaaataagtatgtattataatgtcagatcatagtaaatgctatcttgaaaaataattcatggtaagggactggagagtgactacagtattatttttaattggtggtcagagcttctgacaggagatggcctttgagcatggacctgatgaaaagtgaagccatgcagatatcttagaggaaaagcatcatggacagagggaagagcaaatgcagagaccctgtattagtccgttttcatactactataaagatactacccgagactgggtaatttgtagacaaaggaggtttaattgactcacagtttcacatggctggggaggcctcaggaaacttacaatcatggcagaaggtgaaagggaagaaagaaccttcttcaagtggtagcaggagagagaagagcaagccaaagaagagctgcccaacacttatcaaaccatcagatctcgtgagaactcactcgctatcacgagtacagcatggggggatctgcccccatgatctgattacctcccaccaggtctctccctcaacatctggggattacaactcgagagatttgggtggggacataaagcttaaccatatcagaccctaagccaggaccaagtttgtcttactctagaaccaatgagaagaccagtgaggctggagcctcctgaatgaggctgagagagagggctagagaggtaggcagggtccagatcatatgggaccctgaaggacacagatgaagtttagtttggattccaagtgcgataggagagccagggaggcagtttaattagggtggtgaccgattcagtttatatggtaaaacatctcactctctctctctctctctgagcatggattaggggtgggtgtgtaaacttagaagttgggagcagttgagaagctaatggtcctggtgacagataatggcagtttaaggttgggtaccagaatggatatgggagggaagtggatggactctggaaacctggagatggatgaagaagaattacacctggattggatgtggagagtaaggagaatcagagatgacatcaaaggttccagcttctgcaacctggtagatggaggggtgttctcaggggaggagaacaaggtaggatgaaggggatcttccccttttctctggtctggacagacggggtccttcacattgccaagcctggctcctgtctcctatccccaccatctctttgctaaatctggtcttgggcatcagagattttgaaattgtcactcccaggtactccctataacattattatttccttagatgtatgtatcacctactgaagggattctgtacrtgtattttatccctcccctcacacaccagggtgctttttatttattattataaaataaacataacataaaatttgccattttaaccattttaaagtgtcaagtacagtggtataaatacaatacattcataatgttgtgcaaccatcactgccatccatctccataacacttttcatcttgtaaaactggaactctacgcccattgaatactaagtccctgtcaccccctcccttagcccctgacaaccacaatgctaccttctgcctctacgattttgactactctgagtatgacatgtaaatggaatcatgcagtgcttgtctttttgtgtctgtctgatttcactgaggaaaatgacttcgaagttcatccatgttgtaccatgtgtctgaatttcctttctttttatggctgaatcatattccattgtacgaatataccacattttgcttatcaattcatccatcgatggacacatggattgctttcaccttttggctgttgtgaaggaacctgccatgcacatgggtctatgaatatctctttgagaccctgctttcaattcttttgggtatatactcagaggtagaattgctggatcatgtatgtggtaattctacttttaaaattttgaggccaggtgtggtggctaatgcctgtaatcccagcactttgggaggccgaggcgggtggatcacctgaggttgggagttggagaccagcctgaccaacatggtgaaaccccatctctacaaaaaatacaaaattagccgggcatggtggtgcatgcctgtaattccagttactcaggaggctgaggcaggagaatctcttgatctcgagaggcggaagctgcagtgagcggagatcgcgccattgcgctccagcctgggctatctcaaaaaaaaaaaaaattttttttttgaggaacgaccataccattttccacagtggctgtaccattttatattctgcccaatggtgtcccaggkttccaatttctccacgtcctcatcaacacttattgttttctggggttttttggataccagccatcctaatgggtgtgtctwtttttttttttttttttttttttttgagatggagtctcactctgtckcccaggctggagtgcagttgtgtgatctctgctcactgcaacctcccaggttcaagttattcccctgcctcagcctcccaagtagctgggactataggtgcataccaccaggcctggctaatttttgtattttttagtagagatagggtttcaccatgttagccaggctgaytttaaactcctgacttcaawtgatccgcccacctcagtctcccaaagtgttagcrttacaggcgtgagccaccgtgcctggctgattattcattttttatgtctccctgtatcatatacaratgtgtttggctaaaagtcactaaccaaccacagtgccccgaggacatgtgggattaattttcttacaaaagaaaaagacagacygrgcaccgtgactcacagctgaaatcccagcactgtgggaggccgaggcgggcagatcacttgaggtcaagagttcaagaccagacgggccaacatggtgaaaccccgtctctacttaaaaaatacaaaaattagcagggcgtggtggtgcatgcctgtaatcccagctagtcgggaggctgaagcaggagaatcacttgaatctgggaggcagaggttgcagtgagccgagatcacaccactgmactccagcctgggcaacagagcgagatcccatctcaaaataaataaataatacaaagttaggtggctggtgacattggtttagctgtgcaacattaagcagaaggacccaggtttattctagattttctgctcctccatccttagcatattaagtcaccctcatgctgaactcctccacaccacgggatggcggctgcatccaatgaarctgcaactttttttttttttttkgaagtcagggtctctctctgtcactcaagctgccgtgcaaaagcacagtcatagcccaatacaggtcttgaactcctggcctcaagtgatcttcctgcctcagcctcccaagtagctgagactagagttgcatgccaccatacctggcctgctccttctgagaaggagaacaagcactttgcagaagtccccccagcagtgtgcatggaccagagcttgaccktcccctagctgcaagggaggctgggaaatatttgcccttcctgcctgtgtgctgagaagggttggcatggacrggagcttgaaatggccttggggtagccagtctacagtgcccggctggctccacccatagaaggttcgtgaggacaaggacyttatctgtcttgtttactgctctattccaacagccagaagagtgccgggtgcccactaattgcttcataaatatttatggaatggaagaawgatctttcttcctgctgcagatccctgcagtgctttatgccagtctgctggtgctttgaatatcaarcatgacagtcacgtgatggagaatgtttgaattttattgctcttttcttggcaggtttatggggaagtgctcttggtaacactgaagtcattagggaatacatttttggtgagtatttggggaacagaamggtcaaascctagagatattttatgcaaggagattcacagtacttttcctactcatggcagaagagagacctgtgtgtaattgttctagcaactgcttttcctgacatttattctcatataattgggcagccaggatgaccacagagtggatgagagtacagactcccttggaaggaatgttgctctggtacatgtaagctttgtgacctccgaaaagttacttaacctctctgtgcctcgktttctgcctctgtgccatgcgggtgataataacagtagttatgaatatttgatgagttaattcattgaaagcttgtaggacagtgcctggtagataacggcactcagtaaacattagcaatcattacctggtccctcatttaacatttaacccctttaataccctaagaggcagacgcttttgtcccttccattttgctgagatccaccaagtcgtgggaaggrtgcgtgactcacccacactgctggtcagtgagtgcagacgcggggatctataggagaactgggtggtggatctctaggggaatagtgtggtggttctgatccaaagcctgtctgcctggatccacatcccggctctgcttctcctgcactgctcactctggaaagctgcttaaattctctgtgacccaatttccccttcctaaaatggagacaatagtacgtagtcgcagtctcgtatatttgatgtggggtttaaatgacctcatgtatgtaaaatgcttagagccaagcctgacacatgggagtgtttcattacatgttaatcttatttttaggatcattactgagttcacaccctaaaccactcgtcattcatttaatgtatattcatgggacctcctgtgtgccaggcactgtcctagttcttacactttgactttttttgttgtttgtttttttgagacagagttttgctctgttgcccaggctggagtgcagtggtatgatctcagttcactgcaacctccacctcccaggcttaagcaactctcctcccgagtaactgggactacaggcgcgcaccaccgtgcctggctaatttttgtatttttggtagagacaggatttcaccatgttggccaggctggtcttgaactcctgacctcaagtgattcactgcctcagcctcccagtgtgctaggattacaggcataaaccaccacgcccgggctgatgttgttctttgacattggtgttcaccatagcttggttaaaaacaaamctaaaaagggaatctatctatatccaacctccaaatggctractaaaggtgtgagatgggtctgagtgttacttctccagtgggtckgctaagctttctctctaaaaaacaaaaacaaaattcctgatatgtagtgtttgccaattcctgtggtgtaaatgttcccaccgtggccaacttcaggctaccaacatgaggtcactgagcacagagttggaagagaggtgcaaaattggctctcgrgagccattggctgccattggagcccatggctgccatttctattaatgaaatatccctgcaggtcatctgtattttttatattataactagggactttgttgtacagataaacattcctcctgcttctactcttttgcagaccagttaaggaatctgaccctgaaaggtaagcatcctacttcatcatgaatccctgatgataatggggaccgcacacttgcttgaggccagccattgtcctaggaacattacatgtrtgattcatttggtgcccatttgaattctttatctggtatttcaaagatttcatcttgatttggatctgttgctggagaggtagtgtgatcttttgggggtgctgtagaaccatgttttgtcatattaccaaagttacttttctgattccttctcatttgagtagactatttcttttaattattcttgaatttatgttggatttgactgtgttttttttttcttttttccgcttaaggatgtgactttaatgtccctagctaattatagcctaatttggtccttggtgctttcaggggtgaagattgtaagagttccttggatatagggagtcttcgtgtgatggctttctcatatgctggttgtagaagcgatgtgctcactgtgtgagcaagttcactgttgcctacagggctggaatggtagaagwctcttgaagcttaactcattccccacaaggcatgcaattttttycccagtattttattgactggtttgatggttcaggcttcaggtctgtaggggagtgcataggaagtgattgtggccaaaacatgtgagtaaatgcaacacccaatggtgagcaaaggtcccagccttgacagaggtggctggaggagctctcagtgagttgcatcgagattttttttttttttttttgagacagagtttggctcttgttgcccaggctggartacaatggcatgatctcagctcaccccacaacctccgcctcccaggttcaaggaattctcctgccgcagcctcctgagtagctgggattgcaggcacttgccaccatgcccagctaattttgtatttttagtagagatggggtttctccgtgttggtcaggctggtctcgatctcccaacctcaggtgatccgcccacctcggcctcccaaagtgctgggattacagccgtgagccaccatgcctggctgtgcaccgtggtcttatcaggcagaagggttggagccacctcagctcccctgccaggtcagccagaaagccatccatctctcagacacactcgtgatccagtgctccagctattcagatcagacgggcacctcttttcatctgtaggaatgttggtgttctgagtagagaggaactgtgaatctgtctcttatgcaagcctaaacctagaggggctcctcctgtggggatgcagtcgccctgatatgttccagaaaggctgtctatagttgtacccatgctgagctcccatgggagaaaccccaactgtgcctgtggcagtggaagagaggggaaagacatccccttatccaagacccttcatgcacaccagggctgtctgatggttgggttagagctgtgggctttccgtgctgagcccagcactgaaactgtgtccctgctgaaagaaacttcccaccagcagaaagatctgattttcaagtcctgctgtccagattcttttgtcccatggggtgttcccttgatgtggtgcactccccattcccctaggataggagtcactgagcaccagactacagtgagtgttattgttcctctgggtctagccacccagtgaagctgccacacttcaggctggttcttgggaatgtctccaaggaatccggtaatgtcccctgtcctcgagactcccagcaatgggaagcagcaccagctctaatgggggtggcaggagagagacacaggctctgtgagattccttgctgatggacagccttagtaggttggcttccttgaatgctagttatagtagtaatgaactgatcatgtggacagactcaggacctcctggttagccagagtggtgcatgcagtggtgatagctgaggacatagagccattttctccttcctgggcccagtgttatcctaccaggagatgctgtcatggactgtgttggttggcctccacccagcaggtggagcaccagctgcagtagtagcagtgggatattcacttgccctatgttgcccagggtggctactcttgtttctcaggcaatgggcagagccacagagttcccaaaagyttccgtcctttgtattaaagccaccagggcgggtggcagggcaaagccaggtgtgggctgggtcaggcagttttgtgctctaactctccctgtgcagggcaagcagcagctcctgtgggtatcagggggtgggggtggttttcagacccatgtgctgataatccagagaggaatgtttctgcctctgctgcacagaagagtttgtgtagggagtggggagtggcaggtggcagtaagccccacgcggatcccacacacttggcgaggcagatcccctcccaccctgttccactggcagtggtgagctaagttccaggcagcctgtgctcagaacttgcaaatgcccccaagtcataagctttccctgcagagatagcaaccactgctctcaggccatgcccctccccatctatcccacctagccatgtgccagggtcctgcacacgtgtctgcagcttgcttttcattcaccccatgtgggtggagaagttcacctccacccacagttatctcatgaaacccagctgggggcttctttcaacctgcgaccacccacctgaactttttggctgaccactgcagggtgccctgtgaggaacaataaggaatggcttccctgggtccatactgggatctgggagtgcatgcagggttcttcccacagctcctacttatattccacgaacctccccaagtcatatcctgcactgaatagggttaaggccttaccccagagactggactttcaggctccctggtgtggtgggggcgtgtgtcctgcaaacagtctttccccatctcacaccctggggactcgcagcccttcacttgagtcacagtataggctgcagcccgtcacttccttcaaagggactgtggattccttcagatttcctgtctaattcctgaatcacttcttgaaaaaaaagttcacagtgtgaatctctacacagtgttttgtccttccaagtgggaggggtatgccagcaatgcctctaatccaacatgtttgctgtcctgctctttcatagtaggacagctaggactttccagaagtgcccccataaatctgcatgggccagagcttgacctccctctagctgcaagggaggctgggaaatatttgcccttcctgcctgtgggctgagaaacgttggcatggaagggagcttgaaatggccttggggtagccagtctacagtgcccggctggctccacccatagaaggttcctgaggacaaatctgtcttgtttactgctctattccaacagtcagaagagtgccgggtgcccactgattgcttcataaatatttatggaatggaagaatgatctttcttcctgctgcagatccctgcagtgctttatgccagtctgctggtgctttgaatatcaaacatgacagtcatgtgatggagaatgtttgaattttattgctattttcttggcaggtttatggagaagggctgttgctaatgctaaaagcattggacaccttatttttggtgagtatttggggaacagaaaggtcaaagcctagagatattttatgcaaggagattcacagtacttttcctgcatgtggcagaaaagaggcctgtgtataatggttctaacaaccacatttcctgacatttattctcatacactgaacattgattatgggcagccasgaagaccacagagtggatgagagtacagacacccttggaaggaatgttgctgtggtacatgtgagctttgtgacctctgaaaagttacctaacctctctgtgcctcagtttctgcctctgtgccatgtgggtgatrataatagtagttatgaggattaaatgagttaattcatcaaaagcacataggacagtgtctggtagataaaggcactcagtaaacattagcaatctggctggatgcagtggctgacacccgtaatcgcaacacttgggaggctaaggcgggcggatcatttgaggccaggagttcaggtttctgatcctggccaacaggtgtgtggagctggtgcctgctacttccaggcctggctacaaaaggccttctgtggctctccagctctctcctctcatggaacagacaaggagaccttgtgccaagaggagaagctcttaaacccaggaggcggaggttgcagtgagctgagatcacaccattgcactccagcctgggcaacaagatgcaagcagcctggcccggcgcagtggctcatgcctgtaatcccagcactttgggaggcccaggcggacagatcacttgaggtcaggggttcgagtgcaagctgggtaacatggtgaaaatgcgtctctactaaaaatacaaaaattagcyaagtatggtggtgcacgcctgtgatcccagctactcaggaggttgaggcacaagaatcgcttgaaaccaggaggcaaaggctgcagtgagctaagatcacaccactacagtccagtctgggcaacagagcaagactccatcacacacacacacacacacacacacacacacacacacacacacaaaattggcattcgttacctgttcatcatttaaccctttgaatgacctgaagaagtggatgctgttgtcccctccattttgctgagagccaccgggtcatggaaaggatgcgtgactcacytatgtaactggttggtgagtgcagacacagggatctataggggaatcgtatggtggttctgatccaaagcctgtctgcctgaatccacatcccagctccacctctcatgcgttagtgaccctagaaagctgcttaaattctctgtgaaaaaaattaaaaaataaagaaatgaggggccgggcgcagtggctcacacctgtaatctcagcactttgggaggctgaggtgggcagatcacctgaggtcrggagtttgagaccagcctgaccaacgtggagaaaccccatctctactaaaaatacaaaattagccgggcgtggtggtacatgcctgtaatcccagctacacgggaagctgaggcaggagaatcgcttgaacccaggaggtggaggttgcagtgagctgagatcacaccattgcactccagcctgggcaacaagagtgaaacacagtctcaaaaaaaaaaaaagaaaaaagaaaaagaaaaagaaaaaaaagaaatgaaacaamcaaaaaaaaaaaaaaaaagaaaagaaaatcaacaacaacaacaaaattctctgtgacccaatttctcctttgtaaaatggatacaatagtgcatagccccaatcttgtatatttatatcaaataaatgtaaatatacatcaaatatacaagattgggactatgtactatttgatgtggggtttaaatgacctcatgtatgtaaagtacttagagcaaagcttgacacatgggagtgtcctcttaaatgtcaatattatttttattatgtcttgtattgttagaaaaagcaagccagggccaggcgcggtggctcacgcctgtaatcccagcactttgtgggggccgaggcgggtggatcaccaggtcaggagatcgagaccatcctggctaacatggtgaaactccgtctctactaaaaaatacaaaaaattagccgggcgtagtggcgggcgcctgtagtcccagctactcgggaggctgaggcaggagaatggcgtgaacctgggaggcagagtttgcggtgagccaagatcgagccactgcactccagcctgggcgacagagcgagactccgtctcaaaaaaaaaaaaaaaagaaagaaagaaaaagcaagccgggcacagtggctcacgcctgtaatcccagcactttgggaggttgaggtgggtggatcacttgaggtcaggagtccgagaccagcccagccaacatggtgaaacctcgtttctactaaaaatataaaaattaactgggcatggtggcgggcgcctgtaaccccagctactcgggaggctgaagcaggggaattgctcgaacccgggaggcaggggttgcagtgagccgagatcgcaccactatactccaggctgggcaacagatcgagactgtgtctcaaaaaaaaaaaaaaaaaaaaagaaagaaagaaagaaaaagaaaaaaaagcagacaaaatttatttattgacaattcaaaaatttgaaaaagatgaagcagaagcttgacctaaccgacgtgtatcaggacttagctttctatcgcattttcagcacatgtggaaaaattgaattttgatttggtctcaagtaaaaagttataacatgtacaatattttaattataaggatcaacactgctactattaggtaataatatttttaaatattaagatttttttgtttttttttgaatttttacttcaatagcttttggggtacaagtggtttctgttacacgatgaattatgtagtagtaaattctgagactgtartccacccatcagtgtatgttttagagtatgttgcattcaatatgtagttttttggttttgttttttgtgacagtctcactctgttgcccaggctggagtgcagtagcaagatctcgtctcactgcaacctctgtatcctgggttcaagtgcttctcctgcctcagcctccctagtaggtggaattacaggcacgtaccaccatgcccggctaatttttatatttttagtagagatgaggttttgccatgttggtcaggctggtctcgaacttctgagctcaagcaatctgcccgcctcagcctcccaaagtgctgggattacaggcatgagccaccacacctggccccaatgtgtagtgtttttttgtttttgttcttgttttttgagacggaatttcactcttgttgcccaggctggagtgcaatggagcgatctctgctcaccgcaacctccacctcctgggttcaagccattctcctgcctcaacctcccgagtagctgggattacaggcatgcaccaccatgcctggctaattttgtatttttttagtacagacagggtttctccatgttgctcagactggtctcgaactcctgaccgaaggtgatccacctgcctcggcctcccaaagtgccgggattacaggcatgacccaccactcctggccccaatgtgtagttttttatccccacctccctaccctcctctttctgaatctctgaagtccgttatgccactctgtatgcctttgcgtacccatagcttagctcccacttataagtgagaacatatggtttttggttttacattcctgagttactttacttagaatgatggcctccatccaagtttctgcaaaagacattattttattcttttttatggctgagtcatattccatggtgtttatataccacatattctgtatccactcatttgtcaatgggcacttaggtgggttcatatcttttttttttttttgagacagtctcactctgtcacccaagctggagtgcagtggcgcgatctcggctcaccgcaagctccgcctcccaggttcacgccattctcctggcccagcctcctgagtagctgggactacaggcacccaccactgcgcccagctaatttttttttttttttttttttttgkatttttagtagagaccggtgttagccaggatagtctcgatctcctgacctcatgatccacccgcctcagcctcccaaagtgctgggattacaggcatgagccaccatgctcggctggttccatatctttcaattgtgaattgtgctgctataaacatacatgtgcatgtgtcttttttttttttttttgaggcagagtctcgctctgttgcccaggctggaatgcagtggtgcaatctcactgcaacctccaactcgtgggttcaagtgattctcctgcctcagcctcccaagtagctgggactacagatgtgcaccaccgcatccagctaatttttgtatttttagtagagatggggtttcaccatgttggccaggctggtcttgaacgcctgacctcgagtgatctcccctcctcagcctcccaaagtgttgggattacaggcgtgagccactgcacccagcccacaagtgtctttttcatataatggctgcctttcctttgggtagatacccagtagtgggattgctggatcgaacggtagatctacttttagttctctgaggactctccatactgttttccatagaggttgtactaatttacattcccaccagcagtgtgtgagtgttccatttgcaccgcatccacaccaacgtctatggttttttttgaatttttatcaatggccattcttgtgggagtaagatggtatctcattgtggctttcatttgcgtttctttaatgattagtgatgctgaccatttttttcatatgtttcttggccactggaatatcttcttttgagaaatgtctattcatatcattgggatgcttttcggtgggattattcgttttcttcttgctgatttctttgagttccttataggttctgtataatcgtcttttgtggatgcctagtttgcaaatatttgctcgcattcagtgggttgtgtgtttactctgataattacttcctttgctgtacagaagctttttaatttactcaggkcccatatatttgtttatttttgagacggagtctcactccatcacccaggcttcagtgcagcagcacgatctcggctcactgcaatctccgcctcccagactcaagcaattctcctgcctcagcctcctgagtagctgggattacaggcatccaacaccatacctggccaatttttgtatttttaatagagatggggtttcgtcatgttggtctggaactcctgacctgaagatccgcccagctgggcctcccagagtgccaggattacaggcgtgagccatcgttcccatatatccatatgtttatttttgtttttgttgcatttgcttttgggctcttggtcatgaactcgttgcctaagccaacatctagaagagtttttttgatgttatcttctagaatttttatggtttctggtcttatatttaagtctttgatgcaaattcacattgaatttgtgagttgatttttgtataaggtgagaaataaggatcgagtttcattctcctacatgtggcttgccagttatcccagcaccatttgttgaataaggtgtcctttcccccactttatgtttttgtttgctttgtcgaagatcacttggctataagtatttggctttatttctgggctctctattctgttccattgttctacatgcctaattttataccagtaccgtgctgttttggtaactataggcttgtagtataatttgattgggtaatgtgatgcctccagatttgttctttttgcttagtctttgctttggctatgagggctcttttttggttcatatggattttgggattgtggctgggcatggtagctcacgtctgtaatcccagcactttgggaggccaaggcgggtggatcacctgaggtcaggagtttgagaccagcctggccaacatggcgaaaccccatctctactacaaatacaaaaattagccaggcatggtgcatgcgcctgtaatcccagctacttgggaggctgagacaggagaatcgcttgaacttgggaagcagaggttgcagtgagccaaaattggccattgcactccagcctgggcaacagagcgagactaagtctcaaaaaaaaaaaaaaaaaggattttaggattttttgttctgtgaaaaatgatagtattttgatgggaattacactggacttgtagattgcttttggcagtatggtcattttcacaatattgattctacccatccatgagcatgggatgtgtttccatttgtttgtgtcatctatgatttctttcagcagtgttttgtagttttccttgtagcagtctttcacctccttggttaggtatattcctgagtattttattttatttttttgcagctgttgtaaaaggggttgagttcttgatttgaatctcagcttggtcattgttggtgtatagcagtgctactgtttgtgtacattgattttgtatcctgaaactctactgaattcattcatcagacctaggagctttttggatgagtctttagggttttctaggtgtacaatcatatcatcagtgaacactaacagtttgacttcctctttactggtttggatacccttcatttctttctcttgtctgatggctgtggctaggacttccagtactatgttgaatacaagtgataagagtgggcattcttgtcttattgcagttctcagggggaatgctttaaacttttccctgttcagtgtaatgttggctgtgggtttgtcatagatggcttttattacattgaagtatgtctcttgtataccgattttgttgagggctttaatcataaagggatgtgggattttgtgaaatgcttctgcatctcctrtgatttttgtttttaattctgtttctgtgatatatcacatttgttgacttgcatatgttaagccatccctgcattcctagtatgaaacccacttgatcacatcatggcaaatttcaagctaccaacatgaggtcascgagcacagagttggaagacgggtacaaaattagctctccagaacccgtatcaacagactccaacccatggctgccatttctattaaagagacgtcgctgcaggtaatctrtattttctataactagtgactttacagttaaacattccccctgcctctgctcttttgcagcccgattactgaggctgcaagaaagttcacaaggggaacatcctcccccagaaggtaagcatcctactttgccatgaatccctaatgatagtgtggactgcacactggcttgaagccagccattgtcctaaaaactttacgtgtctgattcatgtggtgctcctttgggaatggagaggagcatggactctcccaggtgcctgaggccacgcagccaggaggggcaggatcggagttcaaactgacactctgtgaaaaatgatagtattttgataggaattacactggacttgtagattgcttttggcagtatggtcattttcacaatattgattctacccatccatgagcatgggatgtgtttccatttgtttgtgtyatctatgatttctttcagcagtgttttgtagttttccttgtagcagtctttcacctccttggttaggtatattcctgagtaytttattttatttttttgcagctgttgtaaaaggggttgagttcttgatttgaatctcagcttggtcattgttggtgtatagcagtgctactgatttgtgtacattgattttgtatcctgaaactctactgaattcattcattagacctaggagctttttggatgagtctaaccataggatccatgtacatagtcgtcagatataccctaggtatgcctaggatccaagtgtcagaggcagaaaatgggaacagcctgaggcaattagcaaattgagaggaaaaatacttcccaaaactacataggttgggagtcatgaaggaatcagacttgacccatggtgggagtacggagaacaagaacaaagtatcagatgaattctgtatggagaagttagattatattatggaggagactatatttgttcaggagaggctatgctgcgcaaagaaaccacaaattgctatagcttaagacacaaagggtttatattttgcttacccaaaaagcgatatgggttgagtgttcctccagggcaacttggctccatgtggggacttaggcatccaagctgtttgcgtcttttttttcctttccttttcttttttcttttttttttttggagacagagtctagccgtgtcacccaggctagagtgcagtggcataatctcagctcactgcaacctctgccttccaggttcaagctattctcctgccccagactcctgaatagctgggattacaggcaactgccaccacacctggctaatttttgtatttttagtagagacgagttttcactacattacccaggctactctcgaactcctgacctcaagtgatctgcctgcctgggcctcccaaagtgctgggattacaggtgtgagccaccgcgctgggccaagctgcttgcatctcgttgcttctcctcttggcacaaggtctccttgtctgttccatgagaggagagagctggagtgccacagaaggccttttgtagccaggcctggaagtattgggcaccagctccacacacctcctgttggccaggatcagtcacatggccccaacctaactacagcagaggctgacaaagatggtcttccttccagttgtggaagatgcaagtgtggctttttcacaggtcaacagtcaggtacagagtgaaggtaggtcctgagcacagcccttcatccacttcatgcctccctccctgttttagttgtgaaggctgccagaacaaagtgccatacataggctggctggcttagcaacaacagagattaatttctcagttctggaggctggaagcccaagatcagagtaccagtagggttggattctggggaaccctcttctgggttgcagagagccaacttcttgccacatggcgggctttaatgttgttttttgacaycagcattcaccatatgctggttatagacaagtctggaaggagaatctatctccaacctgcaaatggctaactaatgttgtgggatggtaggctggtgattgtaccactgcactccagcctggtgacagagcgacaacctgtctcaacaacaacaacaacaaaaaagaaatggcaaccccaaggtgatggtattaagagatggggcctttgggaggtgttgagaccatgagggtggagccctctwgatttggattaatcccttataaaagaagcctcagagagctcactccaaggaatgcggtgaaggttgaagkgtagaatttatgcaaaatgccaagatgagcctggcaggtgacgttctcagcaaacgtgagcagagctattatcagtgtgtgtgtgtgagagagagagagttgaacatcatctaattcatgagtgtggataaaaataagaggggatgccaggcatgatagctcaatgcctgtaatcccagcactttgggaggctgaggggggtggatcacttgaggtcaggagttcgagaccagcctggccaacatggtaaaaccccatcagtactaaaaatacaaaaattagccgggcctggtggtggtgcgtgcctgtagtcccagatactccagaggctgagccaggggaatttcttgaaactgggaggcagaggttgcagtgagctgagattgccccattgcactccagcctgggcaacagagcaatactctgtctcaaataaataaataaataaataaataaataaataaataaataaataaatgggagmctttgcctccaaccctgaagaaaataagcgtgcaaaagatgagtagaggtggaggcagagatgaaggagctagaaaaaagaggccagaaagtcagagagagtgaggtaacatgggggtcagcagaaggcaaggggagagagggtcacctggagaaggaggtcacctcaggaggaaccgcagggcattgcagaagatgaggcagagcagggtctgtgatgttcttggtagggtacttggacagtgtctgagaccacctggatttcttgacgtagatgaaggcggtgagcctgaacacacctggctgactgagatgctcgagaaytggaccaggacctccctggaaaagcaggagcagccccatgaggaccccgaaaggaaaggtaccatgtgtagtgtgataagtgtcatcaacagtaagtgccaccaaccttctcccccctcttgctcttycccacccctgtgggccagtcctgcaggggacatgaccagatgtcccactggtacagtttggatatttgttcccttccacatctcatgttggaatgtaatcccccaatgtaaattagttcaaccattgtaggagacagtgtggaattcctcaaggatctagatccagaaatactatttggcccagcaatcccattactgggtatatgcccaaaggaatgtaaatcattctgttagaaagatacaggcacatgtatgttcactgcagcactattcacaatatcaaagacatggaatcaacccaaatgcccatcagtgatagactggataaagaaaatgtggyacatatacaccatggaatactatgcagccagaaaaaggaacaagatcatgtcctctgcagggatatgggtggagctggaagtcattatcctcagcaaactattgcaggaacagaaaaccaaacaccacatgttctcacttataagtgggagctgaatgatgagaacacatggacrcagggaggggaacaacacacactggggcctgttgggggcgggtggggagaagaagagcaccaggaaaaytagctaatgcatgtggggcttaatacctatgtgatgggttgataggtgcagcaaaccgccatggcacatgtttacctgtgtaacaaatctacacgtcctgcacatgtgtcccggaacttaaaattaaattaaattaaattaaattaaaagaaaaagaaatgtaatccccagtgttggaggtggggcctggtgggaggtgattggatcatgggggcggatccctcatgaatggcttagcgtcatccycttggtgattagtaagtgcttgctctgagttcatgtgagatacggttgtttagaagygtgtggcaccttccccctcrctctcttgctcctgctctcggcaagtgatgtgcctgctccccaytcactttccatcatgattggaagcttcctgaggccccaccagaagcagatgccagcaccacgcttcctgtacagcatccagaactgtgagacaattaaacctcttttctttataaattatccaacctcaggtacttctttatagtaatgcaagaatggactgatacgcccaccctctatccacccaaccggccatccatccatctaggatgtcttgagtcattagcatgaaataataactctcctactagcaggctgggggtaggggtgacaaaggggaaatgtcagaccaagtgcctgcctggaggactcatggtctagaggacgagatggagaatagacaggtaagccaaccacaggcaagtccatccccgactgggctaatttctatggagagggctgggtgcagtggctcacacctgtaatcccagcactttgggaggctgaggcaggaagatcacttgagcccaggagttcaaaaccagcttgggcaacatagcaagaccccatctctacaaaattttttgtaaaaaattagctggacatggtagtgcgttcccatggtcccagctactcaggaggctgaggcaggaggatcacttgagcccaagaggtcgaggctgtagtgaactatgattgtgccactgcattccagcstgggtgacagagcaagaccctgtctcgaaaaaataataaataagtaaattatatggagagacaaggagaggcgagagcaggtatccggtgaaaaattctgagagtgaagtagcgtggatgagggacaatgaagacagttggtcgctgaagccactgccttcctgagatgacccaggtacagccagtctcacccccagacatccaacctctcacctctgtgatgacccggtgtccaggcrcagacacacccagagtcctcctgaccagctcatcagcagctcaccaaggaaaggaaatcaaggtgtactctcttcagactctagatttcccttcctcctccttttattcatgttacataaattcctgtttttatctctgttggatgaaatcagtctattctctggtttcctttgtctacaatttaaagagggagccgactattaacttgatgtctctgagctattgttggccaagctccccttagatgggattaatgaagaagcctccttttccaaggtgatagctcagaagcaacttgaagaatgagtgacaatgagcctaccaagtggaaatgtggggaaagtcagccagagttcatctactgacttcagtctggcagatgagaggcttgggtttacccctccggtgggtaatggagagagatggaatgtgccacacgaagcctcactatgactttctataatgcctggctcctgtgctgaaatgagaacatgcatcctagccggscatggtggtgcgtgcacctgtagtcccagctattcggggaggctgaggtgggaggattccttaagcccaggagttggaggctgcagtgagctatgaatgcaccactgcactcagagtgagacccccatcccttaaaaagttttcttttaaaraacgtacttttttttgttttgttttttgtttttgtttgtttgtttgagatggagtctcgctctgtcacccaagctggagtgcggtggtgcaatcttggctcactgcaacctctgcctcccgggttcaagcgattctcctgcctcagcctcccgagtagctgggaccacaggcatgcaccaccacacccggctaatttttgtaattttagtagagacagggtttcatcatattggccaggctggtcttgaactcctgaccttgtgatccgcccacctcaggctcccaaagtgctgggattacagatgtgagccactgtgcccggccaattcttaacttactataagatatacttgagcccaggtattcaagactagcctggaaaacactgtgagacctcatcttttttaaacaaaattaataaatagataaaacrtttaaaaaagccaggtgtgatggctcacgcctgtagtcccagctactcaggaggctgaggcgggagggtcgcttgaggccaggagttcaagaccagcaagcctgggcaacgtagtgagacctcctctctaaaataaataaataaaaatataagatagaatggccgggtgtggtggctcatggctktaatcccagcactttgagaggccraggtgggcggatcgcttgaggtcaggagcttgagaccagcctggccaacatggcaaactctgtctctactaaaaatgcaaaaatacaaaattcgccgggcgtggtggcacatgcctgtaatcctagctacttgggaggctgaggcaggagaatcgcttgaacccgggaggcggaggttgcagtgagctgagatcacgccattgcactccagcctgggcaacaagagtgaaactctgtctcaaaaaaaaagaagaagtatgkagtcctcaggccacatttagttttctttaacatgttaaatattaaagggctatcaaagcaatgtaggtgtgatttgcttttctgctgctaaactcttgtagaagttaatatttattaagtgcctactatttgctggatgtgttaggtttcttcagagaaacagagccaataagatatctatctatctatatctacctatctatgtctctgtctgcccaaatctatgcatctatatctatgtatttatagctatctatctctatctatctaactagagatatttattttaacaaattggctcatgggattgtgaagatgacaagtccaaaatccatggggcaggccaacaggccggaaaccgagacaggattttttaaaatttaatttaatttaaagtttgaggatacatgtgcaggacatgcaggtttgttacccaggtaaacgtatgccatggtggtttgctgcacttatcaacccatcacctagatattaagccccacatgcattagctgtttaccctgatgttttccctcccaccgccccctcaacaggccccagtgtgtgttgttcccctccctgtgtccatatattctcatcattcagctgccacttataagtgagaacatgtggtgtttggttttctgttcctgcattagtttgctgaggataatggcttccagctccatccctgtccctgcaaaggacatgatcttgttcctttttctggctgcatagtattccatggtgtatatgtgccacattttcyttatccagtctaccattgatgggtatatttggttgattccatgtctttgctattgtgaatagtgctgcaatgagcatacgcatgcatgaggcagaatttgacgctccagtctggaggtagaatttcttctkctctagaaactgttttgccctcaaagccttcaactgagtagatgagacccasccacattactgagaataatcttcttgaagtcaactgattttagctgtcaaccacatctacaaaataccttcacagccacatctaggctagtgtttgattaaataactggttactgtggcccagcctagttgacatgttaaaccatcctcccaacatcctaagtgctataggcaggctcttacttattcytcataaatctataagggataggtgttactctcttcctggttttacagatgagaacagagatgttaagtaacttgctcaggggcccggtgcagtggctcatgtttgtaatcctagcactttgggaggccgaggtgggaggatcacctgaggtcaggagttcgagaccagcctgaccaacatagcgaaaccccgtctctactacaaatacaaaaaaatatttagccgggcgtagtggtgggtgcctgtggtcctagctatttgggaggctgaggcaggagaatcacttgagcgcaggaggcggaggttgcagtgagccgagattgcaccactgcactacagcctgggtgacagagcaagactgtctcaagaaaaaataaataaataaaagtaacttgctcagggtcacacagctaatgagtgatgaagtcaaattcaaatcagcatctagctcaagcacccacctccctactagctttgctctcttgccactctgcccctgctgttcagagaaaggattggagctgaaaaaccaggaagagggaaatcagagggggaggcagtgttgcatcctggatggaaaagatgctgcataaggtactggcagatgagattgggaggagcagagacactgaagaggaggtggaattggcaggtcttggtgatagtccagggtgagggtgaggaagaggcaggcgtctgggataatgacctggtttatccctgactgacttggcagcctcttgggctggggaagggagcacgggaaagtgtgctgggcattttggaacagctcctggaacattctgcgtcgttctcccccatgaacctaaagagaacaagctcatttccccagatacacaggtgatcatacagtcattaaatcgccatcttttccttgccaactcccccaaccccaatggctcaaagtcatctcacctgtggctcaatgatagatgctggatctgacggccaggacccccaggcccctgtatgccaacctttcccagctcaccagatttgtcagctctgctgccctaacaaaagttgaagtggggtggcttcaactataggcttttatttcctcaccgtttttttttttttttttgagatggggtttcaccatgttgcccaggctggtctcgaacccctgacctcaagtgacccacccacctgggcctcccagagtgctggaattacagatgtgagtcactgtgcccagccttattttcttacaattctgcaggcaggaagtccaagatcaaggtgccagtggggtcagtttctcctgaggcctctctccatggcttgcagagggatggccrccttctcaccgcatcctctcagcccagcctttcctcagtgcacacgcattcttggtattcttggtgtcttcctttttttcttttttttttttttttagatacaaggtctcccttgtatctaaatgatctgagtgatacaagtgaggctggaatgcccaggctggagtgcagtggcacaatcatacatagttcacttcagccttgaactactgggttcaagtgatcctcctgcctcagccttctgaatagctgggaccacaggcatgcattaatatgcccagctaatttgtttattttattttatttttgtaaagatgcggtctcgctctcttgcccaagctggtctcaaacttctgggctcaagcaatcctcccacctcggcttccctaagtcctgggattactctggtgcctggcactctttctcttctcataaagaccccagtcctattgaattaggatcccactctcatgacctcagttatcctgaatgacccccccacttttttttttttttttttttgagatggagtctcgctccgtcatcaggctggagttcagtggcacgatctcggctcacttcagcctctgcctcccaggttcaagcgattctcctgcctcagcctccccagtagctgggactacaggcatgcgccaccaccacgcccagctaatttttgtatttttagtagagacagggtttcaccatgttggccaggatggtctcgatctcttgatatggtgatccttctgcctcggcctcccaaagtgctgggatgactggcgtgagccaacgcgccggccctgaatgacctctttaaaagtcctgtctccagatacaaccccatgggggatgagggcttccacatatgactttggtgggggcagaaaccactcagtctcctgaactcaccttggctgtctcggcttctttccctaggctcactcagtaacttgatggattttgtgaagaaaacaggcatttgcgcttcaaagtgggaatgggggaccmctcacaacttcctgtacaaacacggtgagaagaccctcttcccacygccctggtctgtccttgcgtgtgaatgggctggagtaggggaagggggtgggcctgaaacaatcccaggctggtccttccccagagctttggaggggggtggtgtcaaagkgcccagggatctgattaggggaactttcgctcagtggtgtggtccatactgaaaaatgtgtggcctcgctgcgagtcccagtcatcgtgaaaagcctcactgatggctttctctggttttgcaaaaatgcaaaaaaccctaatttcttgtcagctagtcctaggacctggtcttcaaaaacacttgtatgggctgggcgcagtggctcatgcctgtaatcccagcactttgggaggctgaggcgggcggatcacttgaggtcaggagttcaagactagcttggccaacatggtaaaaccctgtccctactaaaaatacaaaaattagccggacagggtggcgggtgcctgtagtcccagctactcaggaggctgaggcaggagaatcgtttgaacccaggaggcagaggttgcagtgagccgcgatcatcccactgcactccagcctggcaacagagcgagacaccatctaaaaaaaaaaaaaacaacacacatttgtatgggttttcccttcaggggactgaccctctcattcaggtggaattgatgtcagactcctgggaactcacactgaggccatttaatagtctccataagctccaatgttcatagctggtggagatcctctcctatgaccatgccaatccctgcaccactcatgtatgtgtatgtgtgtgtgtgtgtgtgtgtgtgtgtgtgtcttgctctgttgcccaggtgggaatgcagtggtgcaatcatggctcactgcagcctcagcctccccagctcaagcaatcctcccatttcagcctcccgaatagctgggaacacaggcacacagcaccatgcctggctaatttttctttttctttttcatagagatggggtctcactatgttgcccagactgatcttgaacccctgggctcaagcgatcctcccacctcagcctcccaaagtgctgggattacaggtgtgagccaccccacacctggccttccccactcttttgttacaagactatcgtgaacatctttatgtttgtggtcctgttgcccttgtgcaaatcgagaaaaggtgcatcttccaggggggtgaattccaaaatgtgcccccctggccagggctgtgtgtggcctgggaagggaaccctggctggatgtcagtcctgctcacctctcctggggtgcttcctacaaggcacacaggacttcagctgtgtctgmgcaccatgccatgcagctgccgggtcttatggcctcggaatacaccatcaagcatcaagtcastggatcatggcgatgagtgttttagcatcaaatttctccctgaaggggttggatgaagtcgctttctcagtagcaatatatgagagtgtaaaccaaaaataaaattctaagccccccaccacccaaccatctgaatagacctctcctgtcagccagggcactccaaagttaacctgaaaaatgggttcagtccctgatgggaagtgggggtcggacatgcctccttataccctcctcccttttggaattcaggaaaagctgactagcagtcatgtcaacacaaatttttttttttttttttgagatggagttttgctctttttgcccaggctggagtgcaatggcgcgatctcagctcaccgcaacctcggcctcctgggtttaagygattctcctgcctcccgagtagctgggattacaggcatgcgccaccacgcccggctaattttgtatttttagtagagacagggtttctccatgttggtcaggctggtctcaaactcctgacctcgtgatctacccaccttggcctcccaaagtgttgggattacaggcgtgagccacctcaacacagattttaagtctgataagaaacatttacattctgttctctctgaagcctgctacctggaggcatcatatacgtgataaaactttggtctccacaaccccttgtcataacccagacattcctttctattgctaataactctttaaaccaatagccaatcagatatttttattttattttccatatatttatttattaattatttttatttatttatttatttattttgcgatggagtctcgctctgtcacccaggctgcagtacagtggtacaatcttggctcactgcaaccaccacctcagcctcctgagtagctgggattacaggcacatgtcaccatgctcaactgatttttgtatttttagtagagacagggtttcaccacattggctaggctggtctcaaactcctaacctcaaatgatctgcccaccttggcctcccaaagtgctgggattataggtgcacaggtgtgagccactgtgcccaaccgtcaatcagaaaactttaaatctacctataacctggaagcccccccccgacccctcctcacccctcacctctacccctccatgacttcaagtcgtctcacctttctggaccgaaccaaggtatatcttagatatatttgattgatgtctcatatctccctaaaatgtataaacctaggctgtgccccaaccacctaggccacatgttctcaggatctcctgaggactgtgtcacgggccattggtcactcacatttggctcagaataaacctcttcaaatattttccagagtttgactcttttcatcagcaagaggaaccattcccagaggtactgtcttagtctgctcaggctgctgtgacaaaatcccacagactgggtgacttaaacgacagacatttattttctcacagttctcaaggctggaagtccaaaatcaagttgtctgtggggtgagttctttctgaggactctctctgcgatttgcagacagccaccttctcatatcctcgtatggtctttgctccatgtgtgtctctgttctaatcccctcttcttagaagagcactagtcattctattggaatgtttcaaagttttatcatgcagatgtgtgagaggcattggaaccagagtgactctatcttgaatgagggctaggaaaaatgaggctcagccttgctgggctgtatccccaggaagttaggcattcctagcctctagatggttatggttaagggaacagattcataatgtttactaaacagactcagacccaggaatgtcctgatatcctgatatcttgagaacagacgcattcctaattttgctttaaaaataataatataagttcttgtaaaatatagtaattatggtttttggtttttttttttttttgagacagagttttgctctttgttgcccaggctagagtgcagtggcacaatctcagattactgcaacctccgcctcccgggttcaagcgattctcctgcctcagcctcccgagtagctgagattacaggcaggtgccaccacgcctggctaatttttgtgtttttagtagagacaggatttcaccatgttggtcaggctggtcttgaactcctgacctcaggtgatccacccaccttggcctcccaaagtgctgggattacaggcrtgagccaccgtgcccggccaaaatagagtaattatgaaaattaatcctttatcacaaatacttgtagcagagcacatctccccatgtttttttgttgttgttgttttcctatatataacaaaaggaggaggtggttgcatttctcctcttactttccgtaacaccctactctgtggagtaacgattctttcacccytttgctttcttaacagacttgctttcgctttgcactgtggactcaccctgaattctttcttgtatgagatccaagaaccctttcttggggtctggatcgggacccctttccagtaactgatgaaggctccaggtagcaagcttcagagagaatagattgtaaatgattcttgtcagacttaagctctgggtggatattaaatgctggtcagctttccttaaatccccaaagggaggagggcatcgtgaggcatgtctgaccctcccttcctgtcacggccagaactaggttttcaggttaactctggggtgccctggccaagaggaagggttcattcagatggttggggtggtgttgtgggggggtaggagttggggagggtgttggcggggggacgggagggatgggggtgggggggaggggcttatcattttatttttggtttacgctgtgaaaggaaaataaatctcgggaccccaaaatcaccaagttaaagggaaaagtcaagctgggaactgcccagggcaaacctgcctcccattctattcaaagtcaccctctgctcactgagataaatgcgtatctgattgcctccagttggaaaggctaatggaaactctaaagaatgttggccggcccgtggctcacgcctgtaatsccagcactttgggaggcagaagcgggtagatcacgaggtcaggagttcaagaccagcctggccaagatggggaaaccctgtctctactagaaatacaaaaattagctcagcatggtggcgggtgcctgtaatcccagctacttgggaggctgaggcagagaatcacttgaagccaggaggtggaggttgcagtgagtggagattgcgccactgcactcccgcctgggcaacagaacgagactccttctcaaaaaaaaagaatgcaaccattcacttcttatctacctgtgacctggaagccccctccctgctttgagttgtcccacctttccagaccgaaccagtgttcatcttacatatattgacatctcaggtcttcctaaaatgtctaaaccaagctgtgccccaaccgccttgggcacatgtcatcatgacctcctgaggctgtgtcacggttgtgcatccttaaccttggcaaaataaactttctacactgaccgagacctgtctcagaaacattgggttaacaacrctctcacatattgctgctgagaaggcagcttcatttggaacttcacgccaaaaaccccattttaccttaattacctctttaaagaccctgtctccaaatacagtcacattctgaggtactggaggtaagagcttcaacatgtgtttgtctgtttatttgtttatttatttgagatagagtctcgctctgtcacccaggctggagtgcagtggcgcgatctcagctcactgcaacctccggctcatgggttcaagtgatcctcctgcctcagcctcccaagtagctgtgattacaggcacccgccaccacgcctggctaattttgrtatttttagtagagacagggtttcactgtgttggccaggctgatcttgaactcctgacctcaagtgatccrcctgcctcagcccccaaagtgctgggatttcaggygtgaggcaccgcacccagycagggcttcaacatatgaatctgggaagagagagaagtcagctcctagttggcaacctcacaactgctgtctacactgacaacgatcattttcccatccccctctctgccttccatttmcaagtcttgctttcagtccccagaagcagctgatcctctttcttcctgggcaccacaggtggcatccgggacaagataatgagcagccggaagcacctccacctggtggatgctggtttagccatcaacactcccttcccactcgtgctgcccccgacgcgggaggttcacctcatcctctccttcgacttcagtgccggagatcctttcgaggtaatcgagaagggctttggggccggtcctgggtgggaggtgggctgyggcgaagctgactttgcggaggaactgaggacgcgggctgggaagcgggcaatggggaggtgctggctgggaagtccagagagccaaatcaactcacccatcgctcccgaagcacccgcrgtcggccacatccaacgaacttctgatccaaagccatcccagaccttcccgggcccctcttcctggcagatgactctccccgcttctgcgtcctgcctgcccattcataccagtttgaactgcaacagcctagctcctcacctgtgcacctccttccccaggtgtgcacgtctccagccccgagcgcgtgtcttcctgctcatctgggtttcctgggcaaatagtggccctcaataaatgtttgctgagtgagaacatatgcaagtatatttgtcttagtacatattgcaccttcccagtggccactaggatccgttctccctgccttcatatcccagctctgccacttaccagctgtgtggcctgatccaatgtgcgtaacttctgtgcatgtcggtttcctcagctgtaaaattgggctaacgatggctccaccaggagttgttctgtggattaaattaatacttgttaatacatgtgaagtgcttagcacagtatctgccacttactgtggggtttataaacattttcctcccctcccytcccctcccctcatggcctcctttcgagactgggtcttatggtgtgatcatagctcactgcagcctcaacctcctgggctcaagcgatcctcccacctcaccctcccaagtagctgggactgcaggcacacaccaccacaccaggctagttttctaaattgttttagagacagggtcttgctatgttgcccaggctggtcttgaactcctggcctcaagcgattctcccaccacccaaggctaggattacaggcacaagccgccctgcccagctattttattaaaaaatatatacacctacataatatataactatatctattacatgrtacataccaatacatagtagtatatataaaataatcatggtaaaacatatcatctattatatttatgtgtaatgtaatatatatttatattcacacacttctatcagtttacattctgtaatatgaattaggaacatccatcctcctccccataccatratccagaaccaacttgtcaccatctttctagacccttggcccaggaatacccaggctttctggtcttaggatttctgctgaaataaatatcccaagacaatatgataaaggtggaatgagatatcaaggtcttgggagtccttttctgccaaatctctgctgcatgaccccgagcgataggcttaacctctgaacctcagttttctcatcctgaaaatgggaatcacatcatctggctcgcaggagatctgcagagtctctgcaccatgcctggtccatagctggtgttctggattaacaacaatgcttatctggtgatgatgagaatagcaagagtaataggaagaaaaccggcagcatttgttaaacttcaatcaaagacgacttcagagacctaagctgtccactacagtggttgccggccacatgtggcacttgagsacttgaaatgtgcctggcccaagttgaagtgtgctatgaagataaaatacacctcggattttaatgaccgagtatggaaaaygcatgtcaaagaccttattcgtaattggtatattgacatactwggcagggctctccagagggacagaaccaataggatctatgtctagatgaaagggagtttcaggatcacaaggtggagtcctacaataggccgtctgcgagctgaggaagaaacaaaccaatagtggctcagtccgagtccgaaagcctcaaaagtagggaagcccagccaggcctggtggctcacgcctgtaatctcagcattttgggaggccgaggcgggtggatcagaagatcaggagttcgagaccagcctggtcaacctggtgaaatcccgtctctactaaaaatacaaaaaaattagccgggcgtggtggcaggtgcctgtaatcccagctactcgggaggctgaggcaggagaatcacttgaacccaggaggcggaggttgcagtgaaccaagattgcgccattgcactccagcctggtgaacaagagcaaaattccatctcaaaaaaaaaaaaaaaaaaaaagtagggaagcccacagtgcagccttcagtctgtagccaaaggccgtagagcccctggcgagccactggtgtaagtctaagggtccaaaggccaaaaaacctggagtgtgatgttcaagggcaggaagtatccagcacaggagaaagatgaaagccagaggacccagcaagccagcttctcccaccttcttctgtctgctttgttctagtcacactggcagccaattggagggtgtccgcccacactgtgggtgagtcttcctctcctagtccactgactcaaatgttcatctcctctgacagcaccctcagagacacatccggaaacaataccagctttccaggcacccttcaatcaagtcgacacctaatattcaccatcacaattgattacacatcgaggcaatcacacttttgacatattgcatgagatgaaactttttcctacaaattgggtggttacaaagtaataaacagaattttttttttttttttttgagacagagtctcgctctatcacataggctggagtgcagtggcacaatctcggctcactgcaacctccacctcctgggttcaagcaattctcctgcctcagcctcccgagtagctgagattacaggcatgcgccaccacacccagctaatttttgtatttttagtagagacggggtttcaccatgttggccaggctggtctygaactcctgaccttgtgatcygcccgcctcggcctcccaaagtgcagggattacaggcgtgagccaccacgcccggccaataaacagaaatttaagcaagacatatctgtaacaatttaacagaacctgattgtctaagttttttttcatttttctcaaattcatctttaattctttccatgatggggcttataaggaaactaaccaacatgtagctactatagttgaatgtcaaatcttttttttttttttgagatggagtcttctgtgtcgcccaggctggtgtgctgtggtgcgatcttggctcactgcaacctccgcctcccgggttcaagtgattctcttgcctcagcctcctgagtagctgggattacaggcgcccgccaccatgcccggctaatttctgtatttttagtagagacggggttttgccattttggccaggctggtcttgaactcctgacctcaggtgatccgcccacctcagccttccaaagtgctgggattataggcatgagccactgtgcccagctgaatgtcaaatctttagaaggtacttatgacagtaaattcctctgtaatacaggtatgaagcaccttcatgatatttctgttttatgtgtagaaaagtggctgggtrcggtggctcactcctgtaatctcagtgctttgggaggccaaggtgggaggatcacttgagatcagcaatttgagaccagcctgggcaacatagcaagaccccatctccacacaaattttttttttttttgagacggagtttcgctcttgttgcccgggctggagtgcaatggcacgatatcggcttgccacaacctccaccttccaggttcaagcgattctcctgcctcagcctcacaagtagctaggattacaggcatgcgccaccacacccagctaatttttgtatttttagtagagatgggattgctccatgttggtcaggctggtcttgaactcccgacctcaggtgatctgcccacctcagcctcccaaagtgctgggattacaggcgtgagccaccacacccggccaaaaaaattttttttgattagctgggcatggtggctcacgcctgtagtcccagctacttaggaggttgagatgggataacctgagtctaggagcttgaggctgcagtgagccatgattgcaccactgcactccagcctgggcgacacagcaagatcctgtctctaaagataagtatatgtagaaaactgttagactcaaatattcaactcaatataaaataagaagaagccgggtgcggtggctcacacctgtaatcccagcactttgggaggtagaggcrggtggatcacctgaggtcaggtgtttgagaccagcctggccaacatggcgaaaccctgtctctactaaaaatacaaaaattagccaggcatggtggcacgtgcctgtaatcccagctgctagtggggctgaggcaggagaatcgcttgaatctgggaggcggaggttgcaatgagccaagatcccgccactgcactccagcctgggcaacagagcgagactctgtcaaaaaaaaaaaaaaaaaaaaaaaaaagaagaagaagaagaagaagaagaagaaacacttgttgagactgcatctccttttgctaatgagtggtttctagttgtaatatcactcctctgaataaagaagccacctttgagtacataaggaaaaataaccacatgttaaaaggataagacattactccgacatctctactgggccatctcttcctctaacacttcagaaacttagaaatttaaaatattcttacgttaactgcaagaacaagataaaggagaaatgccctttttcttgagatcacaactatgaagtcatatgcttatgcaacttctgcatttgtgtgcaaaacacaaacacactgatctttttttaacttttaagttcaggggttcaagtacaggtttgttccataggtaaacttgtgtcctggggatttgttgtaccgattatttcatcgccccagtattaagcctagtacccattagttatttctgctgaccctctccttcctcccgctctccacccaacactaggccccagtgtgtgttgttctcctctgtgtgtccatgtgttctcatcattcagctcccacttagaagtgagaacatgcagtatttggttttctgttcctggaaacacatttatacatttatcttttttttttttttttttttttgagacagagtctcgttcttgttgcccaggctggagtgcagtggtgctatctgggctcactgcaatctctgcctcccatgttcaagcgattctcctgtctcagcctcccaagtagctaggactacaggcatgtgccaccatgcccggctaattttttgtaattttagtagagatggggtttcactgtgttagccaggatggtctcgatctcctgacctcgtgatccacccacctcagcctcycaaagtgctgggattataggcatgagccatgagccaccatgcccagcctctttcttgctcttgtcacccaggttggagtgcaatggcgctatctgggctcactgcaacctctgcctcccgggttcaagcgattctcctgtctcagcctcccaagtagctgggattacaggcacctgctaacatgcctggctaatttttgtatttttagtagagacggggtttcaccatgttggccaggttggtctcaaactcctgacctcaggtgatctgcccgccttggcctcccaaagtgctgggattacagacatgagccaccacgcctggcccgcattgatcttaattctccttgcttagttttgtcagtcagcttgcaggacttaacagatgcctttctaagacacagagactgagatgtgttttatgtaagtttagtaacctcagtgctacagtaatgagacatgcagtgtccttttgctctggttcaggacagcacggaaggaggccacaggaaagagaataaatgaaacttgttacaactgagaaactacttctcattaagtttccccatggtgtcacctttatttaatatttatttttaaaattaatttctcctacttctttttactttcttcaagtgcagcaagtagacaattgaaaagtacctttacggccgggcgcggtggctcatgcctgtaatcccagcactttgggagactgagacyagcggatcacctgaggatcaccaacctgaccaacatggagaaaccctgtctctactaaatatatgaaattagccgggcgtggtggagcatgtctgtaatcccagctactcgggaggcaggagaatcgcttggaccagggaggcggaggttgcagtgagctgagatcatgccattgcactccagcctgggcaacaagagtgaaactctgcctcaaaaataagaaaagaaaagaaaagtaccttcacggtgacattatatttctgttacacagtgatgatggagaatatctcatttatcttccaaatacccctgtgaggtggctattacagagatcctttgcagaggtgatgagatgcacccataccacatatctcgttgggctcctgggctcaaatgatcttcccatctcagcttcctgagtagctagggctacaggtgcacgcccccatgcctggctaattgaaatatatatatatatatatatactgtagagatgaggtctccaacatctttctgtggcagagctgggattcaaagcctcatctaggcaccattttccttgccctctgagtcccgcagcccccagccccaaaggttactctctaacctcgcgaatgttgtctctaggtgggctggggagtgcgggtgatggcagaggcttactctttcccttacagaagatgttgtccctgtccaagctgacccttgctctgttgtgtgtctgggctgttagctgaggtcccrttgggtctccaggccccaggggtcttctggaggggtcttctggagaggtcttgcaaccatttcttattgcctccttctcagaccatccrggctaccactgaytactgccgccgccacaagatcccctttccccaagtagaagaggctgagctggatttgtggtccaaggcccccgccagctgctacatcctgaaaggagaaactggaccagtggtgatgcattttcccytgttcaacatagatgcctgtggaggtaggtgcaggggaggagcaggtgagaagccacctgtattagtccatgctcacactgctaataaaaacatacctgagactgggtaatttacaaaggaagaaggtttaattgactcacagttcagcatggatkgagaggcctcaggaaacttacagtcatggtggaaagcgaaggccaagcaagtcaccttcttcacaaggcggcaggaaggagaagtgagtgccagcagggcaattgccagatgcttataaaatcatcagatcagccgggcgcggtggctcatgcctgtaatcccagcactttgggaggctgaggcgggcggatcacaaggtcaggagattgagaccatcctggctaacacagtgaaaccccatctctactaaaaatacaaaaaaaaaaaaaaataaattgctgggcttggtggtgcgtgcctgtaatcccagctactcaggaggctgaggcaggagaatcgcttgaacctgggaggcggaggttgcagtgagctgagatcgcgctcctgcactccagcctggggacagagcaagactccttctcaaataaataaataaatacataccatcaggtctcgygagaactcaactcactgtcacgagaacagcatgagggtaaccacttccatgcttcaattacctcccacgacacttggggattatgggaactacaattcaagatgagatttgggtggggacacagccaaaccatatcaccaccaggccaggccgaatggagctgtgctgtgccctggggacatcttgttacgctccaacatctgatggttgagtgagtcatcctgtccacccttgggcctggaggatgccaggctgcctctctcggtcttgcatgtttatgcatgttgctgcctctctctgcagccttcttgtcctacctgaatatccaaccccttccacctgggcatcccacattcytcatccagtctcaggtgagcagctgcttggaaggcctagcatccaggatgggtggtcctccggggcctgattgtgccacttcccacagtgggctccttttagcttgtcaatcgtgtctcctgcgatgagactcccattagggataaattgtgtctgttttcttccttcatttaaygaacatttattggttacctatgctgcatcagccatggttccaggagaggcaggctagagtagtaaagaagacaggaagcagggggccaggygcggtggctcacgcctgtaatcccagcactttgggatgccaagccggggcagatcacctgagatcaggagtttaaggccagcttggccaacagggtgaaaccccgtctctattaaaaaatacaaaaaattagccargcgtggtgatgcacgcctgtaatcctagctacttgggaggctgaggcaggagaatcgcttgaatctaggaggtggaggttacagtcacccaagattgtgccattggactccagcstgggagacaagagcgagcctctgtctcaaaaaaaaaaaaaaaaaaaaaagaaaaaaggaccggaaggggcatggatcataaaaatatagataaatccataacctcatgtgtcaataaaactttatttataaagccaaagtagtgggccgactggatttggtccacaactgtagtttgccaagccctgatgtaaatagacaaaaatctgcagaattaattgtccaaactcatgatgccttttctttgttggtttggttatgcttcaggtgatattgaggcatggagtgacacatacgacacattcaagcttgctgacacctacactctagatgtggtggtgctactcttggcattagccaagaagaatgtcagggaaaacaagaagaagatccttagagagttgatgaacgtggccgggtaggtgggagaccatagtcgctctgatgcctatgctcgttcagtaagtatctgttggagaactttctctgcaacaggcaggagggytgcatgggtgaaaaaagataggcagtgtctcccctacttgagcttgcgtctcagcaggggacagaccatgaacagggtcaggagtgaatggttttctgaagagtgaagcaggctgtgttcgtttgctagggctgctgtaacaaaataccactagctgggtggcttcacagaaattgatggtctcatggtgctgggggctggaagtgtgaattcatggtatcagcagcgctggttccttctgggatctgtgagggagaatttgttccacgcttgtctccgtgtatattggtccgttttcacactgctgtaaagaactacctgagactgggtaattgatgaagaaaagaggtttaattgactcacagttccgaaggcttaacaggaagcatgggtgggaggcctcaggaaacttacaatcatggtggaaggtgaagggggagcaagcacatctttaccatggcagagaaggagagagagagagcaaagcgggaagtgctacacactttcaaacaaccggatttcatgagaactccgtcactatcacaagaacagcaagggggaagtacgctcccatcaatcacctctcaccaggcccctaccccaacacatgggaattacaatttgagatgagatttgggtggggacacagagccaaaccatatctctgtgaaaggaaaatgaaatctcaggaccccaattcactatgccaaaaggaaaaacttaagctgtggctgggcactgtggctcatgtctgtaatcccagcactttgggaagccaagacaggaggatcgcttgagcccaggagttcaagatctgcctgggcaacatagtgagaccaagtctctacaaataattttaaaaattagctgggtgtggtagcacaagcctatagtctcagctactcaggaggctgaggtgggaggattgccggagcccaggagtttgaggctgcagtgagctatgatggtaccaccccactccaggctgggcgacagagcaagaccttgcctytaaaaaaaaaaaaaaaaaaaaaaaaattaagctgaaagcttaattaagctgagtcatgcaagaaactgtctttccttttgttcctaagccacagataaaaggccacagatatctccacaggtaacttactctatcgatatggtttggctctgtgtccccacccaaatctcatctcgaattgtaatccccacatgtcaagagagggacctggtgggaggtgattggatcttgggggtggcttcccttatgctgttctcgtgagagtgagggagttctcacgagatctgatggtttttaagtggcagtttcccctgctctctctctctctcgatctctctctctcatctctcctgccaccctgtgaagaaggtgccctgcttccaccatgactgtattaggttggtgcaaaagtaattgcggttttgcaactaaaagtaatggcaaaaaccacaactacttttgcgccaacctgataagtttcctgaggcctccccagccacatggaactgtgagtcagttaaacttcttttgtttatacgttacccagtctcaggcagtgtctttatcgcagtgtgagaatggactcatacagttctagaagtcagaaatctgaaacgagtgttatggagcaaaacccaaagcgttagcagggccaactcctgcggaggctccaggggagaagctgttccttgcctttttcagcttctaggggccacccgcattccttggctcatggcccctccttcagcctcttgcttctatcatctcatctcctccttgctctgacctcccgccttgctcttataaggaaagatccatgggattccactgggcccacccagatacccaggatcctctcctcatctcaggatccttagattaatctcatctgcagagtcccttttgccatggaaagtcatgtactggccaggagccgtggctcacacctgtaatcccagcactttgggaggctaaggcaggcagatctcttgagctcaggagttcagaccagcctgggcaacatggcaagacaccatctctactaaaagtacaaaaaaatagcaaggcatggtggtgtatgcctgtggtcccagctccttaggaggctgaggtaggaggattgctgaaccctggggagcagaggttgcagtgagcccagatcacaccactgcactccagcttcgatgacagagcgagaccctgtctcaaaaaaaaaaaaaaaaaaaaargtcacatactcacaggctcyagggattaggatagggacatcattaggagacattattcaacctgccacaaagacacagacacaaccagatgacagaagccaggggaagagttggaatattattctgaatatggtgggaagctgctgttaagttttgagcagggaagtagctttatctgagtcaccttttcaaaggcccaccctagctcctgtgcggttggtccctaggtgagataattagcaccctgaggagcagtttgggtcaatgacctcagggtcgcaaggtagagggaagagaaagccattctgggcctctggaccagtctatgttccccagagagtttccccaaaagccctgcctggcatggggcagggcggttatttgctgctcatctgtcttctaatgaggggttgtatattagtttgctggggctgccattaaaaagtaccacagaggccgggcatggtggttcacacctgtaatcccagcactttgggaggccgaggtgggcagatcatgaggtcaggagttcgagaccaacctggccaacatggtgaagccccatttctactaaaaatacaaaacttagatgggcatggtagtgcacacctgtagtcccagttacttgggaggctgaggcaggagaatcgcttgaacccagaaggtggaggttgcagtgagcccagatcatgccactgcactccagcctgctgacagagggagattccgtctcaaagaaaaaagtaccacagatcaggtggcttaaacaaccgacacttattgtctcacagttctggaggctggaagtccaagatcaaggtgtgaacaggggtggtttctcctgagacctctctccttggcttgcagatggtgcctccctgtgtctacacatgattttcctctgtgcctgtccactccccaccttctcacctgtagaactcagggcttatttatgcttatttgttgactctctctcctcataataaggtgtgcagcagtgtggggtcaggaaccacatcactttgctcaccatggtgttcattctttcattcattgattccacaaacatttcctggatgcctgctagatccagtccgcccaggtcctgcagccgtggctgcatacaggtcagatgaggctcttgctcttgtagaatgtacctcctcccgggggggcaacatgacataaacaggtaaacaaagaagtcaacaggatggccatggagagtaagtgccatggagacgaccgaacgtgcggtgtgctgaggagtraagtgaaagctttttaggaaagggtctgggggtctgggaaggcatcctgagggagagacctttcacctggggctgaatactgagaaggggtggccatgaggaagtcttggggaacagaattctgtgcaaaggaaaagtaaatgcaaagtgtctggagtgggaaagaccttgatctgtgtcttacctatgtctataacattctgtactaatataaaggcatatctgaggctcggtaatttataaaggaaagaggtttatttggctcatggttctgtaggctgtgcaagaagcatggcgcctgtatctacttctggtgaaggcttcagagagcatccaatcctggtggaaggggaaggggggctggcgtgttacatggtgagagagagcaagagagagagaagggaggaaagcaccagtttccttttaacaaccagatctcaagtgaactaatagagcaagaactcactcattaccgcagggaaggcaccaacccattcatgaaggatccactcccatgatccaaacatctccctctgggccccacctccaacactggggatcacatttcaacatgagatttggagrggacgaatttccaaactatatcagtctattcgaggaacagaaggaaagctgttattgctggatcagggtaggggaagcacggaatgaaatgtgattggagagatggacagagatcagawcttgtgaattctggcaggtatcatgacattcgatgtaggccaaagagttacctcctagcccagctcctgatacatgcttaataagcgtagtgttggataaataaacgtttacgtggtaaaagtagatcacaagagctccacaggaggaggtggtggagctccaggtcttctcaatgaatgaaagaatggatgaatgtctttctcctaagtcatgtatgacctgtagaggcttccaggtcttctaatcttatccartgtgcaacactgcctacaaagcacagtggtaacttctaactttcctttctccccaggctctactacccgaaggatagtgcccgaagttgctgcttggcatagatgagcctcagcttccagggcactgtgggcctgttgrtctactagggccctgawgtccacctggccttcctgttcttcactcccttcagccacacgcttcatggccttgagttcaccttggctgtcctaacarggccaatcaccagtgaccagctagactgtgattttgatagcgtcattcagaagaaggygtccaaggagctgaagrtggtgaaatttgtcctgcaggtcccycgggagatcctggagctggagcatgagtgtctgacaatcagaagcatcatgtycaatgtccagatggccagaatgaatgtgatagttcagaccaatgccttccactgctcctttatgactgcacttctagccagtagctctgcacaagttagctctgtagaagtaagaacttgggcttaaatcatgggctatctctccacagccaagtggagctctgagaatacaacaagtgctcaataaatgcttgctgattgactgatggattagctgtgtgtgtgtgtcttggtctgccaccacccctgctgcggcccttttcaccctctgtgtaccctttacttgttcctttcttcccttccccctttcctttccatcttcttccatctatatctcagcaattaagcatggtggttccacagctgggtttggatcttacttctgttatctgcttaccatgagaacatgggcaagagccttcgcctccatgccccagttccatcgtctgtagaatagaccatcacggagcctgtatcctagaaaggcttaaatgagttcatgagtctcaagaccttagaatagttagtctggcaccgacggagttccagagcaattattattcatacaggctttccagaattaaagcaggactgttatgggatgaattgtgtgtcccacccccaccaaaagatgtggccattgtaacccccagtgcctgtgaatgtgaccttgcatggaaataaggtctttaccaatgtcatcaagtgaagatgaggtcaytcgtgtggaccctaatccacaatgactagtgtccttatgaaaaggagagatttcgccgggcgcagtggctcacgcctgtaatcccagcactttgggaggccgaggcaggtggatcacaaagtcaagagattgataccatcctgaccaacatggtgaaacctcatctctactaaaaatacaaaaattagctgggcatggtggcacacacctatagtcccagctactcgggaggctgaggcaggagaaccgcttgaacccaggaggtggagcttgcagtgagccaaatcatgccactgcactccagcctggtgacagagtgaagactctgtctcaaaaaaaaaaaaaaaaaaaaaaaaaaaaggaaagaaaaggggggatttaggggagggagagcattatgacaaatacctaatgcatgcagggcttaatacctaggtgacgggttgattggtgcagcaaaccagcatggcacatgtatacctatgtaataaacctgcatgttcagcacatgtatcccagatttgaaataaaattcttttaaaaaagkgggggggwtttaaagacagagacaggcatgtatacagagaggaaaccatgtgaacatggaagcagggattggggtgaggctctactgaccaagggctgccaaactattgccagcaaaccaccagtcatccgaaagaagaccttgatagcagaaggatcctgttcagaattctgtgttgcattcagtcgtagcttttttttttttttttttttttttttggacagagttttgctcttgttgcccaggctggagtgcaatggcacgatcttgggctcactgcaacctccgcctcctgggtttaagcgattctgctgcctcagcctcccgagtagcagggattacaggcatgtgccaccatgccgggctaatttttttgtatttttagtagagacggggtttctccacgttggttaggctggtctcgaactcctgacctcaggtgatctgcccacctcagcctcccaaattgctgggattacaggtgtgagccatcgcgcccagcctcggccatgtcttcttagtctcctccaatctcgaacggttcctcaatctttccttgattttcatgaccttgacatttttgaagcttacaggccagttattttgtaaaccatccctccatgtgggttcgtctgacgtctgattatgatgagattcaggaatcttacagaagcgatgctgttctcgtgacatcctgtcaggtggtgtgaaattccaacttgtcacattactgatgatgtccactttcattgactaagatggtgtttgccacgtttctccactataaagtaactcctttgaaattggtattttgtagggaggtattttgagctctgtaaatatcaaacttctcacttagctttttatttatctgagtatggactcctggtttcttctgtggtcctgtataatttgttactatcattatttattttgactctcaaactgcccagtatggccaatggagcttcttcaagcagactcctgtgttctttccacatgttctcacaacactttgagcaatttcttgctttaagcataggacgtttgtaggctcatcttgttctttttttgctctagacatggaatcagccaaatttcctaggcactctggttccatttggtggagaatggtatatagaagtcaagatttggatgctagtggtgctcattcgtatgggccatcattgtttctatgttctcttagtggagagagctagagaatatgtgtacaaatgttcctatacacactgaaactatgtgtttatttttatctctctatgtataattgagatccatgaggacataccaacgcctccagttatagtccaacaccacagggctcattcgactttcctcctttctgtcttagtaactcccttttccaacagtaggagacctggcccccattccccttactcactgtgtgtagccaatttcccttttcctttgccatttcacccctgtggggatgtctttcccagcctagtctggcttcaacaccatacaccatgctattcccatgagtggacatttctctctctgcttgggttatgacaacccatgccagatcccctctatgtggcctccttcctaattgccttacagtgcaaacctccaccccagacaatgcctgcatataaatgcccccgccccactcagctcatgttccaacactgcacaccaagctgcccatctgtggatttatccccaccatctccagccccaacaccctgggtcatgctgcccctctatgtggacttctcctcaccccactaccccactggaatgctggctctccacgccagatggcccccagccccctcctcccctaaccctacctagtgtggagtcgcaaaacccctttgggctttgacaccaccataacttcacaccctccctgacacccccaccttgctttttccctctaaatcattcaggaaagacagaaggaaagagatgaacagaggaagagcaaatgccatgctcttagtcaccgtgtacgcccacttcctgaagtccatgcttgcatcctgctcactctcacacattcccgactcacccaggaaaactccctgaggccaggggtgctgagctctccatctcactgcccagaggccagtgttggagtgacccttcacatgcttgttggaacattgaataaatgatgccgtctgctctaatcctccattttcttttcttttttttctttttttttctttttttcgagacagggtctcactatgtcagccaggctggagtacaatggtgcaatcgtagttcactgcagcctggagtgcaatggtacaatcatagctcactgcagccttgaactcctgggctcaagcaatcctcccatctctgcctttggagcagctgggactacaggtgtgygccaccatgcacggctaatttttttattttttgtaaagacagcctctccgtatgttgctcagctggtctcaaactcctgggctcaagcaatcctcccacctcagcctcccaaagcgctgggactacagacatgagcaccacatccagcctctaatccccatttataaaatgcactttccarttccactctggggataaaggcgtcacagaacctgactctgcatttccccacccatatcattcaagccagatggggaggcagggacagctctggtccctccccaacccgggtagagatttccagcccagctgtcacagctctaagacaccgggaccgaaggagaagccaagagaggcaggaagaggtggcaaaggagtgctggagaagataaggaggctgagctccgacagggagcagggaggaggggccatcttgagactggtgccctgcgagctccaccccacccctccatgcagttccccatgggccccgcctgcatcttcttgaggaaaggcattgctgagaaacascgggtgaggtggggagtgagggggaagggcggtgggcggggcaaagggagcaggggtgtgggacaaagaaggggacatgatggtgccacagaaccaggggaacaggtggatagagcaggagctgagaaggtataagaaattccaaggaccctggtggggtcatgtaagccagtgagataaatgggtgggggtaaaatcaaaagtcaggagcaaagagaaggagagaaaaggaagaaaaatgaaaagggaaagtgggatgatgtcattgttgagattaccatcattcttttctatggatgctcattgtgataatggtggtgatgatggtggtggtggtgatgataatgatgacgttaataacaatagctgccacttattaagtcattgttctgtgcccagccctgtgcaaagggatttgcacacctgatgttatttacacctcagaacaactcatgaggtcagtgactttcattcccattttacaggtgaggaaagtgaagctctgagtcatgaagtcatttgccttaagcttacacagttagtaagtggcagggtcggccaagtatagtggctcatgcctgaatcgcagcatcttgggaggcagaggcgggaggatcacttaagtccaggagtttgagaccagcctgggaaacacaagaccccatctctactaaaaatacaaaaaaatagctcagcatggtggcatgcatctgcagtcccagctactcaggtggctgaggcaggaggatcgcttgagcccaggaagtggaggctgcagtgagccctgattatgccactgcactccagcctgggcaacaaagtgagactttgtctcgttaaaaaaaagtaagtggcagggtcgggtttgcttgattcctgtgggcatgctttttaaaatttttttatttttccatatataccaacttgtccagatatgtgggcatacttttcattgttaggctttaagatcaccaaaaaaagagaataaaaaaggccaggcagtggctcacgcctgtgatcccagccctttgggaggccaaagcaggtggatcacgaggtcaggaggtcaagaccagcctggccaagatggtgaaaccctgtctctattagaaatacaaaaattagccgggtgcagtggcaggcgcctgtaatcccagctactcgggaggctgaggcaggagaatcgcttgaacccgggaggcagaggttgcagtgagccgagttcgtgccactgcactccagcttgggtgacagagcgagactgtgtctcaaaaaaaaaaaagagagagagaatgaaaaaaagggtgataagggaccgcaaggaggggatcagatgaaagagaagctgagggaaaggctccagggataaagggagatgggaaggctaaagagaccagaggtcagtagaatttccttgttaacatgccatgtatatgtaagcccaacccttcaggtatgtgcaggagtaggtggggcagcaataactggacattctcagagtgtttaggaactggtcatgctggcactgaccctcctgcctgaaagccattgaatgctgtttccatgcacagagattctaacctttggcaggaagattggaggcaggtgagaaaggagtgaatgggggctagtgtgaagaattctgacttgggagtcaggagccctgaattcaaatcccaatactgtgtctgacttgccccatgacctccagggagcaggtgaatgccttcctcccttgggaggggatctgctgcttgtgagctgtgtgaccttgtgcaggttccttaacctctctgttcctcagctttctcatgggtaagatggaaacgagatgtagatctgcatcacagagcagtactgaggtttaaatgaaatgattgtggaaactgcctggcacagagtcaccactctgaatgagttagctgtggttgtgaagtctcacttttttcatctggagattggactccccagtgtttaagaccccctttgacacaatgtgatgggtgtttgtctcagaaag

SEQ ID NO: 93233 - DNA, 59261 bp, Homo sapiens
  misc_feature (1)...(59261): n = A,T,C or G
gcaatggcacgatctcggctcaccgcaactgccgcttcccgggttcaagcgattctcctgcctcagcctcccgagtagctggattacaggcatgcgccaccacaccgggctaattttgtattttcagtagagacagggtttctctgtgttagtcaggatgatctcaaactcccgacctcaggtgatctgcccaccttggctgcccaaagtgctgggattacaggcatgagccaccgcgtctggcctgttttgttttcgtcacccaggctggagcacggtggtgcaatcatagctcactgcagcctcaacctcctgggctcaagtggtccttccacctcagcctcccgagtagctgagaccacaggtgcaccgacaccatgctcagataatttttaaattttttgtagagatgaggccttgtagcccaggctgatatcaaactcctgagcttcagcgatcctcctgcctcagcctcccaaagtgctgggattacagaggtgaggcactgagcctggcccccagaggccccctctttggcctggaggaaacacctcccaatgtctttccagcctctaggcctttgtctctgccaggctttctaacaagacgccttttccaccactcaagtcccacttacccatctggtgagttcctctgtccttggttttgcctactggggcatccttttcctgggaagtcattcctggcctcccaagaaggtcctggcctctacagccagggtatcaagcacatggaacttagcccaagccagcagtcaatacaaatagcctccaagcacacaccacaagttgccacattttttaaaaaaagcaaaaagaaataggtggccaggcacggtggctcacgcctgtaatcccagcactttgggaggctgaggtgagcagatcatttgaggtcaggagttcaagatcagcctgaccaacgtggtgaaaccccatctttactaaaaatacaaaataattagctgggcatggtggtgcgcccctgcaaccccagttactcaggaggctgaggcagaagaatcacttgaacctggaaggcagaggttgcagtaagccgagatgcacagatcgtgacagagtgagactctgtctcaaaaacaaaaaagaaacaggtaaaattaattgtagttttctccagctttaagactggaagggccaggtgtggtggctcacctgtaatcccagcactttgagaggctgaggcaggaggatcatgaggtcaggagttcgagaccagcctggccaacatggtgaaacttcatctctactaaaaatacgaaaaaaaaaaaaaattagccgggcatggtggtgggcgcctgtaatcccagctactcaggaagctgaggcaggagaattgcttgaacctgggaggtggaggttgcagtgagccaagattatgccactacactccagcctgggtgacagagcaagactccgtctcaaaaaaaaaaaagactagaaggaaaaaagaaaagaaaataattaattgtaggaatagattttattcaatttgatgtatctaaaatatcaccacttcagcatgtaatcaatatagaaattacccatgagatgttttatatgctttgtatctcaattttgatgctcaatttcgaaaaggtacattaaaatggaattaattaaatgaaaatttaatttcatttaaattaattaaaatgaaataattttttattttttaaaaatttttaaaatgaaataaaattaattcattttaattaatttaaattaattttaatttttttaaattaaatttatttaaattaattaaaatgaaataaaatggaaaattttcactttctcagtcacattgcacataggtgctaaatagccacctatggccagtggcttctgggatggacagcacagatgtaagccatttacttacatgtcttgtttgtggacacaatatcagagactgacccagaggaggtctctacagatattagttggaaaaatagactattggatgcctggatgaatggatgagtggatgcatggatggatggatggatggatggatggatggacggatggtcgaatggatgggtagatggttggatggatggatgaatggatggaggatgcatagaaagatggatgcatagatggctggttgaatggatacctggctgagtggatgaatagaggatggatggatggatagaaggatggttgagtagatgcttggatggatgaatggatagacagtgatgaatggatggcaggatggatggatgaatggatagatgaaggaatggttgggtgatggatgaataaatggctgaatgaatgcaggatggatggatagatggatggttggatggttgggtggctagatgaatggatggaaaatggatggatgggtgatggatggctggatagatggatggttgagtagatggttggatggatgaatggatggatagatgatgaatggatgaagaggtggatggtttgatggctgatgaatggatggagggatggatggttggatgggtagatagatggatgttgaatggatgattggataagtggttgggtggctgaatgaatggttgggtggatggtcgggtggatggatgatggatgaatagagggacaggtggatgcatagatagagggatgaacagctggagggatgaatggatgtataatccttgctcctctcactacccatgaccaagtggctctgggttttccacttgcattttcccacactcttcatctttttttttttttttttttaattgagaccgagtcttgctctgttgcccaggctggagcacagtggcacaatctcggctcactgcaatctccacctcctgggttcaagcaattctctgcctcagcctcctgaggagctgggattataggcacccaccaccactcccggctaatttttgtatttttagtagagacggggttttactatgttggccaggctggtcttgaactcccgacctcgtgatccacccgcctgggcctcccaaagtgctgggattacaggcatgagccaccaagcccagcccactccttcatccttctggtctcgtccttgtctcccagatgtccaagcccctcagattcatttctgggggttgatggtctccactagtatctctgcactctcacaattggctaaaatgtcactctggtgtcttctggttcctccttgccacctctgtaggagtctggacccctcgccttccagaatcaggcttttgcatctcctcagctccctcctcattctccacagagattcagtggacttctcctggcaccaccatgaccttcactcattccatcacgtcttcctgtgaccattcattccatcaacaggcacttattgagcatttactatattccaggctcttcccttgggaaataaccgcagatttgacatagaacaagcccttctttcatggggttgacagtctagtggggagatagatggtaaacaagacaaagaagcaaaacatttaggaggtcagatggtgacgagtgctatgggaaaaagtaaaacaggaaagaggaatggagaagttggtggacgagcctgggggaggtgacactgggcagagtcagacgataggagcccacgaagctcccaggtatcaggaacatgcgggaatagcaagggcaaaggccctgcagtaggagcctcccctgggtcttaggccgcctagtttggccagtttctttccattgcccactcaggcacaacctcaggccctactgctccccaaccttcctgtgccccggggatgcctccgcacctgcctgcragtttccctctcaggatccctaaggacctgggcattcccttccccagactctccctamccccccaccccagcagcacacagagccagggacaaagggtcattgaatagaaaacaaaggtgaagacagcccagccggaggcctggtggggtgtcatggttcagtcccccacctccgacatcagaggggttcactcagcctcagagggggatgcctggccctctcacccttccacccaccctgcaagagagcccttttatcagcaggaacatcaaggcttaacactgaaagtatcaaggcagaatgttgaggatgtggactcggtagtggctgggggcaggggcgggtgctcccacagctcagcctcctggagacgggtcttggggtggtgaattgagagatgggataccccagaaccctccttttctgcttaccatcagagtgaaggcgggcagtgctgtgtgccctgggggaagccacattacctctctgggcccccttcctgcatctgttaggtgagtctgacgtcttccatccccctcacctatgcaacaataattggtcagtatatacaattttatttgttttggctttttttttttttctttttgagatggagtttcactcttgttgcccaggctggagtgcaacagtacaatcttggctcgctgcaacctctgcctccagggttcaagtgattctcctgcctcagcctcccgaatagctgggattacaggcacctgccaccatgcccagctaattttttgtatttttagtagagatggggtttcactatgttggccaggctggtcttgaactcctgacctcaggcgattcacccgcctcggcctcccaaagtgctggaattacaggcgtgagccattgcacaggctttcttttggcattttttttttttttttgagatggagtctctctctgtcgcccaggctgcagtgcagtgatgtgatctcagctcactccaacctccacctcccaggttcaagcgattctcgtgtctcagcctcccaagtagctgggattacaggcacctgccaccactggtggggagactggcttcatgactccaggactctgaggggtcagggaccaacagctggggagggccagggtttggggtgggggcagaagagaagagaacaccgtctatgctgagctcactgtgtaccagatcctccaccagcagctgagagtgtctccctcagtcctcacaacagcccgatgggtgccattcacagatggggaaactaaggcaagatgagcctatgagcaagatggttcccggccccacagctgggaggcactggagctgggatttgaaccagggctgtgaccttcagactctcacgcccaaccatatctggcagttgtctctcatatctgtgtctctccctgtccctgacctttctatgtatctctgtctctgccctctgtatatcgctgctgggtctctcagggtctctgacccctgtgtgtctctgtctcctctgggtgtccgtgtgtctctgtctccgccctccgtgtatctctgttgcgtctctcaaggtctctggcccctgtgcatctcagtcccctcctggtctctgtctcccrtgccctctgccctctccctttctccctggctcccgccctgtctgtgctgccgtggtcctggctgtgcctctgtccctgtgtctgtttccagggtgccccttacgcgtcagcccgtgagggcaagtttctgtctgccccttccccagcggtggcctagtgcttggaacagcgcctggcagacaggagatgctcagtaaatatttctcaaatgaataaaggaatgaatgagtgaatgaatgaatgaatgaatgaactcgctgagatgggcgagatcagcgccatttcccaaatgagcaacgtgggctccaggtgggtgcccacaggcccagaactgccagcccggaaggttctggcgtgggcttggcactgaccccctggactctgcccccagctgagcaccagacgccaggacgtgcccatcactgctcctccccgccctcagagcagggtggctccctctggcctctccccgctgttggaggcgtgggtagcagctgggagaaccggctgggtgctgcccctccccttgggccgggcacggagtaggcacctggcgggctccccaggtggcagacgctgtcgctgygcacacctggcctctgtgccgcctgctccctgctcgtcctcccctccccaccctcacccacctgccatggacgggcccgcygagccccagatcccgggcttgtgggacacctatgaagatgacatctcggaaatcaggtgaggcccagacctgggcaggagccaggagatcccagggaggaggtggctgtttgggggagccggggactgtggcaagggtggcctccagccacccgcagccgcaggcctggcccagacttagctggaggggctgggctgggctggggcatccagtgtggtgtataggtccctcctgagaagggagtgaggacccgaccgtgttgagtcaccagyggggatgcctggggtgtccctgtcgctctccgggcctcagtttttctgtctgtcaaaggggcccacaagccctgtgtctccctgatagagcagtggaagagagcaggcagcttggtgcatagtagttgctcaggaaacacaacagcctgtagtacccaggacaccccatgcaagccctgaaataacgggggtgcttgggggtgaaatgggagagactgggatgctgctgagacccccagagggagaagctgtgttctagggcacttggggcggagagggcaggctctggactcttcaggtctcctaacagtggttagggcagagcactgcccacttccatgagctcagcgtgactccctcttcctggggatgagtcagacactttgacagtacctgctttccagatggggaaactgaggctgggagggaacgcgacatgaccgcaattacgcagctagaagcaaatctgaacccggtctgtctcacgccagagcctgtggtttctcctgctcctcacagccttggtgatgtcccctttacacccctccccgtggctccatcttttaggggagcgcagaggcccagagagggcaggcagcctgccccagatcacacagcaaactgctgagacaatctccaacccctcgtatcttgcactcttgccaagtgagaccttcctggcagcctgggcccctccagccaccgtgggctgtgaggagggagacaaccaagacctgttctcagcccagttgcctcattcctttcttattttattttatttttttgaaatggagtttcgctcttgttgcccaggctggagtgcaatggcacgatatcagctcactgcagcctccgcgtcctgggttcaagtgattctccagcctcagcttcccaagtaactgggattacaggagcccgccaccatgcccggctaattttatttttgtatttttagtagagaaagggtttcaccatgtyggccaggctgttcttgaactccttgcctcaggtgatccacctgcctcggccycccaaagtgctgggattacaggcgtgggscaccacgcctggccgcctcatttcattccactgtttcaggccctcccctcccctccctcagccagaagctggggcatgaagaggccttcctgggtgcctgggactccagagacaggagcagttcaatcctgattgctgtgtgacctagacaagcttcctgatgtctctgggcctcctgggctgagagctgtgaccaggctggcccagttctgcgtgagggaggccccagcattctttactcaacattgtctaatccaggacttctgagttctgcaattcttctctccagagataaacagataagccagctcgcctccagggttcccgcctctgggaaggcctcacccccaccccagccaggcacctgggagccttttttttatctccgcgacggctctgccagctggtcataaaacgccctgagtgacctcgctaagtgggtgaccttggtttagtcactgaccctctgcgaagctcggtttcgtcatcgtgggggagaatagccctcccctgcaagactcctccagccctgatggctgcagagccctgggggggtgcccttaggacctcaaacttccaggcacttctggaatcccccaggcctggaagcgtgcctctccccagcgagcctgctggagcatccccctggggcccacttccttcgggatgtgcccctcccagaccccctcagatacgccacgtacccccccagattcgcacctcctcccaggttgcccatctcagggatgtcccctccccatcactggctcagatccacagggcttctcctggccccgacttccccctctgctcgcccccagcctgtcagtccccaacccccacccctgtcccctgactctctgccctggttcttcctctcggttgccacagccccagctcaggcctcctcatctccccccaacctcaccactccagccttggctgtcccaggctgctcctcccctcctcccagccatccagtgaattcctcagcgcccagccctcacccaccccgcccccccagcctcctcacctgcattccagctactctactgctttttttttttttttttttttttttttgagactgaatctggctctgtcacccaggctggagcrcagtggaacgatctcggctcactgcaacctccgcctcccaggttcaggtgtattacctcatctaatcctcacagccatctgagatgaacccactttgactgctgtcatcctgtgtcagagatgaggcccagagaggttgagtaacttgcctagggtcacacagctgccaagcagggcacggccaggatttgaaccagggaagcctgactgttatcatgccctggacagggaatttagggatgatgagcaagaccaggaaggagcgagatccaggaggtagactcagcccagatgggaggtgaagcgggcgctctgaggttctagcctccgagtagctgggatgacaggcgcgtgccactgcgcccagttaatattattactattatttttttgagacggagtctcactctgtcgcccacgctggagtgcagtggcacgatctcggctcactacaacctcggcctcccaggttcaagcgattctcctgcctcagcctcccaagtagctgggattacaggcacccgccaccatgcctggctaatttttatatttttagttgagacaggatttcaccatgttggccaggctgttctcgaactcctgacctcaggtgatccacccgccttggtctcccaaagtgcagggcttacaggcgtgagccaccgtgcccggcctatctactctattactttgaattccctggccacgcttgttccctgccacagtgcctttgcttatctggctccttccatagggatcccagagacatcttctctctctctctctctctctttgcttatctggctccttgcatagggatcccagagacatcctctctctctctctctctctctctctctctctctctctcttttgagacagagccttgctctgtggctcacactggagtgcagtggcacaatctcggctcactgcaatctctgccttctggattcaagtgattctcttgcctcagcctccagagtagctgggattacaggcatgcgccaccacacccagctaatttttgtttttttttggagatggagtcttgctctgtcacccaggctggagtgcagtgatgcgaacttggctcattgcaacctcygcctcccaggttcaagcgattcttctgcctcagcctcctgagtagctgggattacaggcacactctaccatgcccggctaattttttgtattttagtagaaacggggtttcaccatgttggccaggctggtcttgaactcctgacctcaggtgatgtgcccacctcggcctcccaaagtgctgggattacaggtgtgagccaccgcgcccggcctaatttttgtatctttagtagagaaagggtttcgccactttcgggactttgcgtgcaccagcgcagtgtcctttgcctgggctgacctctgccctctctccttcctttgccaaacttctcaggcgttaagattcaacacgggcaatttaggatttttggccaggggaatgagagaatgcaggcagacacccacgccaggtcccaggtccctgatcacgctggtctagcttcaratctgccccgtggcaccaaaatattggcctgttcgtggataggaaatgaatgtaggaaatctgtgaaaaggacgtcaagaatgaatgaatgaatggaggctccattaagcaacctctgagccggagcttccaggatgagtcagggttagcagacggggaggaggggcagggagtgctgggaaagggaatggttggggcacagggacasaggtggcttcaggagagtaaggggcagctgggtcaggagagggccagctgccrtggaaactccccgtggtgggccatcctgcagcagacctgagtggctctcaaatggttcgttttttaagcacctccagggagagaaactattgttttcagaatacacgcatatgtgatttaaaaaaaaaaaaaaagttgccagctcagtggctcacacctgtaatcccagcagtttgggaggccgaggcaggtggatcccttgaggtcaggagttcaagaccagcctggccaacatggtgacaccccatctgtactaaaaataaaaaaattagccagagttgtgccacacacctgtaatctcagctactcaggaggttaaggcaggagaatcgcttgaacccaggaggcggaagttgcagtgacctgagatcctgccactgtactccagcctgggcaacagarcaagactctgtctcaaaaaaaaaaaagttgtcctaggccaggcatggtggctcctgtccattgcagtactttgggaggccaaggcaggagtatcatttgaggccaggagttcaagaccagactggacaacacagcaagaccccgtctctaaaaaaataaaataaaaaccaaacaaggaattgaccagaatttaattcaggatagcagctcaagggacgggtagatgccacaggaaggggcccagagatatcagcaagatgcatcgctcagaatgttctagtttatggggttcattatgaattatgagaaatttaatatgtgagatcgggctctgtggctcatgcctgtaatcccagcactttgggaggctgaagtgggcggatcacttgaggtcaggagttcaagaccagcctggccaacatggtaaaaccccgtctctactaaaaacacaaaaatttgccaggcgtggtggcacttgcctgtagtcccagctactggagaggctgaggcaggagagttgcttgaacccaggaggcggaggttgcagtgagctgagatcgcatactgcacaccagcttgggtgacaagattgaaactccatctcaaaaaaagaaaaaagaaatttaatatgtgttccatgtggtcttgtatgtaaaaaggacttaaaaggataataagggctaaattaaaatcgtaagaggccgggcacggtggctcacgcctgtaatcccagaactttgggaggccgaggtgggcggatcacctgaggtcgatagttggagaccaggctgaccaacatggagaaaccccgtctctactaaaaatagaaaaaagtcagccgggcatggtggtgcatgcctgtaatcccagctactcgggaggttgaggcaggagaatcgcttgaacccaggaggcggaggttgcggtgagtcgagatcgtgtcattacactccagcctgggcaacaagagtgaaactctgtctcaaaaaataattaaaattaaaaaaattaaaaaaaataaaatcgtaagaggaaaacatttggcacaggcggtaggcaggatgggctgctgacccagtaggctgacaagcccaggatgttataatccctgtaacatccttgcagttgttctcaacctgttgagtgctgtctgtattacctcatctaatccttacagccgtcggagattaacccattttaactactatcatcccctgtaagaggtgaggcccagagaggttgagtgacttgcccagggtcacacagctgccaagcagggcgtagccaggatttgaaccagggaagcctgactgtatcacgccctggatggggaacttggggatgagcaagacccggaaggagcgagatccgggagggagactcagcccagacaggaggcgttagcaggcgctctgcggttccaggcgtttccttgcattccctgcgtgctgggctacggagagtgtcaaggccagagaagccacgccggcctttggacctggggcgcctcgggcagccaaggagagctgcgrtggccgctcctccccgcgctctgatctcgggagtccctggcgccggcaccttctgatctctgcctcttattgacggggagggcgaggaggggccagctctggttttacaaccccggccccaccttccttagggagggctgagccacatgaatgattttatggccaaagccctgccagtcatgaggctgctttttcttttttcttttcttttcttttttttttttttttttttttgagacagagtttcactctggttgcccaggctggagtgcagtggcaccatctcggctgactgcaacagccgcctccggggttcaagcgattctcctgcctcagcctcctgagtagctgggactacaggcgtgcgccaccacgcctggctaaatttttgtatttttagttgagacagggtttcaccatataggtcaggcttgtctcaaactcctgacctcggatgatccacccgcctcgtcctcccaaagtgctgggattacaggtgtgagccaccgcgactggcctgaagctgctttttctgagacgggctgatcaaggggtttcaaacaattaagaaataataaggcattgcctccccgctgggtgagatttgggcaggcagactagggagaggggcttcggggccagcactagcggatgcggggacttggggagaagtggaaaaagatgctcacggttccctccttctccacccagcccctgacgagggactcagccttgaagagtgagggacaggatgcgttttcctttccactygctctttggggtggggggaggcagttgtgcctggtgggcctgtgtacggactggcagaggaaaggttrgaagtggtgatgttcagagttcaggacccatttggttttgttttttgttttgttttgttttgttttgttttgttttgttttggagacagagtcttgctctgtcgcccaggctggagagcagtggcgtgattttagctcactgcaacctccgcctcctgggttcaagcgattctcctgcctcagcttcccaagtagctgggattacaggcatgtgccaccatgcctagctaatttttgtatttttgataaagacagggtttcgccatgctggccagctgagttcaggacccatttggaaagaactaagcagcccagtttgccacccagagggtctggaggaggaactgtgggacccagtgggtcacccatgacatggaataaatgccaggctgagaagggagaccctcgccttgcccggaggcctggagtggaggccctaagagaggtgtggccagttacttacgtggggaccagagccccaaggatctgggaaagtggggaccgtgacaccgcaggcaagaaagcctgcaggggccaggtgccacagctcacgcctgtaatcccaacactttgggagggcaaggcaggaggattgcttgaggccaggagttcaagaccagcctgggcaacatagcaaaccctcatctctctttaaaaaaaaaaaaaaaaaattaaaaagaaaagaagaatgcccacaggaaggcagtcctgggttcgaatgccgcccctatggctcaggagctgggaccctcctggtagaaaggactgccctcagggttgagcgtctgtgaaacgggcaatgaccggggaagggcctgacctgggctcgcagctgactcagcatttgtgctgtttctctctttcctccttccccagttctgagaccgctgctgagccagaaactcgaatgctagcaagggaggggatgggtgaggaatgataataatgatgagcttcctgagcatctgccctgagccaggccctgtgctgaaggctgtgtggggatgagctcactgagtcttcacaacagccctgtgtggtcccagtgttacaatgcccattttacagatgggaaaactgaggccccactcataaccctcatgccagagaaaggaatccaacaggggcttggaactgcagtcagaggctgcccctcagtggccatttcttctcggggggacttgtcacccttatggtttccatgaccctggccaccctccatagatatataccgtgagcccataggaaaacattttctcgtagccacctttttaaaaaaacaaaagaaacaagtgaaattaattttaatcacatatctaatctatctgaaatatcatttccacatatagtcaatttcaaaaaytgtcaatgaggctgggcgtggtggctcatgcctataatcccagcactttgggaagccgagacgtgtggatcccttgaggtcaggagttcgagaccagcctggccaacatggtgaaaccccatctctagtaaatatacagaaattaggacagccgtggtggctcacatctgtaatcccagcactttgggaggccgaggtgggcctatcatttgaacccgggaggcagaggctgcagtgagctaagatcctgccattgcactccagcctgggcaacaagagcaaaactccgtctcaaaaataaaaaaaataaaaattagccaggtgtggtggtgggcgcccgtaatcccagctactcgggaggctgaggcaggaggattgtttgaacccaggagacggaggttgctgtggggctgagatcgcaccactgcactccagcctgggagacagagcaagatcttgtctcaaaaaaataaattcgggcccggtgtggtggctcatgcctgtaatcccagcattttgggaggccgagacaggcggatcacctgaggtggggagttccagaccagcctgaccaacatggagaaaccccgtcctactaaaaatagaagagtagctggtcgtggtggcacatgcctgtaatcccagctactctgcgaggctgaggcaggagactcgcttgaacccgggaggcagaggttgcagtgagccgagatcgtgccattgcactccagcctgggcaacaagagtgaaacactgtctcaaaataaataaataaatagatagataaaataaataaattaattaagataaaataaataaataataaaggtatgctggaagggagagagagaggaggtgtttgagagaaaggaggagagaaaaaaagtgaagagccccaggcgacaggcgtcgtgcagggtgcggttccacggtgtagtggagcatgcgacattcagggaacaagccaaactggacagtgagaacggaacactggcagcccagctacagtgggactcggatgggcagggcctgcggtgagactgtcaggcttcaagggacagagccagggacctcgaacctaacgtgtgttccccatcaggcagatgtgggtgagatgctctacatcccagagccccactcccctcttctccaaaatgggccttggctgggtgcagtggctcatgcctgtaatcacagcactttgggaggctgaggcaggtggatcacctgaggtcgggagttcaagaccagcctggtcaacatggcaaaaaccccatgtctactaaaaacacaataattagccgggctcattgctcacgcctgcaatcccagaactttgggaggccaaggcaggaggatcacttgagatcaggagttttgagatcagcctgaccaacatggcgaaaccctgtctctactaaaaatacaaaaattaggtcaggtgtggtggcttatgcctgtaatcccaacactttgggaggctgaggcgggcggatcacctgaggttaggagttcaaggccagcctggctaacatggtaaaaccccgtytctactaaaaatacaaaaaattagccaggcgtggtggcacatgcctgtaatcccagctactcgggtggctgaggcagaagaatcacttgaaccctggaggtggaggttgcagtgagctgagatggccattgcactccagcctgggcaacaagagcgaaactctgtctcaaaaaaaaaaaaaaattagcaaagcgtggtggtgtacacctgtaatcccagctactggggagggtgaggcaggagaattgcttgaaccccgggaggtaggggttgcagtgagccgagatcacaccattgtactgcagcctgggtgaaggagtgagactatgtctcaaaataaatacataaatagaaataaaaaatcatatgcatgtttatatggatttttattattattattttatttatagatcayagttttacttgttttgaggatatatgcaatatktatatagactttatttatttatttattttttgagacagagtctcacttcctcacccaatccagagtgcagtggcgcgatctcagctcattgcaaccactgcctcccaggttcaggcaattctcttgcctcagcctcccaagtagctgggattacaggcatgtaccaccatacccagctaatttttgtatttttagtagagatggggtttcaccatgttggtcaggcttgtcttgaactcccaaccttaagtgatccgcctgccttggcctcccaaagtgctgggattacaggcgtgagccaccatgaccagctgatatttatatagacttaaagtgtgcaggaattggcaagaaaaaaaaaagttaagcgggaactttccctatcagatctttttttaaaatataaaattttattaaaatagattttttgtggagacagggtcttgctatgttgcccaagctgattttgaactcccgggctcaagccattctcccgccttggcttcccaaagtggtaggattacaggggactgagccaccgcacccagcctcctatcggatcttaaaacctactttacagctactacaatgcaaatcatatgatatccactctgtgacctagcaattctgttcctagttatttgcccaagagaaatgagaacgccggttcccacaaagacaggaacaactgtggcagctttgggagtaatagcctgacctggaaaccgccgaggtgtccattaacagaggactggatcaacacattgtgaatttatttatgcagtggaattctactcagccgcaaatgggaacaagctctaatgtatacacagacacggaaaatgtcagaaacattatgctaggcaaaaacaaccaaaacaccaaagaacctcttgtgtaagatgacagttccagaacatgcaagactgggctgatgcaatctgtacggtgggggacgtagaggggtggcctctggggacagggcagggactgattgagacaagatgcaggcyggggcgcaggcaccgtggctcacacttgtaatcccagcactttgggaggccgaggtgggtggatcacttgaggccaggagttcaagaccagcctgaccaacatggcgaaaccgcatctctactaaaaatacaaaaattagctgggcgtgttggcacatgcctgtaatcccagctactcgggaggctgaggcaggagaatcgtttgaacatgggaggcaaggttgcagtgagccaagttgatgccattgaactccagcctgggcaacagagacttcctctcaaaaaaaaaaaaaaacaaaagaagaggaagaagaagaagaagactgggctgaggtgggttgatcacgaagtcaggagatcgagaccatcctggccaacatggtgaatccccatctctactaaaatacacacaaaaaatgagccaagcgtggtggcaggtgcctgaagttccagctacttgggaggctgaggcaggggaatcgcttgaacccaggaggtggaggttgcagtgagccgagatagcaccactgcactccagcctggcgacagagcaagactctgtctcaaaaaataaaaataacaataaaaaataggtcgggtgcagtggctcacgcctgaaaccccagcactttgggaggccgaggcgggcggatcacgaggtccaaagatcgagaccagcctggctaacacggtgaaaccctgtctytactaaaaatacaaaaaattagctgggcgtggtggcaggtgcctgtagtcccagctacttgggaggctgaggaaggagaatcgcttgaacccaggaggcaaggttgcagtgagccgagatcacaccactgcactccagcctgggcaacagagcgagactccgtctcaaaaaaaaaaaaaaaaaaaaraaagaaagaaaaaaagaggaacttacaagaacaatggaaagattaccccatgaacacccctatgcccaccaccactaaaatttggggttttttaaatttttaaaatttttttcttttttacagtgtccctttcaggatacacttaaattttattatatagtacttgttttatcacagatctttgcatccctctagccatctatcaatccttctgggtttgttgttgttgttgttttgagatggggtttcactctgttgcccaggctacagtgcaatggcttgatcttggctcactgcaacctctgccccccaggttcaagcgattcttctgcctcagcctcccgagtagctgggactacaggtgcgtgccaccaygcccggctaatttttgtatttttagtacagattgtgtttcactatattggtcaggctggtcttgaatgcctggactgatgatacacctgcctcagcctcccawagtgctgggattacaggaataagccactgagcccagcctaatttttgttttttttagtagagacagggtttcgccatgttagacgggctggtctcaaacacctgacctcagatgacccgcctccgtaggcctcccaaagagctgggattacaggcatgagtcacggtgcccggcctaatccttacttttgatgcatttcaaagtaagttacagacatctgaatgtttcaccctaaacattccaggctgcatattattaactacttcagtatttgtttatgggggkgtgtgtgtgtgtgtgtttgngtgtatgtgtgagagagagagacagagagatggagagagagagagatggaatctccctctgtcacctaggctgaagtgcaatggctagatcttggctcactgcaacctccacctcccagattcaagcgattctcctgcctcagcctcccgagtagctgggattacaggtgtgcaccactacgcccggctaatttttgtatttttagtagagatggggtttcaccatgttggccaggctagtctcaaactcctgacctctggtratctgcctgcctcggccttccaaagtgctgagattacagatgtgagccactgcacctagctagtggttttgtttgtttgtttgttttaatagaagtttacctacagtaaaccacacaaatctaaagtgtgctagttttttgtttgtttgtttgtttgtttttgagacaggatcttgccctgtcacctaagtggtacaaccacagttcactgaagcctcgacctccccagctcaggcaatccttccacctcagcctcccaagtagctgagaagacaggcacatgccaccacaccaggctattttttttttttttagrcggagtctcactctgttacccaggctggagtgcaatggcatggtcttggctcactgcaacctccgcctcctgggttcaagtgattctcccacctcagcctcccaagtagctgggactacaggcgcacaccaccacacccagctattttcgtatttttagtagagacggggtttcactctgttggccaggctggtctcaaactcctggtgtcgaactcctgacctggtgatctgcctgccttggcctcccaaagtgctgggttacaggtgtgagccaccgcacctagcctaaatattttattgttatttgtagagacggagtctcactatgttgtctaggctggtctcaaactcctaggctcaagtgatcttcccactttgcttcccattttgggaggatttgggctcccaaaatgctgggatcacaggcacgagccaccgcacccaggctaaagtgtgctcattttgagaaatatatgtacggctgggcacaatggctcatgcctgtaaagccagcactttgggaggccaaggctggtgggttgcttgaggccaggagttcgagaccatcctggccaaaatggcaaaaccccatcattactaaaaatacaaaaattcgagggatgtgccaggcgtggtggctcacacctgtaattctagcattttgggagactgaggcgggtggattgcttgagctcgggagttccagaccagcctgggcaacatggtaaaaccccgtttttactaaaatataaaaaattagctgggcgtggcrgtgtgctcctgtaatcccagctagtcaggaggctgagatgggagaatcacttgaacccgggaggcagaggttgcagtgagccraaattgtgtcactgcactccggctttggtgacacagtgagactctgtcaaaaaaaaaaaaaattagagggacgtgttggcacacayctgtaatcccagcttcttgggaagttgagacatgagaatcacttgaacctgggaggtgctagttgcagtgagccgtgattgtgtcactgcactccaacctgggcgatagagcaagactctgttttaaaaaaaaagagagggagagggagagatgcagagatgcatgtataacccaagtccctgtcaagatgtaaactccttttgagtggctgaattccagcgtttttccaggtccagactcatttaccccgtcccctrttgtttctggccyctcttggaacatcattgccatgatcgccctgggatatatttcactgcgcgcttcctcaagggcatctgtctattccttatgtttctagggggtcaggttcattcggggatctggcaaatagaacacagtatttaaccaggcacggtggctcacacttgtaatcccagcactttgggaggctgaggcrggcagatcacgaggtcaggagtttgagaccagcctgaccaacatggagaaatcccstctctactaaaaatacaaaaattagccaggcgtrgtggtgcacgcctgtaatctcagctactcaggagtctgaggcaggagaatcgcttgaacccagaaggcagaggttgcagtgaactaagatcatgcctgggcgacagagcgagactcygtctcaacaacaaccaaaaaagaacacagtgttacccgtgtgtcggacattggctttgaaggtaggaaggacatrgcacagggaaaaattctgccacttcccagctctcctgctagtgaggaaggcagatttaaagaaggcaacagaccaggtgcggtggctcatgcctgtaaccccagcactctgggaggctgaagtgggagggtcgcttgagctgaggagttcaagaccaacctgagcaatgtagtgagactctatctctacaaaaaatgtaaacattagccaggtgtggtggtgtatgcctgtagtcccagctacccaggaggctaggctgaggcaggaaaatcacttgagcctaggagactgaggctgcagtaagctgtgaccgcatcactgcactccagcctgagcaatagagcaaggccctgtatccaaaaaataaaaataagcagggcacggtggcttatgcctgtaatcccagcactttgggaggccaaggcaggagaatcccacgagcccaggagttcaagaccagtctgggcaacatagcgagacccctgtctctacaaaaaatttaagaattagctgagtgtggtggcacacacctgtagtcccagctactggggaaactgaggtgggaggatcgtttgagcccaggagccggagggtggaggtcgagggtgcagtgagccaagatcaagccactgcattccagcctgtgcaacagagtgagactccrtctcaaaaaaaaaaaaaaaaagtattaaawagggccgcaaaggaggccagcaggatgcggagatgggcagtaatgtgcacggggtgggaggtctcttgctttagccaaggtggtcagggaagacccaagccctgaagacagagaaggagctggccttgaatcctgtaaatgttcccaaacgatctccctaagaggttatgccagtcacactcctgccragagagtatctctgcgccacggccaagggtgagtcatcctgctgagaggttgagctggggacgcctgcccagatgggctccaagtgagggagagcctggcggggagaacagcccggasagaggcagggcagggcgccgggacactgcttggcgcgtcctgggagtgaagcgcattgaacccagctcaggctggtggtgggggagtcttggcaatgctctctctccaaaggcgagttgatcacagacgctggcagtgagtcagcggcaccgccagggctgctgagaaatccctcctgctgtccgatcgcattcctggaagggtgggccgctcagggccccccagctccagtcccactcagrccccagaatcccagcagcccaccactcacttcctttgcgcgcactcttccttctggtccccacacaccgctccctctctcgctaccttcagtctttgctcagatgtcgagttcccagaggggcctccctgacgccaccgttctagcagcatttagcatttagataaatgacaaattttagattaaatgttagataaattttaggctgggcgtggtggctcacgcctgtaatcccagcactttaggaggctgaggcaggcagatcacaaggtcaggagatcgagaccatcctgggtaacatggtgaaaccctgtctctactaaaaatacaaaaaattagcagggcgtggtggcgggcgcctgtagtcccagctactcaggaggctgaggcagcagaatggcgtgaatccaggaggcggagcttgcagtgagccaagatcgcgccactgcactccagcctgggcgacagagagagactccgtctcaaaaaaaaaaaaaaaaaaaaacatatatatatatatatatatatatatatatatatatgataaattttagataaatttttatctaaaattgtaactcactggattcagtgacatctatctgtaatcccagcactttaggaggctgaggtgggaggatcgcttgagcccaggagttttctttcttttttttcttattttttaaagagattgggttctcactctgtgtagcccaggctggtcttgaactcctggcctcaagcagtcctcccatctaggcctcccaaagtgttgggattacaggcatgagccaccatgcctggcctcaagattggttttttgttctgagacacagactcactctgtcacccaggctggagtgcagtgacatgatcccagctcaccatgacctccgcctcccaggttaaagtgattctcctgcctcaggctcctgagtagctgggattataagcatgcgccaccacgcctggctaattttgtatttttagtagagatggggtttcgccatgttgccgaggctggtctcaaactcctgatgtcaagtgatccacctgtctcggcttcctaaagtgctgggattagaggcatgagccacctcgtcaagattgttaatcacatctgcaaagtccgtttggccatttgtggaacacagtctcagatttcaaggattaggacgacaacatcattggaggctgtgatttggccaaccacagtcacagagatggaattacacagagtttaccttccaagtctggctctttcactcagtgcaatgcctgggagagccttccctgtggctgtgggaaccgccggtttgttcttttttttttttctgaggcggagtttcactcttgttgcccaggctggagtgcaatggcgcgatctgggctcactgcaacctccacctcccaggttcaagtgattctcctgcctcagcctcccaaaaagctgggattacaggcgtgcaccaccatacccagctaatttttgtattttattagagacggggtttcgccaygttggccaggctggtctcaaactcctgacctcaggtgatttscctgcgtcagcctcccaaagtactgggattacaggcgtgagccaccgagcccggccagttctttttcatcgctgagtagtatcgcatggcacagaatactgctgtttatccacttacccrtgcaaggacgtttgagctgttcccagggtttggcaattatgagtacagtggctataaacatgagtgtagatgagggtcaagtgtagatgttggtttgaacatataggcttccatttctcttggacaaacacccagaagggagagtgactctggtttttgctggtttttgttttcygtttytktttttgtkttttttttctgagacagagtctcactctgttccccaggctggagtgcagtggcgcgatctcggctcactgcaacctctgcctcccaggttcaagattctcctgcctsagcctccygagtagctgggactacaggcgcccgccaccacgcccggctaattttttgtatttttagtagagacggggtttcaccatgttagccaggatggtctcgatctcctgacctcaggtgatccgcccacctcagcctcccaaagtgctgggattataggcatgagccaccacacctggcctattattatttttagagatgaggtcttgctttgtcacccaggctggagcacgcagtggtgagatcatagctccctgtagccttgaactctgggctcaagtgatcttcccacctcagcttcctgagcagctgtgactacaggtacaggccaccatgcctggctaatttatttatttatttatttatttatttttgagatggagtttcgctctgtccccaggctggagtgcagtgatgtgatctcaggacactgcaacctctgcctcccgggttcaagcgattctcctgcctcagcctccygagtagctgagattacaggcgcccaccaccgtgccyagctaatttttgtatttttagtagagatggggtttcaccatgttggccaggctggtcttgaactcctgacctcaggtgatccgcccacctcagcctcccaaagtgctgggattacaggcttgagccacagtgcccagcctgcccaggctrgtcttgaattcctggcttcaagcgatcctcctgcctgggtccttcaataaatattgacaagcacctccctgctgccaggctctgctgagagtactttaggtacattggcaaacaagacagaacaataacaaaarraaaaaamaccagattttttaaattcccaggctcatggagcttacatgcaagcggagatgktcaataaaccatcaatgtcatatgtcaactgtagagtagctcaggagtgagtgacaggtgtgatggtaggcagagcaggggaagagggtgcagggggtctagctgtaaacaggatgctstagggtagccctcatgataaggggtgacatttggaacaaagacttgaaaaaggtgaggacaagaggcatgaggcaccaygcccggctgcacttgtgtttaatgaaaactatgatggctgctgtgtgaccttaggggactatattaacctctctgggcctccatttcttggagcatgaagtggtcctttcactacycacttcctgaggttctgggagaagtctaggatcatgcatgttcttggcatagagtttctgtacrggtggctcccctcctggtgccaggccctttcctgggattggagggggatggacagagggaattcagaggtttaaggaggctgtggccccatctcctggggcaaggaggctattggtctagaaggtctgcatttagagggtgacatctgtgctgggagcggtggctcatgcctgtaatcccagcactttgggaggccgaggtgggcggatcatgaggtcaggagaccgagaccatcctggctaacacagtgaaacctcgtctctactaaaaatacaaaaattagccaggcgtggtggcatgcacatgtagtgctagctactagggaggctgaggcaggagaatagcttgaaccgaggaaggcggaggttgctgtgagctgagatcacaccactacactatagcctgggcaacagagcaagactccgtctcaaaaaaaaattgaaaaaaagagggtgatatctgacctgtgtggaggtggaaggaggagatgggaaaggcactcagagagtggaaaatgggcgtgcctggagctggtgtctgcagcaaggaggccagaggaggaggcactggcctaggctttgacctgagggcactgaggtgccacaggagggctgggagcagaggaggggcagcggagaagacctggaggaggctgagtcgagggcccacagggagaggagaaggcctgaggtgggcaggaatgcagggacagagaaggaaccaggacccagtagtccatggaggagggaggcaggagggctgggaagttgggcctttaagagttgcatgtctgctgggcacggtggctcatgcctggaattccagcactttgggaggctgaggcaggcagatcacctgaggtcaggagtttgagaccagcctggccaacatggtgaaaccctatgtctactaaaaatacaaaaatcagttgggcgtgacgacaggcacctgtagtcccagctaatcaggagtctgaggcaggagaatcgcttgaacttggaaggcggaggttgcagtgagccgagatcgtgtcactgtactccagcctggtgacagagcaggactccatctcaaaaaaaaaaaaaaaaaatttacaygtccagggggcttgcaggcagarccattcaccctccaggaggctgagtcattcccggggatcacctgcctgctgtggccacccacccggaggagctctgtctgctgtccctgtccctggcctctcgctggcttaattgtccctttcattcctccactcaaatcragmgatatcagcacgccaggccctggacgtgttttgtgggaacaaacaggcctgtttgtctacgtcccaggcgtagagaagttcrtcccggggccagatttgttttacaaggtggacagcaggcacagggtacctgttttaggaatgcgagaatgcagccacgtaggcatgtgggtgggggayaggggggtcctggctctgcgctcaggcccagagagtggcagggtcgggggacatttccaggagcgggaacagcagctccaggggcccagaggtaggactactgctcggtgcatttggaggtcttggctggactgtggsgttcakggggaaggagggactgagtctacagggctgagaggccaccacagcttgggttcaaatcccagctctgttcagctcttgtgtggccacagtcaaatcscttccctccttgaagctccatgtcctctctrtagcaatggaagctacagcggagcccaattctaccccacccactgcacgacaattggtttgtttstatgtttgttactagagtcagggtctcactctgtcacccaggctggagtgcagtggcgcaatctcagctcactgcagcctcaaactcctggctcaattgatcctcccgyctcagactcccaagtagctgggactacacgtgtatgctaccacagtcggctaattttttatttttaaacagagacagtgttctcgctatgttgctcatgctggtctcgaactcctggcctcaagtaatcctcctgtcttggcctcccaaagtgctgggactacaggtgcaagccactgcgcccagcccttgaggagttttcaaagtatccacagcacccarggctgagaactgctacagcagctgaaagccataagtgtctttgactttccttttgtcctggtaaaccccttcattccttccttccttccttcctacactcattcaatcaaacactggttgaacaccaacaagtcccagcactgtgggctccaccctggcctctggggagtgggggagggacccccgatttggagattgtaggtgccaagaggaaygggcaagatgccctcctattcattcatttattccttcagggcctctccaagggcacagggtcttttcttgttggcatctgggttttcctctcctgtaagctgggaaggagatttctccctcaaggagctgttggccagatcaaagactaaaataatgctaaacagagcttccgtttcctgataaatgtatcaggagccaagcacttaaaatatattatcccgttgaatccccaagtaggattaaaacctcaaagcagagattgctcttatcctcacatgacagatgaggaaactgaggatcaaagaagtgaagtccgctgcccaaggcacagaaaggacaagtaggacctatggaagcccagccaaggcccagcaggcgctcagtggctaatcctcctgaaaactaattacctcactgcgcctgcccactggactaaatttgcctggtaaccgatgacatcatcactaattccrcgcccacgctcaacctatgggataactgatgacatcactgaacaaacaaagtaactgcagtttattgaaggcctactgtgtgcgcaaggctgtgctaggcaggcctcctctgagttcacataaggccccgtggtgcctgctactgcatgaaatagccataataattttaactcaaagttatggaatgcagactatgagctactctctgttttaaccttttttttttttttttttttttttttgagacagagtctcgctctgtcccctgggctggagtgcaatggcrcagtctcggctcattgcaacctccacttcttggattcaagcaattatcctgcctcagcctcccgagtagctgggattgcaggtgcccaccaccacacctggctaatttttgtttttgtttttgagatgaagtctcactctgttgcccaagctggagtgcagtggcgcgatctcagctcactgaaacctccacctcctgacctcgtgatccacccgccttgacctcccaaagtgctgggacaacaggtgtgagccaccgcgcctggkatctttattaactttttaaaattaaaaatatatatatatatatatttatatatattttgagatggagtttcactcttgtcgcccaaactggagtgcaatggtgccgtgatctcggctcactgcaacctccgcctcctgggttcaarcgattctcctgcctcagcctccggagtaactgggagtacaggcatgcgccaccacgcctggctgatttttgtctttttagtaggggcggggtttcaccatgttggccaggctggtctcaaactcctgacctcaggtgatccacccacctctgtctcccaaagtgctgggattacaggagtgtgccactgcgcctgaccagctttataaagtttatagggacagtgtcaccactttacagaagagggactgaggctctgaggaggaagttccttgccagggtccgagtgtcgccaccctgagaactccagcacccacctccctactctccctcatggcgtctcccccacctttccacagccagaagttgccaggtgaatacttccggtacaagggcgtccccttcccygtcggcctgtactcgctcgagagcatcagcttggcggagaacacccaagatgtgcgggacgacgacatctttatcatcacctaccccaagtcaggtacctgccgggctgcgggcgtcgggggctggggagagtggggagggggtgcggcagaggacaggaaaggcacatagagaaggaggggaggaggaaaagtggggccgggtctgttcagagcrgtgcccctgccagaagtagcctcccagggatacccacccggtgcccagcctctcccctccaggtcagttctcaacacttcaccttccctgacctccctggctgaaatagcgtcctcgttctgttcctccctttcccctttaccctctactttttttttyttttttttttttttttttttgtagagatggggtctcrctacattgcccaggctggtcttgaactcctgatctcaagtgatccttctgccttggcctcccaaagtgctgggattacaggcgtgaaccaccacacctgaccatttttatttttatttttcgagacaaggkcttgctctgtcactcaggctggggtgcagtggtgcaatatcagctcatcaaacctcccaccttggcctcccaaagtgctgggactacaggtgctggtcaccaccaaattgtatactttttttttttttttttttttggaggtcttgctctgctgcccaggcttcagtgtgatggtacaatctcggctcatttcagccttgacctcctggactcacatgatccgcccaacctcagcctcctgagtagctggaaccacacgtgtgcaccaccatgcctggctaacttttgtgttttttgtagggacagggtttcatcatgttgcccaggctggtcttgaactcctgggctcaagcgatcttcctgcctcagcctcccaaagtgctgggattacaggcatgagccaccgcgcctggctaaattgtatactttaaagtggtgaattacacacaatttgagtgtttgagtttgagaccaacctgggcaaaatggcaaacccccctctattttttttttttttttttttttttgtgacggagtctctctgtcgcccaggctggagtatagtggcatgatctcagctcactgtaacctctgcctcctgggttcaagcaattctctgcctcagcctcctgagtagctgggatcacaggtgcccgccaccatgcgcggctacttctttttattttattttattttatttttgtatttttagtagagacagggtttcaccatcttggccaggctggtcttgaactcctgacctcatgatccaccagccttggcctcccaaagtgttgggattacaggtgtgagccactgagccgtcttttttttttttttttttttttttttttttagagacagagtcttgctctgttgcccgggctggagtgcagtggcgtgatctcggctcactgcaatctctgcctcctgggttcaagcgattctcctgcctcagcctcctgagtagctgggattacaggcgtgtgccactacacccagctaatttttgtatttttagtagagatgaggtttcaccgtactggccaggatggtcttgatctcttgacctcttgatctgcccacctcggcctcccaaagtgctgcgattacaggtgtgagcccggtcaataagtagcatttaaatgaccaaagggaaataacaaaaactcttccttcccttttttctcctctcttccccacctcctccaacaagtatttattaaacacatattatgtgccaggcagtgttctaagtacaaagaaggctgcaactctccagacagactgaaatgtctccctttatggagctcacattgtactggggcaacccagaaaataaatcaacaaataaaaatatgacactatgattggtggcaataaatgctgtgaagaaaagtagagggtaggcggggcatagtggctcatgcctgtaatctcagcactttgggaggctgaagtaggaggatcacttgaggccaagagttcaagcccagcctgggcaacatagcaagaccccatctctaaaaaaaaaaaattagccaggcgtggtggtgtgcgcctgtagtcccagccacttgggaggctgaggcaggaggatcactttagctagagaggtcgaggctccagtgagctgcgatcacaccactgcacttcagcctgggcaacagagtgagaccctgtctcaacaaatagaaaaasgtacaattcaatgactttgccatgtgcgtggagctggtcatccatcaccacaatcaattttagaatattttcagccgagcacagtggctcacacccataatcccaacattttgggaggccgaggcaggaggatctcttgagcctaggcgttcgagagcagcctggccaacatggtgagacctcatctctacaaaacatacaaaaattagccaggcacgatagtgtatgcctgtagttccagctacttgggaggctgagatgcgaggwttgcttcagtctgggaggtggaggttgcagtgagacgcgttcaccccaccgcactccagcttgggtggcagagactgtctcaaaaacaaaaaactgagtgggccaggcacggtggctcatgcctgcaatcccagcagtttgggaggctgaggcgggtggatcatttgaggtcaggagttcgagaccagtctggccaacatggtgaaaccccgtgtctactaaaaatgcaaaaactatccaggcgtggtggtgcgtgcctgtaatcccagtattcggcaggctgaggcaggagaattgcttggaaccggggggtagaggttgcagtgagccaagagtgcaccactgaactccagccttggcgatagggcaagaccctgtctcaaaaaccaaaaacaaataaaaataaaaataaagaacattatcatcatccaacaagaaactctggacctataagccatcacctcccaatcctcatatcccctcccccctgggccctggtaaccaccaatctccrttctgtttctatggatttttctattttgggcatttcatggaaatggaatctacactatgtggcctcttgtgtctggtttcttcctgagcatcacgttgtcaaggttcaaccacattgtagcatgtgtcagagtctcattcwtttttatggtccaataatattttatgttatgtataaactatattttatttattcatcagttgataagcatttggattatttccactctggggcttattatgaatgaagctgctacgaacattgcatgcaagttctttttttttttttttttgagacggagtctcgctctgtcgcccaggctggagtgcagtggmgtgaccttggctcactgcaaactccgcctcccgagttcacgccattctcytgcctcagcctcccaattagctgggactacaggcgcccaccaccatacccagctaattttttgtatttttagtagagacggggtttcaccgtgttagccaggatgctctccatctcctgacctcatgatccacccgtcttggcctcccaaagtgctgggattacaggcacgagccaccgcgcccggcctttttcttttcttttctttctttctttctttctttttttttttttttttttttgagacgaagtctcgctcttgtcccccaggctggaatgcaatggcgcagtctcggctcactgcaacctctgcctcctaggttcaagcgattctcctgcctcagcctcctgagtagttggaattacaggcacctgccaccacgcccagctaatttttgtatttttagtagagacggggtttcaccatgttggccaggctggtctcgaactcctgacctcaggtgatccacctgcctcagcttcccgaagtgctgggattacaggcgtgagccactgctctcggccttgcatgcaagttcttgtttctatttttattttttgaggcagggtctcgatctttcgctcaggctggagtgcagtggtgcagtctcagctcactgcagccttgacctcctgggctcaagctatcctcccacctgagcctcctgagtagctgggacgacargtgcacaccaccacgcccagctaattaaaaaaactttttttttttttcacagacgagatctcactgtgttgcccagactggtttcaaactcccgagctcaagcaattctccctccttggcctcccaaagtgttaggattataggagtgagcctctgcactgggccctgcrcacaagttcttacgtggacatatgttttctttgttttttatggagacaggttctcactgttgcccaggctggagtgcagtggcgagatctctgttcactgcaacctctgcctccacaggttcaaacaattctcctgcctcagcctccggagtagctgggaccacagacatgcaccaccacgcccagctaatttttgtatttttagtagagacggggtttcaccatgttggccaggctggtttcaaactcctcacctcagtcaatctacccacctcagcctcccaaagtgctgggattataggcgtgagccaccgtgccagcccgaagtggctttatcttttttcattcttcccagcaatagatgatcctctattgccccacatcttctccagtgattagcatcaacagagatttacttattggagacaaggtcttgctcggttgcccaggctgaagtgtagtgggaagatcatggctcactgcaacctcgaactcctgggcacaagtgatgctcccaccccagcctccctaatagccaccacacccagctaatttttgtagcrataagggtctctggttggtctcgaatgcctgggctcaagcgatcttcctgcctcagcytcccaaagtgctgggattacaggcatgagccactgtgcctggccagtttttttytaaagctattttgataggtgcctactggtgtttcactgtagtattaatttgcatttccctaacagctaatggtgtttgagcatcttttcatgtgctcattagccatcatatatattccttttttttttttttttttttttttgagatggagtttcactcttatttcccaggctggagtgcaatggcgcgatctcagctcactgtaacctccacctcccaggttcaagtgattctcctgcctcagcctccctagtagctgggattacaggcatgtgccaccatgcctggtttttgcatttttttttttttttagtagatcgggggtttctccatgttggtcaggctggtctcgaactcccaatctcaggtgatccgcccaactcggcctcccaaagtgctgggattacaggcatgagccaccgcacccggccatatattcctttttgtttgttctattacttgccactgacttgaagctcacaaatrtattatttggtaaagtgttraaatatttttcctcttttgaattggattgttttcttrtcattgagatttgagagttttttttttttttttttgagacagagtctcgctctgtcacctaggctggagtgcagtggcgcgatctcagctgcctcccaggttcacgccattctcctgcctcagcctccygagtagctgggactacaggcgcccaccaccacgcccggctaattttttgtatttttagtagagacggggtttcaccgtgttagccaggatggtctcgatctcctgaccttgtgatccacccgcctcggcctcccaaagtgctgggattacaggcgtgagccaccgtgcccggccgagagttctttatatgatgtgagtacagatccttgatcagatacttgttttgcaaatattttctcccaatctatggcttgtcttttcattttcatatcagcgtcttctcagagtatgttttattattattattawattattattattattattattattattagagatgaagtctcgctctgtygcccaggctggagtgtagtggtgccatcttggcttactgcaacctccgcctcctgggttcaagcgattctcctgcctcaacctcccgagtagctgggattacaggtgcccgccaccatgcctggctaatttttgaattattagtagagacggggttttgccatgtgggccaggctggtctcgaacccctgacctcaggagatccacctgcctcggcctcccaaastgcagggattacaggcgtgagccactgtgaccagccttgattttgcttatgtttttctttctccttataccttgacattgtcccatcttggaactttaaacaaataagtttctggtttttttaaatagttccgtggtatttcataacataggatatacaataattcttgcttaaccagtttcctagtgactgatattaatgttcaatcttttgcctatgtatatacaatgtaaactttaaacacaatgccttgtacatgcagtacttggcattgaacacacttayctctaggacaaatatctggacawagaattgcttggtcagagtctgtacatttgtaattttgatatgtaatggctacatttccctctatagaaattgtggaagcttgttctctgagccgggggtgtggttaacacctgaaatcccagcactttgggaggtcgaggcaggcggatcacttgaggccagcaataggagaccagactggcctacatgaccccatatctactaaaaatacaaaaattagctgggcatggtggtgcgcgcctgtggtcccaactactcggaaggctgaggcatgagaattgcttgaactggggaggcagaggttgtagtgagccaagatcgtaccaatgcactccagtctgggcaacagagcgagaccctgtctcaaaataaaatgaaaaaagaattatttgcagtcaggcacggtggctcatgcctgtaatcccagcactttgggaggccaaggcaagtggatagcttaagcccaggagttcaagaccagcctgggcaacatggcaaaatcctatctctacaaaaaaaaaaaattagccaggcgtggtcgtgcatgcctgtagtcccagctacttgggaggctgaggcaggagaatcgcttgaaccctggaggtggaggttgcagtgagccgagatcactccattgcactccagcctaggcaacaagagcaaaactctgtctcaaaaataaaaaataaaagaaaaaacagaagaaaataccaagtgtggcaaggatgttgagaaaatggggcccttgtgcactgttggtgagcatgtagaatggtacagctgctatggaaaacagtttggcagttcctcaaaaaattaaagatagaattaccatattaactcagcagttccacttccaggaatatgcccaaaagaactaaatactaggtgggggcactctgacagatatttgtacaccaatgttcatagccacattatttgcaatgaccaaaagctgaaactatccaaatatctgccgttcatgaatgaatggataaacaaattatgctatattcatacaatggaatattattcagctgtaaaaaggaaggaaattcgtccgggtgcagtggctcatgcctgtaatcccagcactctgggaggccgaggcgggcggatcacctgaggtcaggagttcaagaccagcctggccaaaatggccaaaccccgtctctactaaaaatacaaaaattagccgggcctggtggtgcgcgcctgtagtcccagctgcttgggaagctgaggcatgagaatggctggaacccaggaggcggaggttgcagtgagtggagattgcgccactgcactccagcctgggcgacagagccagactgtctcaaacaaacaaacaaaaggccaggcacagtggcttacgcctgtaatcccagcactttgggaggctgaggcaggcagatcacgaggtgaagagattgagatcatcctgaccaacatggtgaaacccygtctctactaaaaatacaaaaattagctgggcatgctggcgtgcgcctgtagtcacagctattcgggaagctgaggcaggagaatcacttgaacycgggaggtggaggttgcagtgagctgagatcgcgccactgcactccagcctggaaacacagcaagactccgtctcaaacaaacaaaaaacaccacacacaggaatagctaaaatagggtgcagccacttcctctagggctgaagccaaactcccaagaaagaaagaaattgggaagaaggacttccctgcccaaccggctccccacacaagattagagtttcgctgcagaggtatggtcatgacccactgggtgactgagaagttcactgaagtgcaacaggccactgaaatttgctagggggaggggtaaacgtcactgcgtgtctagtgcagggctggcccctgtccatcacaagatcccgctaagaggagcycgtgagaatcaggaagagccccatcctcattcagtgttcctccagcgccctctgctgacaaggtttaacactgagctagctggcagaggagaaatgtttacagggtccagctccaatatcacaaaaacggcagagaggcatgaagttggagccaccagcctgtaaactgataactggtacaaggtggttgttagaatgaaatccagtgaatggattggatgtggtggcttacgcctgtaatcccagcactttgggaggccaaggcaggaggatcgctagaggccaggagctccagaccagcctgggcaacacagtgagaccccatctctacaaaaattttaaaaattaggtgggcgcaggctgggcatggtggctcatgcctataatcccagcacttygggaggccaaggcaggtggatcacctgaggtcaggagtttgagaccaacctggccaacatggcaaaaccccatctctactaaaaatacaaaaactagccaggcgtggtggcacacttctagtcccagctacttgggaggctgaggcaggagaattgcttgaatccaggaggcagaggtttcagtgagccgagatagagccactgcactccagcctgggcaacagagtgagactccttctcaaaaaaaaaaaaaaaaaaaaaaaagctgggtacatgtggtctagctactccagaggctgaggtgggaggatcacttgagcctgggagttggaggctgaagctgaagtaagctgtgactgcaacagtgcacaccagcccaggtcacagagcggaatcctgtctcaaaaagaattaaatgcaatgaatactaacagaaagtaattttgaacgtaattgtttctcttctgaacagcctgtggtctcctgaaattcaaaactgtgaattgggtccttgatgaggtccctttccactaggtaacattctgtggctccccacagaaataaagaggtgaacctcagccgggcgcagtggcttactcctgtaatcccagcactttgggaggctgaggcaggtggatcactggaggtcaagagttcgagaccagcctggctaacatggtgaaatcccatctctactaaaaataccaaaaattagccaggcgtggtggtgcatgcctgtaaccccagctactagggaggctgaggcaggagaatcacttgaaaccgggaggcggaggttgcagtgagccaagatcgcgccattgcactccagcttgggcaacaagagcaaaactccgtctcaaaaagaaaaaaagkgggggtaggggggagggatagcattaggagatatacctaatgttaaatgaygagttaatgggtgcagcacaccaacatggcacatgtatacatatgtaactaacctgcacgttgtgcacatgtaccctaaaacttaaagtataataaaaaaaggggtgaccctcaaaagtgggcagtgaaaagtgaaaagagcagagatttttatgtccagacacctgggttcaattccagctttctccatgtattaaaggagtgcctgctgggcatgatgcctctgctcccagcaccttgggaggctgaggcaggaggattgcttgagcccaggagttcaagaccagcctgggcaacatagtgggaccgtatgtctwctaaaaataaaaataagaaattagccaggtgtggttgtgtgcacctgtggtctcagctactcgggaggctgaggcaggaggatctcttaagcccgggatttcaaggctgcagtgagctgtgatcacaccactgcactccagcctgggtgacagagcaagattctgtccccaaaaaaataaataagtaaagcaattctggctgtactaatagatcagcctcagaatttcagcggctgaagccaagtttgtttctttttcctataaactgtagttggtgcaggaagggtggaaggaagttggtggggggatatccatgcattcccagacatttggttccttccatcttatggctctgccatccccgggagtcccagattctcccctggagtctctgtatccagaagcagagagggagtggagagtcacgtggcgtgcgtttatgggccaggcctggaaatagccgcacatcacatcgccgccacctayacttccttggccagacccagtctcttggccccacacatagcagcaggggagaagagaaaaggtcatcacgccatattcccagcagaaaaatgaaatggggttgggtggacagctcaccagtctctgccctgcaccactttcctagctttgtccccttggacgagcgacatggtttctgtaaggctcagtttctggctccgaaaatgaggttaagcaaccttgccttctctgccagctgtaaggaatcagtgtgataaaataggtggtaaattgctcaataaatgctgtcaggcagggcgtggtggctcacagctgtaatcccagcagtttgggaggccgaggtgggcagagcacctgaggtcaggagttcgagaccagcctggccaacatggggagacctcgtctctactaaaaatacaaaattagccrggcgtggtggtgggcgcttgtaatgctasctactcggctgaggctgaggcaggagaattgcttgagcctgggargtggaggytgcagtgagccgagatcgcgccattgcactccagcstgggcracagagtaagactctgtcttaaaaaaaaaataataaaaggtggcaaattgctcaataagtgctgttgtgattattctgatgatatctccctcttcagccctcccacacccaattaatctgctcgatttctcccaacaggcacgacctggatgatcgagatcatctgcttaatcctgaaggaaggggatccatcctggatccgctccgtgcccatctgggagcgggcaccctggtgtgagaccattgtgggtgcyttcagcctcccggaccagtacagcccccgcctcatgagctcccatcttcccatccagatcttcaccaaggccttcttcagctccaaggccaaggttgggaggaggggtgtgtgtcagttgggaggggctgcatgggtgtatggggtaatggggggacggagcataactcattgattcattcagcacctatttgttaaacacctactawgtgcctgactctgatctagcacagtggtcaatatacacacagaaatgcctgccctttggcagggagtgatggctcatgcctgtagtcccagcactttgggaggctgaggcgggaggatcactttgggccaggagtttgagaccagcttgggcaacatagtcagaccacatcattacaagaaattttaaaaatcagtcagacrtggtggcacacacttgtagtcccagctacttggaatgctgaggtgggaggatcacttgagcccagcaggtcaaggctgcactgagctgaaatcaccttactgcactccatcctaggcaacagggcaagactgtctcaaaaaaaaaaaaaaaaaaaaaaaaaaaaagccggtgctggcatggtggctcacgcctgtaatcccagcactttgggaggcagaggcaggcagatcacttgaggccaggagttcaataccagcytggccaacatggtgaaaccatgtctctactaaaaatacaaaaattagtcggatctggtggtgggtgcctgtaatcccagctactcaggaggctaaggcaggagaattgctggaacctgggaggtggaggttgcagtgagctgagatggcaccactgcactccagcctgggagacagaccaagatttcatctcaaaaaaaaaaaaaaaaattacagccaggcgcagtggctcacgtttgtactcccagcactttgggaagccaaggtgggcagatcacctgaggtcaggagtttgagaccatcctgaccaacatggagaaaacctgtctctactaaaaatacaaagttagctgggcgtggtggcacatgcctgtaatcccagctacttgggaggctgaggcaggagaatcgcttgaacccaggaggcggaggttgtggtgagccgagatcgcgccattgcactccagcctgggcaacaaaagcaaaactccgtctcaaaaaaaaaacccccatatattatactacatattataataatttaatagtattacaatatactttaattatatttaatatttatatgtttaacatataataacataatacaatataatataatacataaaatgtctgatgggataaatttacattggggggagagggctggagatagagttagaggtgggtgtggggctgcaattataaataaggaggtcaagggggcccccagtgagtaaaaacccgggaggtgatggtgggagccacagaggtttctagaggaagagcatttcaggcaagagggaaaagcaggtgcaaaggccctgaggtgggtgtatctgargtgcaagagggaggtcggtgtggccggagccaagtgagcaagtggggaaaggagtggagatgaggtccgggtggggaggcaacaggggccaaaatgtgcagggccgcgtgggcccggtgcggacttgagctctgaccgagtgacgaggcagcgcggcagggatcgcagcagaggaggagcccgagcgggcttaggcttcaccggcgccctctggcggtcagatggggaccgactgtcgagagagcagaagccgggaagcccgagaggcggcgctggccggggtccaggggaggggacggtggctggactagggtggtggtcacggaggtattttgaaggtgagaccgggaggatttgctgacagactggatgtgggtgtgagagaaggggatgagtcaagggtgactccaaggtttcggcggaagcaactgtcaggrtggggcaactgggaaggggaggagrgaggggagcaggcgggggaggaagacacgggctctgcggcggcccatcccacgtccagcagaggctgccggtgggcacagaaatgcacccatcgggatctgaggggagagacttgggctgacacgtccatttgcaattccttggcacatatattctgtaattaatcgaagctccaggactgggtgatatcgccaaggaattgagcgtggacagagcagagagggggggctgcaatcaggaagtccccaagaccaccctcaggctcaacgacttagcaaaactcatagtgttcagcaaagctgctggactcccgggttatagtcaattacaatgaaagcaaacgtgaaaatcaggcaagggggccgggcgcggtggctcacgcctgaaatcccagcactttcagaggccaaggtgagcagttgattgagcccaggagttcaagaccagctgggcaacttagaaacacccatctctacaaaaaagtttaaaaattcgtcacgtgtagtggcatacacctgtagtcccagctacttgggaggctgaggtaggaagatcacttgagcctgggagtttcaggctgcagtgagccatgattgtgccacaggcactccagcctcaaggacagaacaagaccttgtttcttttcttttttctttttctttcttttttctttttttgagacagagtttccctcttgttgcccaggctggagtgcaatggcacgatcttggctcactgcaacctctgcccctctgcctccagggttcaagcgattctcttgcctcagcctcccaaatagctgggattacaggcgcccaccaccatgcccagctaattttttgtattttcagtagagacggggtttcaccatgttgaccaggctggtctcgaacacctgacctcaggtgatccacccgccttagcctcccaaagtgttgggattacaggtgtgagccacagtgcctggccgacaagaccttgtttctaaaaaataagactaggctgggcatggtggctcatgcctgtaatcccagcacttggggaggccgaagcagatggatcacttgaggccgggagtttgagaccagcctggccaacatggtgaaaacccgtctctactaaaaatacaaaaattagccaggcatggtggcacccacctgtagtcccagctactcgggaggctgaggcaggagaattgcttgaacctgggaggcagaggttgcagtgagctgagatcgtgccactgcactccagcctgggagacacagcgagacttcgtctaaaacaaaacaaaacaaaacaaaaaaatccaagggattaggaaatacctctcaggacctaggggcaagggccaggcctttctctgggcagaaaggaatcctctacagcacaggaatcaggaaggagccctggaaagcaccaatgttattacaagacctcacaccagcagccacgtttctctaagtctgttttcatttagtttttggtggatctgggggtgttttgttttgttttttggtttatttgtttttgaggcagggtctcgttctgtcatgtaggctggagtgcagtggtgtgatcacagctcactgcagcctcgacctcccgggctcaagtgatcctcctgccttagcctcccgagtagctgggaccacgggcacgcaccaccacatcagctaatttttgtattctttgtagaatgggggtctcattatgttgtccaggctggtctcaaactcctgggttcaagttatcctcctgtctcgtcctcccaaagtgctgggattacagacatgagccaccgcagctggccaagtgttctttctcagcctccctccctttatgcctttgtcattccctcaagcaatttccagaacctcctgtgtgtggggctctgggctaaggctctaggaacgtgtaagaccttgcctgtcctcaaggggttcctcaatctgtgagtaaccaacatggtaaaaccccatctctactaaacatacaaaaattatcctgatgtggtggcacgctcctgtagtcccagctactcaggaggctgacacaggagaatcgcctgaacccaggaggcagaggttgcaatgagctgagatggcgccactgcactccagcctgggcgaaacagagtcagactccatcgcaaaaaaaaaagagtctgccctgagtccttcctgcttcaggrtcagaagagaggggtctccagggcaggaggcctcaggggctggggtcttgcctgtgtctgacgccttctcccctctcctcaccatycgcacacaggtgatctacatgggccgcaacccccgggacgttgtggtctccctctatcattactccaagatcgccgggcagttaaaggacccgggcacacccgaccagttcctgagggacttcctcaaaggcgaaggtggggacagggtaaagcggggcaggaggggtggggaggagccccagaggaccctgatgggcagagggacagaggaggggtaagaaagggagagagacagagacacagggcatcaaaaggggcaatagagacagagagcaggtggccaggagaagaagagacggagggagagaggctgagagaccgaaagacacaggacaggcaaaggacagaggagacagagacagggagagacacagatacaaaaagactgagagagagggcaacaaaagagacaggggcccggcayggtggctcatgcgtgtaatcccagcactttgggaggctgaggcaggcggatcacaaggtcaggagattgagaccatcctggctaacatggtgaaaccccgtctctactaaaaatacaaaaaattagccgggtgtggtggcggtgcctgtagtcccagctacttgggaggctgagacaggagaatsgcttgaacttgggaggtggagcttgcagtgagccaagatcgtgccactgcactccagcctgggcgacagagtgagactccgtctcaaaaaaaataaaaaataaaaagagataaggaaataaatgcagaaagagagatggagtcagagagagacagggagagacaaggaaacaggaggagacaggcccctggtactaagaaaggcagcgccctttggccacgtgttcctttctctgctgctgtcagagaccctggctttggagggaaatccaggtgtgtggaggcggactggatggacagatagacaaaggcmccccaagatgggcaaccaggggagaagcaggttggaagagccccagaacttggtggaaatgtgggggctctgggggagggcatccagctctggggrctggacctgggggtttgtggggcacagctagttagacccatgagccccagtggggctgggggaaccccgccactcagccctcaccccacttgtccctctgcccacagtgcagtttggctcctggttcgaccacattaagggctggcttcggatgaagggcaaagacaacttcctatttatcacctacgaggagytgcagcaggtgagtccccacctcctccaggtgcagcgtcccccccataccctctgctcacaccccacactctccccttcccgagggtctcaggacccctccgcttccccatgcaatgcgccagcccctggggatactgcaggaacagaacagaggccctgagcctgtgagcaagaccacagacaaaatccctaaaccacacagcaggctggcggggcagaggagctaaggagcaaaggcgagtggraaggaagataaggaatggtcaggggcgagatttaacccaggagggttggccggacacagtggtagtggctcacacctgtaatcctaatgctttgggagcctgaggcgggaggaccccttgagcccaagaggtcaaggccacaatgagctatgatggtgccactgtactccggcctgggcagcagagcaaaaccctgtctcaaaagagagagagaaggccaggtgtggtggttcacacctgtaatcccagcactttgggagcccaaggcaggtggatcacttcaggtcaggagttcaagaccagcctggccaacatggtgaaaccccatctctactaaaaatacaaaaattagccgggcacagtggcacatgcctgtagtcccagctgctcaggaggctaaggcaggagaatggcttgaacctgggaggtggaggttgcagtgggctgagatcacaccactgcactccagcctgggcgacagagcaagaccttgttccaaaaaatagaaagaaaaaagattgaaccacatgaaatgcctgtattcaaccagtttttatttatttttatttattttatttaattaatttatttatttttgagacagagtttcgctcttgtggcccaggatggagtgcaatggcatgatctcggctcaccgcaacctccaactcccacgttcaagcaattctcctgcctcagcctcccaagcagctgggattacaggcatgcgccaccacgcccggctaattttgcatttttagtagagacggggtttctccatgttggtcaggctggtcttgaactcctgacctcaggtgatccacccacctcggcctcccaaagtttttatatttggaccagttatatatttatataactggtcggccccgccaactagtttttattttaagatggtaattttggctggkcacggtggctcacgcctgtaatcccaacactttgggaggccgaggtaggcagatcacctgagctcaggagttccagaccagccttgccaacatggtgaaaccccgtctctgctaaaaatacaaaaaaattaggcggccatggtggcgggcgcctgtagccccagctactcgggaggctgaggcaggagaatcgcttgaacctgggagctggaggttgcggtgagccaagatcgcaccattgcactccagctgggttatagagcaagactctgtctccagaaaaacaaaaacaaaaacaaaaaggtaattttatatggttttcccaaatgttgttattatccctattttatcgacgaggaaactggaggtttgtaacttaagagagggttgataatttgcccagggcacatggctcttgcctgyagactccatgtttattttttcccaacctggtaactttcttttaatggaaagctccagaagaggtgtcggtgctactcctccccctcttttccagcaagcattcttctccaaacccagaactgggccacagagcctaacagcttctgggctgcccctgggtgtgaggcgccgcccacatgttagaatttctgggacacgtcagtggttcaagaaggtaaagagatggaaggttatgaaaccaggagtgacctggaaaatcggagccatggggttggcggagctgacyagagggctgaccatgctgggtgctgcatatcagaaggtagtgatggccgggcatggtggctcatgcctgtaatcccagcactttgggaggccgaggcaggcagatcacttgaggtcaggagttcgagatcagcctggccaacgtggtgaaatcctgtctctattaaaaatacaaaaattagccaggcatggtggtgcatgcctataatcccagctactttggaggctgaggcaggagaatcactggaacccaggaggtggaggttgcagtaagctgagatagcaccactgcactccagcctgggtgacagagccaggcttagtctcattgtaatcccagcactttgggaggccgaagtgagcagatcacccgagggtgggagttcgagactaccctgaccaacatggagaaaccctgtctttactaaaaatacaaaattagccaggcgtggtggcacatgcctgtaatcccagctactcgggaagctgaggcaggagaatcgcttgaacccgggaggcagaggttgcggtgagacgagatcatgccattgcactccagcctggacaaaaagagygaaactccgtctaaaaaaaaaaggcagaggggcacggggaggactaagggctccagggacctgagctcctctctggctgtgtggccttggacaagtgtctctccctctctgggcctctgtttaccaattgagataatgacacttcccttgcaaagctgatggtgggatcggcacaaatgtatggggggcttggatcagagcttggtacatagtagacactcggaaaggaaggtgatatttgagctgyagccgtggcaatgggcccttctggaagccccatgccaaggcccagagggaggaatgtgtagggaatggtgagtcccagaaggagagggtgggaaaggtattggaagagctgtgaccagaccacatctgttttttggtttttttttttttttgagatggagtctcactctgccacccaggctgtagtatagtggtgagatctcggctcactgcaacctccacctcccagttcaaacgattctcctgcctcagtctcccgagcacctgggattacaggtgcccgccaccacacccagctaatttttgtattgttagtagaaacagggttttaccatgttggccagactggtctcgaactcccgacacctgtctcagcctcccaaagtgctgggattacagrcatgagccactgcacctgccccacatctgtgcttgaaagccgggtctgggtctgggactgtgtcccagggcactcgggagccacggaagagttgggagccagtgaggagcagggtcagctggggtgtgggggatgagctggagggggatggagactggaggcaggaaggctgtggagcagccggctgctgrggcatggatccaggaaggggaggatgaggcctaagcagttctaggctacagggacacagaggaggggatatggcaaggggaggcaggtggggagggacagggctcatgayggacaggttttgggggtgaggggtacccagagagggaggccaggctcctgggtggatggtggggccatcctgcaatgggggcctgggggaggagcaggtttgagatgtagaccagccaatgcctgtctctaacctgaaggagggtgattccaggtaaggtgatgcactgacctstgcccccggatgtgacctctgccccccactgtgacctctgccsccggctgtgacctctgccscckgctgtgacctctgccccctgctgtgacctctgccccaagcccacctattccctcccacctagagaaccctccaaagacagaaactgcaaaaacccttagaggcgatatagcccaacccctcagtttggagttggggaaactgaggcaaagaggcagcgtccctcaggcagccccaggttaggacccagacatgcggatcccaggttccacgctccttccttggcygagtgccctccctccgctgacccctctcccctgcctgcaggacttacagggctccgtggagcgcatctgtgggttcctgggccgtccgctgggcaaggaggcactgggctccrtcgtggcacactcaaccttcagcgccatgaaggccaacaccatgtccaactacacgctgctgcctcccagcctgctggaccaccgtcgcggggccttcctccggaaaggtgcgggggttctggggttcagagcccactaggccactgcccggctgtgtgacctgggagagttacttaacctctctgggcctcagtttctcacccagctgtaacattgggtgaacagggtcactgtggccccagggttgatcacgcacggggcttagcactgactcagcacacgtgccagccacccgaggcgtccccatccagagaactcccaacgacagcaaaacatccaggagtactgccaacgccaggtttacccgagagagatttagagtcttcatgagtcctcctcgacggccatgttcacggcagaaatactcaagccctgggttacggggcgcaggcggtagcatagttgtttcctcttcctgctgtaacaaaaacaccgcaaactccatgactcaaaacacgtttactcttttttttttttttttttgaaagagtctcgctctgtcgcccaggctggctggaggttgcagtggcgtgatctcggctcactgcgacctccacctcccaggttcaagcgattctccttcctcagcatccttaagtagctgagactacaggcacctgaaaccatgtcaggttaatttttgtatttttagtagagatggagtttcaccatgttggtcaggatggtctcaatctcctgaccttgtgatccacccgcctcggcctcccaaagtgctgggattacaggcgtgagccaccgcgcccggccttttcttttttcttttttttttttttttgagacggagtttcactcttgttgcccaggctggagtgcaatggcgcgatctcggctcactgcaacctccgcctcccaggttcaagcaattctcctgcctcagcctcccaagtagctgtgactataggcacccaccaccacgcctggctaattttttgtatttctagtagagacaggttttcaccgtgttagccaggatggtctcgatctcctgaccacccgcctcttcctcccaaagtgctgggattataggtgtgagccactgcgcccggccaagtgaagcatcttctaatctctgaccctcctcccttctatagggacccaggtgatgacactgagcccacccagatacttcagggtcctctccccatctccagatctttagcttaatcctatctgcaaaatcccttttgccacataaggtcacatattcacaggttccaaggattaggacgtggatatggagggagtctttattcagcccaccccagggaacccctccccacaacctcattaagggtgctgggtaacatggggcacgtgcacttgccaaaaggcaaactacggtcctctgaatgccatgagccccaggtttccaggtgaggggtgatgcccctgtgatagccccacartgagaaaactgaggcttgggaggggtgccgtggctcacacctgtaatcccagcactttgggaggccgaggcaggtggaccacctgaggtcaggagtttgagaccagcctggccaacatggttaaacgccatctctactaaaaatataaaaattagccgggcgtggtggtgcgtgcctgtaatcccagttactcgggaggctgaggcaggagaatcgcttgaatcggaggttgcagtgagccgtgatcacaccactgcactccagcctgggcgacagagcgagactccatctcaaaaagaaaaaaaatggaaaactgaggcttggagggttcctgaggctcgcttgctgcgccaatcagcaaattgtttgcaagccctgagcacagagcctgcagaagggggtcccttycatgtccaagcagtaatggctgcagcatggagcrttgtgggggcattgagacaggaggccttgttctagcaggggaggtttgggactggtcgcagaggaggtgacacaagctgtaaggtgggcaggaattcagggttggaggcagaggttctgggcagagacttaaagggtccgggataaaggggaggactggcaggaatcctgcagtagcagaggcagtgagggcggaggtgagaacggcgccaggtgacaggccaagactctgccaccataggacacaaagggggcaatgtggagggtagggaggacggtgtttctggcaaagggaacacctcgccaaaggccgggaaggggaaggaggttgctggaatgttggaggtaggggcgcagtgctccccagaggctcctcaccccctggtgccccctcttctccaggggtctgyggcgactggaagaaccacttcacggtggcccagagcgaagccttcgatcgtgcctaccgcaagcagatgsgggggatgccgaccttcccctgggatgaagacccggaggaggayggcagcccagatcctgagcccagccctgagcctgagcccaagcccagccttgagcccaacaccagcctggagcgtgagcccagacycaactccagccccagccccagccccggccaggcctctgagaccccgcacccacgaccctcataataaacacgtcgattctgtccaggttccttgatgcgctgtggcagggcaggcagcggggcgtggagaatcctcaccacaccaaggcttccagaggccggggtccccgactcagagtcccgcccagaggcaaaggtgctgcaggaacccagcgctgggcatctcacttcccggggtgggggcctgactccccagtctgagggaggagggggctgggggcctggactcctgggtctgagggaggaggggctgggagtctggactgccgggtctgagggaggagagggctgggggtctggactcccgggtttgaggaaggaggggctgggaggctgcactcccgggtctgagggaggagggtctggaggcttggacccctcagtctgagggaggaggggttgggggcctggactcccgggtctgagggagtagtatctgggggcctggagtctcgagtctgagggaggaggagctgggggcctggacccctgggtctgagggaggagggggctgggttgtggactcttggattcagagccagtctttagtaacgcacgtttttggcataaagtggttttattccgagcagaggtaaacgggagctccggcagacccgccctctcagcgcccacagaaagtcccaccacccaccctgttcccctgtggctgtaccacattccactccctcagtattcagctccttgcctcagtttccccacagctcctgaacacagtgtgcctggcagcgactccccatcttcccctccacagctctagcagctctagctcggggcctcacccgggcccctcatcaggaaggcctgaccctcgggagctgtgtgtgtcttctttaggatccgctgcctggggacgctgccagcccatcttctgggttgtgacactgaggtctggtgcaggcaatgggcttgcccaagtccttttttttgtttgagatgaaatctcgctctgtcacccaggctggagtgcagtggcgtgatctcagctcactgcaacctccgcctcccgggttcaagcaattctcccgtctcagcctcctaagtagctgggattacaggcgcccgccaccacacctggctaatttttgtatttagtagagatggggtttcaccatgttggtcaggttggtcttgaactcctgacctcaggtgatccacatgcctcagcctcccaaagtgctgggattacaggagtgagccacctcgatcagcctttctttttcttttttcttttttttttttttttaaagagatggcctctcactgtgttgcccaggctggagtgcaagggcatgatcttggctcactgctgcctccacctcctgagctcgagggatcctcccacctcagcctcctgcgtagctgggaccacaggcgtgcgccaccacacccaactaatttgtttttttaattgtagagatggggtctcactatgttgcccaggctggtctccaactcctggccttaagcaaccctcccaccttagcctcccaaagtgcagggattacaggcatgagccaccactcccggcccaagttgcagaacaagtgacaaacatcccttctgcttgacagacgccgaggccagaagccttgtccaaggcagggcattgaggcagagggctctgagccgacagttgtccggcactgctccttgggtgggccagcagatttggcttgggctcctgttcagggttgccccccaagtcctgcccggggggcccagtctgacggcctgacgcctctgggctcttgaagtttgaatgtagcatccccaccgaaccgccttcgggctggggacagatagcggaggcggtgggcggggggcaggggcagggcaccgccccacggaggtcgggagtccacttccccccaggggcctcctccagtgccccgctgcctcatcagagccttggctggagtgtccttggagccccaggatttcttgagctgtggagggaaagagagggaggtgagaggaggctggggtggggccctgggggcatcccagatccagggaaggcaggaggtgaggcaagagagaagcagcgaaagtgacagacggccaggcacggtggctcacgcctgtaatcccagcactttgggaggccgaggtgggtggatcacctgaggtcaggagttcaagaccagcctggccaacatggtgaaaccctatctctactaaaaatacaaaaattagcctgaggtggtggtgggcgcctgtaatcctagctactcgggaggctgaggcaggagaatcgcttgaacccggaagggagagattgcagtgagctgagatagcgccaccgcactccagcctgggcatcagaacaagactcagtctcaaaaaaaaaaaaaggaagtgatagaggatttgagggaggtggaaggagatggtggaggagggaagggagggaagagaggagagagggaggagagagatggaggccggacgcggtggctcacaccagtaatcccagcactttgggaggtgggaggattgcttgagctcaggagttcgagaccaacctaggcaacacagtgagacctcatctctccaaaaaatacaaaaattagccaggcgtggtggcgtgggtctgtaatcctagctacttggaaggctgaggtgggaggatcacttgagcccaggaggttgaggctgcagtgagccgagatcatgccactgtactccagcctgggagacagagcgagaccctatctcaaaaaaaaaaaaaaaaaaaaaaaaatgggtggaggaggtaaaagaagaggaaggggtaagggagaaggtgagggaggagaaagaaggagaggagggaggaggggagccaggaaggagagagaggagacagagagggtgaaaggggaaggatgaggtgaggaagaggcaggaaggcagcagcaggaggagggacagaaaggagagggatgcagaggaggaagcaggtaaggaggacggtgtggggagcccgagagggaaggggggaagtgagagggcaaacctgggaccccctaacctacagagggacaaggagctgggtccccacctctgcagctggggaggaaccggaagcgccggcatctgccagccgggatcaaatatttgccaagggaggggatgctgggtgagggtgctcaggaccaggtgaaggtaaggaccttgcccctgcccatcccccgtctcctctccagctaggagccttccttgcctgggacggagggagatgattcctgattcccaaggcattgcagagcaagaccctatctcaaaaaaaaaaaaaaaaaaatatatatatatatatatatatatatatatatatatatatatatatatagctttctttggcctgggatgaggatgtcacaaaataaataaattccacttcaggaatgtatttatttattgtttattattattattattattattattattattattattttgagacagccttgctctgtcacccaggctagagtgcagtggaacgatctcagctcactgcaaccgccgcctccctggctcaaacgattctcctgcctaagcctccggagtagctgggactacaggtgtgcaccaacacacccagcgaatttttttgtatttttagtagagatagggtttcactatgctggccaggctggtctcgatctccctgtttcaggaatgtattgttgttgtcattactactctatttcatttagccaagtggattcctcccccaaccaaactcggaatgagtgcccttgctctgctccttcctagatgaggataccgaggttcagagaattcaagtcctcggcttccccccacctagtctgtcatgccaggatttgcacccagggctctcctgtctctgccccatgccacccagcgcccacctgcccaaaatgcagcaggcgtgcaggaaatgaacaaacgatgccattatgaatttaggggtgcaggccctcaggaaacgcctgctctggctgggagcagggcccctggagcctggcttgcaccaccctgggcaaacgccttccccttcctgggctccatcttctggcaccagccacaaggtctcacctcgttgtccccatcactggagccagacagctgggacaggcggcttaggtcccacatggagcggctgggccgggccggggggccgctgggggtccgggcgcgctgcacactccttagaatgtcactgagtgccggccccggggtagcaggggagacgcggcaggcggccaggcggtgggccagcgggccgtcaggcggcggaggcgacgcgggggccacggagcggcggcgggacacgcggtgcgggctgcggccccgctgcaggccacctatgaccgagggtttctgggggggcgcaggtgggagcgggcaggaggccgcgtacagcgtccggaactcaaggctgaaggcgtcaacaatttcaccagtcagcagggtcaccaggcctcggtgcaggcgtgcgtcactccacgtgaagctgggggtcggggagtagggggtcagagtctccaaccctgagggcccagcccggcccccatcctcagccaggtcccaggggagaccgtaggacctcaggcgagtcctgacctctccagcctcagcttccctgtctgtagaatgggcacaactgaagtacctactcgggaggggtggagtgaagacagcccaagttaagacacttatataatcagggccaggtgtggtgactcacactttgggaggctgaggcaggagggttgcttgagcccaggagtttcagaccagcctgggcaacatggtgagaccctatctctacaaaaaatcaaaaaaactagccaggtgtggtggcgcacacctgtactcccagccacttgggagactgaggcgggaggatcccttgaccctgggatttttttttttttttttttttttgtgagacggagtttcgctctttttgcccaggctggagtgtagtggcatgatctcggctcactgcaacctctgcctcctggcttcaagcaattctcctgcctcagcctcctgagtagttgggattacaggcacctgccgccatgcccggctaattttttgtatttttagtagagatggggtttcaccacattggccaggctggtctcgaacccctgacctcaggtgatccacccgcctcggcctcccaaagtgctgggattacaggtgtgagccacccgtgcccggctgagcctgggaaattgaggctgcagtgagccgtgataataccactgcattccagcctgggcagcaaagcaagaccctgtccccctcgcccccctcccaaaaaaaaaaaagccagatgcggtggctcactcctgtaatcccagcactttgggaggctgaggcgggcagatcatgaggtcaggagtttgagatcagcctgaccaacatggtgaaaccccatctctactaaaaatacagaaattagctgggtatggtggcacatgcctgtaattccagctactcaggaggctgaggcaggagaattgcttgaacccgggaggtggaggttgcagtgagctgaaatcacaccactgcactccaacctgggcgacagagcgagactctgactcaaaaaaaaaaaaaaaaaaaaaaaacttatctggaatcagactggagtttaaacccaggctctgcctggtccccacttaggaacacctcaatgcctcagttttcccctttggaaagagacggaattcacttccggacactaacagggattgttttaagacccagctgcttcctagaatgactgccatttagtcagtcctggctgtgcaccaagctctccacgttgctgctccctgcagtgctcatctgcaatctggagcaaaaacctaggaaggccgtgtgcagtggctcatgcctgtaatcccagcactttgggaggccgaggcaggaggatcacttgaggctaggagtttgagaccagcctgggcaacatagcaagaccccatctctataaaaaattttacaaaattagccggg

SEQ ID NO: 93234 - DNA, 20449 bp, Homo sapiens
ttcaacatattctcctgtggtctccctggaaaattctgacaccctgacctgagtcggactagggacttgcctagtctgggagggtggggtaggagggagaccttggtacaatgagatttggtaggatattcaacaatggaggcagcgcagggcactgtgggagcctagaagaggcacctggccatgtcttgcagttcagggaagacgtcctggaggaggcaaggccctccatgggcactgcagaaaacccgagtgtcacccaggcacatgggaactggcagactctccagggaaagacatcatgagcatggtttcattcaataatgcctgagttctctcctgaggaccccgtacaccaggctctgtgtgcagtgaggctggggactcagagacgggtcaggcttgggccctccggtggaacacatggggacacagtccctttctaacaagatgtatgctctcatggaggtagcacaggacattgtgaatgttcacagcaagcactgacccagcctggggcggsgggggggcggtcagggaaggcttcctggaggaggaaagccctacattttaggtagagtctgctcttcttgcagtatcagtcagcctttcactttctgtatagctctagttccttcattgcctctgcctctgtcggactccatgtctttctttctttctttctttttaaattttactaaatacaaatagagatggagtttcgccatgttgcccaggctggtctcgaactcctgagcccaagcagtccgcctgcctcagcctcccaaagtgctgggattgcaggtgtgaatcatcgcgcccagccaggttccatgtcttaatttctccccagccccaggctggctgtcacaaaaaatgaccacaaacatgatggcttatcacaacagaaatgtattgtctcacagctctcggggtcagaagtccaaaatgaaggtgttggcaaggccatactccctccacagactccaggggcgaatgtttcatgcctcttccagctcctggtggctcctggcattccttggcttgtggctgcctcattccaacctctgcctcgatcttcacacggccttctcccaatctccctatggctttttttctcttataaggacatttgtcattggatttagagtctacccagataatgcaggatgattgcgtctcaagatccttaacttttttgttgttgttggagatagtgtcttgctgtgttgcccaggctggagtacaatgctgtgatcttggctcactgcagcctcgacctcctgagctcaagtcatcctttcacctcagcctcccaagtagctgggactacaactgtgcactgccatgcctgacaaggtttttaaaattttttgcagaggccaggcacggtggctcacacctgtaatcccagcattttgggagaccgaggcagaaggatcatgaggtcaggagttcgagaccagcctggccaacatagtgaaaccctgtctctactaaaaatacaaaatattagccaggcttggtggcaggctcctgtaatcctagctacttgggaggctgaggcgggagaatcgcttgaacccaggaggcagaggctgcagtgagctgagattgcatcactgcactccagtctcggtaatggtgctagactctgtctcaaaaaaaaaaaatttttttttttttttttgctgagatgggttctcattgtgttgtccaggctggtctcaaactcctgggctcaagtgatcctcctgcctcagcttcccaaagcactggaattacagatataagccactgcacccggcccctcccaagtctttaagtgtccatctctccacaactctgtgtctctcttcctctccccacctgtggtggtttgaaaattaatccccaaattctgtgatacgtttcctttcaagagcaaaggattttttttttttttttagacagggtctcattctgtcgcccaggctggaatgcaatggctcgatattggctcactgcaacctctgcctcccagcttcaagcgattctcctgcctcaacctcctgagtagctgggattacaggcacacgccaccatgctcggctaatttttgtattttttttttttttgagacagtcttgctctgtcacccaggctggagtgcagtggcgcgatctcagctcactgcaagctccgcctcctgggttcacgccattctcttgcctcagcctccagagtagctaggactacaggcgcccaccaccacgcccggctaattttttgtatttttagtagagacggggtttcaccgtggtctcgatctgctgacctcatgatccgcccgcctcagcctcccaaagtgctgggattacaagcgtgagccaacacgcccggccaatttttgtatttttaatagagacgaggtttcaccatgttggccaggctgctcttgaactcctgatctcaagtgatctgccttcctcggcctcccaaagtgctgggattacaggcgtgagccaccgctcccggcccaagagcagaggatcctaacgtctttccttttgagtgtaggctagatctagtgactcatttctgatgcgtggaataaaaggtgtgtgactttgggagactaggtcataaaagacttgagatgactgcagccctgtccaacagtttcactgcaccctcaagaaggatccagaaccacccaatgaagccattcccacattcctggccctcaggaactgtgaacacaataaatgtttgttgttttaagccactgagttttagggtaatttgtcacacaacaacagatttttttgtcgttgttttgttttgttttgtcgttgtttttgagacagtctcactctttgcccaggctggagggcactggtgtgatctcggctcactgcaacctccacttcctgagttcaagtgattctcatgcctcatcctcccgagcagctgggactagaggcatgcgtcaccacacccggctaatttttgtttttgttttttttttttttttgagacagagtctcactctgtcgcccaggctggagtgcagtggcgcaatctcggcgtgtgccaccatgcccagctaatttttgtatttttagcagagacacggtttcaccatgctggtgaggccagtctcgaaatcctgaccttgtgatccgcccgccttggcctcccaaagtgctgggattacaggcgtgagccactgcgcccagcctaatttttgtatttttggtaaagacggggtttcaccacgttggtcaggctggtctcaaactcctgacctcaagtgatctgccttcctcggcctcccaaagtgctggaattacaggcgtgagctgccgttccccaactatttttttctttttcttttttcttttttttttttttttttgagacggagtctcgctctgtcgcccaggctggagtgcagtggcgtgatctcagctcactgcaagctccacctcccgggttcacgccattctcctgcctcagcctcccgaggagctgggactacaggcgcccgccaccgcgcccggctaattttttgtatttttagtagagatggggtttcaccgtggtytcaatctcctgacctcgtgatccgcccgcttcagcttcccaaagtgctaggattacaggtgtgagccactgtgcccggcctgtttttttctttttcataaaaaatagagacgaggtcttactatgttgcccaggctggtctcaaactcttgatctcaagtgatcctccctcctcagcctcccaaagtgctgggattacaggcatgaaccaccaagccccgccagcaataaattattagtatgtacctttccttcttgtgttttttcttcgtgtctctctccacccctgactctctgggtttctttctgggtgtctctctccatctctaggtctttgaatgtccatcccaatttgctatctctgaatacctctgtctttctgattcctttgtagtctctcccatcatgtcagttggtctgcttctggtcctctctccctctatctgggtctctctatctctgtccatctgttcctctctgttgatgtctctttctctgcacgagtgtctctatttatagatgtgtgtgtgcctgttcccaggtctctgtctctagctctgtgtgtgtgtttctttctttctttctttttttttttttttttgagatggagtctcactctgttgcccaggctggagtgcactgttgggatctcggctcactgtagcctccacctacccggttcaagcgattctcctgtctcagcctcctgagtagccgggattataggtgtgtgccaccacgctcagctagtttttgtattttttagtagaaacggggttgcaccattttggtcaggctggtcttgaactcctgacctcaggtgatccacccacctcgaccaccctaagtgctgggattacaggcgtgagccaccatgcctggctaagtttttatgtatttagtagagatggcatttggccatgttggccgggctggtctcagtctcctggcctcaagtgatccatccaccttgacctcccagagttctgggattacaggtgtgagccaccatgctcagtctgtgtgtgtgtttctatgtctctccctctctgtgtctctctccacctgtactgatgtatgtgtgtctctttctatgtctctctgtctcgttaatgtttggtgtcaggctggacaaggtggctcacacctgtaatcccagcactttgggaggccaaggcaggaggatcccttgagcccaggggttccggaccagcctgggcatcatagcaagactacatctctacaaaaaataatttttaaaaattagcctggcatggtggcatgtgcctgtagtcccaactatttgggaggctgaggtggaaggagtgtttaagcccaggaggtcgaggctggatcaagccatgatcgcaccactgctctccagcctgggtgacattgcaaggcttgtctcaaaaaagaaaataaaagaagacaatgagcagtttcactaccattagacggggtgaaaaataataaataacaacaacaacagtaatatgtggtctctctgaggctgggtatggttgttcatgcctgtaatctcaatgctttgggaggccaaggtgggaggatcccttgaggacaggagtttgagactagcctgagcaacatagcatgaccccatctcttctccccaaatacaaaaatgtggtgtctctctctgtctttggatcgctctttctctctttttgtctctccccaccccatctgctgcttggtctctgagtttctgtctatctctaagtgtgtgtctctatgtctccatgtctgtctcgctgcgtctctgtatctccttttctgcctctatctgtatctctctcattcattccttcctctctccctccccctcctcctctccctcctccccctcctctccctccccctcctctccctcctccccctcctccttcacctcctccccctcctcctcactcctgctggcggtttgttcttgcctctctaaccttctgtccctccgcccttcctctccgtatccatctcaggctcccttcccctccccagcctacgcagatgtgggtcctcacctcccgctctccgcctctgccctcccggctcctcctccccgcccctctctccctcgccaggtctctgcctccccctccaggcgagcagccctcactgcacttcaggctcctaggggatcccccggccccgttaaggcagccccaggcagagacccagtggagccctggggcggggaaggggggctgcgggcgctggggcggctccaacctgggtcccagcgagcagggggaccctgcatccgccaaggccggcggcccccagcatggagacttccgaagccactcccagctccaccttaagcgcccccccttccccttgctgcggaggatggaaacagcctgctcccggccccaggtgtcccggccacccccgcccgcgtggccccagcgcggctgggagccgaggaccagccccctacctccttccgaatcctgccctttcgcacatcccaccccaagccaacccgaggagtgtttgccgctatgagatcacctgctcccccagcccaacaacaaaattaaataacaccacgggagaggagagagggagggggaggagggaggaagggacaagagagaagagagactgaaacagggagaagaggcaggagaggaggaggtggggagagcacgaagctggaggccgacactgagggagggcgggaggaggtgaagaaggagagaggggagaagaggcaggagctggaaaggagagagggaggaggaggaggagatgcgggatggagacctggagttaggtggcttgggagagcttaatgaaaagagaacggagaggaggtgtgggttaggaaccaagaggtagccctgggggcagcagaaggctgagaggagtaggaagatcaggagctagagggagactggagggttccgggaaaagagcagaggaaagaggaaagacacagagagacgggagagagaagaagagtgggtttgaagggcggatctcagtccctggctgctttggcatttggggaactgggactccctgtggggaggagaggaaagctggaagtcctggagggacagggtcccagaaggaggggacagaggagctgagagaggggggcagggcgttgggcaggggtccctcggaggcctcctggggatgggggctgcagctcgtctgagcgcccctcgagcgctggtactctgggctgcactgggggcagcagstaagacctggggttcccgggaggagcccccgagggagggtrgagrtggggatgccaaggagagggattcaggctgctctcttcccagctmacatcggaccagcacctgaccccgaggactggtggagctacaaggataatctccagggaaacttcgtgccaggtgccgccaaggcggggacccaggagtccggccctcccggcgcctccttcttcagactcaggaacctgggttcccagctccctcctcccccccaggaccaggagtcccagccccctcctctgtccctcaggagtcgggccagcttctgaaccccaggggctcmccatgggacattatacatgcgcatttcaagtagtgagtgggagtgagtggaaggaaagtgtgggggtggagattatgtgtgtgtttgccgggagaggaaggtcctggctcctgctaggaaccagaggctgggtggccccgtcccccaccttgtccagccttctcttgcagctcctctccccaacacattaataataatccagctgtgggataagagcgattaaaaaaaagaactacaactcccacggggctctggggcaggtaggcagcagaggggtaggctggtagcactggggcctgctgggagttgtagttccatctacagtggcttaagatgggtttgatcggctgggcrcggtggctcacgcttgaaatcccagcactttaggaggccgaggtgggtggattacctgtggtcaggagttcaagaccagcctggccaacttggtgaaacccgtctctgctaaacttggaaactattccaagattcttctaggacccagaattctggatctgagcccagtcctccctcagacccaggagtctaggtccctagcccctcctcccctgggatctgggagtccagaccacagcccactcagcagataccagccctgggatccagtctctatttctgactccttgtcctcctactccgaccccacccccagggcctcctttctggggcctggtgaatgcagcgtggagtctgtgtgctgtggggaagcggcagagccccgtggatgtggagstgaagagggttctttatgacccctttctgcccccattaaggctcagcactggaggagagaaggtaaggggcttggagggaggagctattgaacccactggggatgggcatgaatagaggctggggaatggggtgctgaggtaggagagcagccttgggggaggaggggacacccagtgggtggagaggaggctgcttacactgtaaaatggatcacccattcttcccatcccaagcatggtcccctagtctccccatctctgcagaagcaatgaaaagcagaacatttcctgtgccaggcagatttaaaaccttgataagcctctcatctcataaccaccccacaaaatgggtacaattattattattgttattattattattattattttgagatggagttttgctcttgttgcccaggctggagtgcaatgatgtgatctcagctcactgcaacctccacctcccaggttcaagcgattctcctgccccagcctcccgagtagttgggattacaggcatgcgcaccatcacgcccagctaattttttgtatttttagcagagatgggttttctccattttggtcaggctggtcttgaactcctgacctcaggtgatccacctgcctcggcctcccaaagtgctaggattacaggcatgagccactgcgtccagccaaaatgggtacaattattaaccttattatatacatgcagaaactgacacacagaggttaagttacttgcctaggatcacacagagagccagcactggcattcaaaccaagcagcgtagcatgaatgctgggacctgctttatagtaccatgctgggaaccatactttttttttttttttttggaattgggatctcactctgtgacccaggctggagtgcagtggcccagtcatagctcactgtaacctcaaattcctgggcccaagtgatcttcctacctcagcctcaaaaatagctaggacatgcctgggtgtggtggttcatgcctgtaaccccagcacttcgggaggccgaggtgggtggatcacgaggttaggagttcgagatcagcctggccaacatggtgaaaccccatctctactaaaaatacaaaaattagccgggtgtggtggcatgtgcctgtaatcccagctacttgagaggctgaggcaggagaattgcttgaacccgggaggcggaggttgcagtgagctgacatcacgccactggactccagcctgggtgacagaacaagactccatctcagaaagaaataaatacagagagagagggagagaaaagaaagagagagagcgagaaagaaagagagaaagagagaaggaaggaaggaagggaaggaaggaaaggaaggaagaagccaggactgcaggcacatgccagtatgcttggctaactttttaagttttttgtagaggtggggtctcactatgttgtccaggctgatgtcgaactcctgggttcaagtgatcctccttgccttggcttcccaaggtactggaattacagctgtgatccaccgcgcctggccaataccatttcttataagagccggcactgcctttcatttagctgccccagccaaaagcctcaaagccattccccatcctatcctctctccctcatgtccatttccaatccatgttctttctagccttgctgctaaatattattcaaatcctttcacctatcacgccctctactgcccccagtctcatgtaggcaccatcatctcccacctggactggtggcgtaccctcctcactggcctgcctctcaacttcctgcaatctattcaccccacagctagagagatgtttaaaacacaaataagatcatatcactcctgctcaaaatcctcctattaggatatgtaataacagcaaacatttacatagcacttactatatgtttggcattctggcaaatgtgttatatatatgcagtttatttatttttattttattttattttttgagtcggagtctcgctctgtcgcccaggctggagtgtaatggaatgatctcagatcactgcaacctccgcctcctaggatcaagcgattctcctgcctcagcctcccaagtagctgggattacaggcgcccaccgccacacccagctggtttttgtatttttagtagagatggggtttcaccatgttggccaggctggtctcaaactcctgacctctggtgatctgcccacctcagcttcccraagtgctgggattacaggcgtgagccaccacatccagcctatatatgcagtttatttaaataaaaatacaaaactctctactgttttccacaaggtcctgcaccattcagcccccataacctctctctcctctgttcactggactttgatgaagtctctttgctgttactcaaacaggccacctcagggcctttgcacttgctgttccctcttyttggaatgcccttctctttgttcttttgcaagtcacccctgcttatccttcaggtccccattaaaatgtcacctttggccaggtgcagtgcttcatgcgtgtaattccagtatttttcagaggctaaggcaggatgatgacttgagcccaggaatttaagaccagcctgggcaacatagggagaaccctctctaccaaaaaaaaaaaaaaaaaaaaaagaaaattgaaaattagttgggcatggtggtatgtgactgtggtcccagctacttgagaggctgaggcaggaggatcgtttgagcccaagagtttgaggctgcagtgagctgtgatggcaccactgcaatctagcctgggtgccagartgagactttgtctcaaaataataaataaataaaaataaaatgtcacctttgcagggaagcttttcctgacatcccccatctaagctgagctccccatgacacctcagagctcccagttcccccaaacatgagctcaggatgtarttaattaagcagttacttatgtgattcacaattgtctgtcttgccttcattagaacataaactccataaggcccaggacttttgtctacttgtttattgctctattcttgcatccacggcacatagcaccagctcagtcaatatttgttaatcaaacaaattcaccaatattgggcaccaacttacaaactggcacagagcctggaaagtggtcagtgttcaaattatgttgaatgattaaattactgttggaggccaggcacggtggctcacgcctgtaaccccagcactttgggaggccaaggtgggcagaacacctgaggtcaggagtttgagaccagcctggccaacacagtgaaaccctgtctctactaaaaatacaaaaattggctgggtgtggtggcacacacctgtagtcccagctactcgggagcctgagggaggagaatcgcttgaacccaggagtcagaggttgcagtgaggcgagatctcaccactgcactccagcctcggcagcagagtgagattctatttaaaaaaaaaaaaaamaaaaacaaaaagccgggcgcggtggctcatgcctgtaatcccagcactttgggaggctgaggcgggcggatcacgaggtccggagatccagaccatcctggttaacacggtgaaaccccgtctctattaaaaatacaaaaaattagccgggtgtggtggcgggcgcctgtagtcccagccactctggaggctgaggcaggagaatggcgtgaacccgggaggcggagcttgcagtgagcggagctctcgccactgcactccaacccgggcgacagagcgagactccgtctccccccagaaaaaaaaaaaagaccgggtgcggtggctcacgcctgtaatcccagcactttgggaggctgaggcgggtggatcaccagaggtcgggagtttgagaccagcctgaccaacgtggagaaaccctgtctctactaaaaataaaaaattagccgggcatggtggcgcatgcctgtaatcccagctactcggaaggctgaggcaggagaatcgcttgaacccgggaggcggaggttgcggtgagccgagatcacgccactgcactccagcctgggcaacaagagcgagactccgtttcaaaaaaaaaaaaaaaaaaaaaaaagactgttggaatcagaaaatgtaggcgtgggaaacgagagataaaagatctctccctgccccctgacagctcccgcctctcccacagctccggggaaccttgtacaacaccggccgacatgtctccttcctgcctgcaccccgacctgtggtcaatgtgtctggaggtcccctcctttacagccaccgactcagtgaactgcggctgctgtttggagctcgcgacggagccggctcggaacatcagatcaaccaccagggcttctctgctgaggtagtggccactgattgtttacccgccaccctccgccctgagtcaccccaattcctcccacctcaccctcttagtgtctcaccccatcctcctccacagaactggcctcccaccctaagcactaatcctcagcctgattcgggcccccaaagctggggtcatgctctcctccccttctgctgggggaccccatgctctgtgctacccccaggtgcagctcattcacttcaaccaggaactctacgggaatttcagcgctgcctcccgcggccccaatggcctggccattctcagcctctttgtcaacgtgagcggaggcgagattcrgagggagggagcagttgggtgcctggaacccggggtctgagggaagcggggtgctgggaggcccagactcctgggtcctgggggaggagaaggttgagggcttggacttctgggctcctgtgtcctcacctcgtacccccacacaggttgccagtacctctaacccattcctcagtcgcctccttaaccgcgacaccatcactcgcatctcctacaagagtaagtccctggcgtgctgggggcagtggtcacacacgagggggttcaagagtgccatccctctttactctggcctgatattcccgcagatgatgcctactttcttcaagacctgagcctggagctcctgttccctgaatccttcggcttcatcacctatcagggctctctcagcaccccgccctgctccgagactgtcacctggatcctcattgaccgggccctcaatatcacctcccttcaggtgaccctctgtccgcaccgcccttcctaggcctgggtactccactcactggcctgggcatccccttgctcacctgccctccctctcctcatagactgaactcaagtaggtaagagggtcagaccaccttgggggtgggtggggctgagaacagaccccgcccacctgctcccaggggcggggtttcctgcgtgacgtcaccaagaccattcactattcactcccagtttcccaccctccttccactgcagatgcactccctgagactcctgagccagaatcctccatctcagatcttccagagcctcagcggtaacagccggcccctgcagcccttggcccacagggcactgaggggcaacagggacccccggcaccccgagaggcgctgccgaggccccaactaccgcctgcatggtatggtccagtctgcaccccctctaagtcttgggctaaccctcttatatgtgtctccccttggtgtctcagtgtgattcagtcccatcctccttcctgcgtctatatggtctagcctcgtgagctgtctctttttctctctttccctacatgtctatgtggtacagtccacctgccagccctaggccattgctagcccacgatttgtctttcctcttcactgctttgtaacttggtctataacccttgacccctgccttcctatggtccaattacctactgttctgtgcttcctattactgtgaatttccaaaatggtacaatttggatcctctctccctttccaagtcgtactaccttacgctgttccacaatctgatgctcccttcccccttactgagaatctacaaggtacaaccccttccctccacctctgcctccctgtggtttagcccaggaatctcacacacccccggcttcgcaacatggtacagtccacaccccccccccccatgaagaccttcaagtagttcagcctactgctgaatctggacgtcccgattcccccctcctattggcttcttgtggttcagcccagtgcttctcgacctrgtacattctggttccccgctcgcagacttccgacggtagggcccagcgcggcgcagcccacgccccctgcacaccccccgccccttccatcctatactgacgccccctgccgttgttctctgtcttacagtggatggtgtcccccatggtcgctgagactccccttcgaggattgcacccgcccgtcctaagcctccccacaaggcgaggggagttacccctaaaacaaagctattaaagggacagaatacttcctgttttctcagtggtctgattctaggcgcggtggggaaacatttgggtattaaagaacagacttcttccggaaaccaatcttcctctttctaaacctccgctctcggtattttggcttcctgcttctcaaaaccatctttaggaccgcggcccctttaagcggcgccccttttccccccatcacccccctcgccatcaggcagcacgagcagagccatgtgcttccccctcccgcctgcctcattggcccaaactgggtcacggtcccgccccccagtaccgcctcccattgggcaaatgtaggtcagtgtcccgcctcccaccgaaaggcaaggcaacttcacgcgmtgagcccctcacgcgccctcctgggccctggcggacccagaggccccattggctgtgcgtctcaaggtgtcggagacgattggtccgtgtttgcagccggagggaggcacgcggctgggktgcatgcccatagaggctggcggggctggacgcgccgggcggggacccggaggaggggcgcgcgctgtggcgtcgggtgttttggtttggatttttttttccgcgaaagaagtttgctttggccacgcctcaaggcggccgcctcctcctgccccctcctcsgcccctccgcgcacacctctcggtgcagattgcaaagcgccttccrttgcgagagctgcagattttgcaagagccaggctcgcccaccttgtagaaggagcgccttgagtcccctctcaccctcggttgcaaagagccgaccgcttgatctggacaccccctcgcccagattgcatgatctcccgggaccctcttgagttgcacgtttctgcaccgaggacctcaaatccccgtcgctcctaggatttgcagcgttctggatactggagggttgcaggctacactcgcccgcccctgggcagacactcgtccaaaccactggagtgtgctggtgactsgcaggccagcccttcgcctctccatgaacccgtgagcctgggggcaggtgccaggcgatggcgcggcctgtgagcgacaggaccccggcccctctgctgctgggcggcccggccgggacaccccctrgcgggggagcgctgcttgggttgcggagccttctgcaggggaccagcaagcccaaagagccggccagctgtgagttctaacccccatctcacccacttcggacaccctacccccttagggactcaggtgccgtggggtggggtcccatagaaacctgcgtgcggggagtccatcttcccaaccttaatctactcaattactcaggtgtttaggcccctagatcccttagcgcccaggacccaaaagcgccggctctgaagcccgtccaccctaaggacccaggcaccaacgtccccaacgtcctccccgcttagttcacaagagtgtaggccccagcctcctcttccttttggtccgggagtctggacccctggggtcccagggagggggtgtgtcgggtgctcacacggtggtgacacgggcttgggcggggcgtcatggggtcacatggagtctagggatgagggatgtgccccaggaatagagccccttcctgccccttacagatggtgggggaggggaagggggtacagcgcgcaggggatgggggttgggtaattacagtgaaattacagagctgtcattttttctctcacctgcccaaccctccacctaccctgtccctgcccccctattcctgaacttccgtctctctttctctggttcgctgtctttctgtgtgtctattccttcccggcattctgtccccatctctgtgaatctgtccacctgtctctgccacccccgtctccattctttctgggtctctctcccactctgcgtctccgtccctttttctcccgtctctcctctccgaccccccgtcccctctttctctggatctccgccctgtgcctctcggactcggggtctcttctccatctctatctcccccacctcaccctcatcccaacccgtctttcccggcccgcaggtctcctgaaggaaaaggagcgcaaggcggccctgcctgcagccacaacccctgggccaggcctggagactgcgggcccggcggatgccccggctggggcagtggtgggcggagggtccccgcgggggcgcccggggccggtgcccgccccgggtctgttggcgccactgctgtgggagcgcacgctgccgttcggcgatgtggagtacgtagacctggacgccttcctgctggagcacgggctcccgcccagcccgccgccccccggtggcccgtcgccggagccgtcgcccgcgcggacgcccgcaccctccccagggccgggttcgtgcggctcggcttccccccgctcctctcctgggcacgcccccgcccgggctgccctcgggaccgccagcggccaccgcgcaggtgcggcgaagggggcggggcgggtcctgacggggcggggcttggactcagggggcggggctgtgcgacgctgggggctgggaccgtgggacctggctgcggcctcgaattctgtgtccagttgtcgagaggtgtcgtgggagggggccagattcggtgtctcttaatgggtcagggaccaatggatccatgggggaggagagacttggaaccctaaattccaggaagcctgcccaatgagattttgtgggtttttctgtgggacttggggacaaacgatgtggatactcgtgaagccagaactggaagtccggaacaccagagttatttactggggagtggactgacccccgaatctgggcccataatcgatggaactgggataggactggagcccctaggtcctttacaggggcaaaggcaaaggagaggcacagaattctgtttacccaggacataagagactggcagcccaggtccctgggtcccccagtggggcgtgctgcagccccgggtcccagagttcttcagaagggaaaacgttagggatcttgtttctggatcctccaattggggctggggccaagcttcctatattcctaggagaggcctgggatcccagaatcgtggtagcccagtggcgggggttctgggaaggtccaggaggccgatgctccccggagagcagggggttgggaatctttggaggttgagtggaactaagtgactggaagagcaagaggaaagatgtttccctttgggcacattgaggtctccagggacggactgcaggtcggggattcctgggcacacctgctccaggtccgacctccgggccgaaccagggccctacccttcccagcggcacattcctgcgccacgtgagtcctcccatccctcctccgcgcttcgcgcaggcgccttcaagcgcgaggggggcggggccgggggaacgtgagggcgccgatggcgggggcctgggaggaagggaggaggagggaagcaggcgtcagcacgtgactcggccctgaacctgtgtccttagctggccccggctggctggtgcttaaaggtacaggcgcctcctttcgaaccaatcttctggaaccttagagcagcttctcctcctctttccagcgagtagctcttagactctaacttgagagcttttcagtgcagtagattctttttctctggacagtctggggtctaagcttaggtcgtggattcggtaagtaggattcaggctagactgtgcatctgaagtcctgaggttttagaagcaatagccccatcgcttctcggccttttggctaagatcaagtgtagaagcaatagccctgattcgtgtgttacctagggcaagtcagttatgactgggactcagtttccttgtttgtaaaggtggatatggctccatgatctctaagcatctttatggcttaggggaaccttcatttttctcgttattttggagacggagtctcgctctgttgtccgggctggagtgcagtggtatgatctcagctcactgcaacctccacctccagggtccgggttcaagcaattctccagcctcagcctccctagtagctgggcttaccggcacccgccactacacctgggcaattttcgtacttttagtaaagatgaggtttctccatgttggccatgctggtcttgaactcctgactaaaggtgattcgccgcctcggcttcccaaactgctggggttacaggcgtgagccactgcgcctggccaagggaaccttcatattttatattagggagattaatccctggccgaatttatgctagatcccagaaggactttccatgtggctatgataccacagcaaaaagtagcttcaggaaaccccctccttaaaatacacactcagctgacacgtgctgtttccccaaggcctgacctctcgggacacacccagccctgtggacccagacaccgtggaggtgttgatgacctttgaacccgacccagctgatcttgccctatcaagcattcctggccacgagacctttgaccctcgaagacatcgcttctcagaagaggaacttaagccccagccaatcatgaagaaggcaagaaaaatccaggtgccggaggagcagaaggtgagcagagctggatgtgggagatagacttggctggagacatgccccacagccagggaggggccttttctcacagtcaagcctgggcttctccttgggattagtgctcagcctctcctggcctgcagccacagattagtcctccttggccacggggcacaagggggcaggggcctgaggtttataaagacagtgtcaactgggcgaggggcctcactcgtgtaatcccagcattttagggggctgaggcaggaggatctcttgagctcgggagttcaagaccagcctgggcaacatggcaaaaccccatttctacaagccacttgggaggctgaggtgggaggactgcttgtgcctgggagattgaggctgcagtgagccaagattacaccactgcactccagcctgggcaacagagggagaccttgtcttaaaacaaaagacagtgtcactgtggggtgctgactcagccagctctgctaggtctacttgtagagacttggagcttctcctattacttgggtccagagctccaccaggcacacttgcaaaggacagtcttcctttggcaatgggatatcagcctgtggcctgtctctccttactcagcaggcctttgatctctgatgtgggacttcctttggagtgattgcatttggctaggatgaagactgtgccagcccctttaggccttgtttcctgggcctggacttctcactggtgggagacttcaggcttctgttagcagccagtgccactttctgatttggggtgatttgagcagtcattgcatctttgcatgattttgttttttgccattactggagtcttccctagcaagagttgcttgggcttctgttacaagactttgtcattccgggccaggcgcgttggctcacgcctgtaatcctagcactttaggaggctgaggtgggcggatcacttgaggtcaggagtttgagaccagcctggccaacatggtgaaacctcgcctctactaaaagtacaaaaatgttccgggtgtggtgtctcacacctgtaatcacagcactttgggaggccgaggcggacagatcacgagatcaggagaccatcctggccaacatggtgaaaccccgtctctacaaaaaaatacaaaaattagctgggcatggtggcactcatctgtagtcccagctacttgggaggctaatgtaggaaaatcgcttgaacccaggagacggaggttgcagtgagccgagatcgcgccactgcactccagcctgggcgacagagtgagaactccatctcaaaaaaaaaaaaaaagaacaaaaattagccggacatggtagcgggcacctataatcccagctacttgggaggctgaggcaggagaatcgcttgaacctgggaggtggaggttgcaatgagccgagatcatgccactgcattccagcctgaacgacagagcgagactccatctcaaaaacaaacaagactttgccatacccttgcgtaacaca

SEQ ID NO: 93235 - DNA, 23428 bp, Homo sapiens
gaatatagaaagccggggctggccccgggcaccctgggaccggagtccactccttccagcgccgccagctgggaggccgccatcggggtcactcgggtgggaggactgactgtgagaggctgggtcccygggggtctggctgtctctggggactgtgatcatctgggggttctcctgataggcagaccctacgtggccatccgaggcctccggcggggccctgcagatgtccaaatggctccctgcagcagcccctgccacactgttctgacaatcacgctgcccaaataagcgaccatccaatgtgtcaggccactcagatccgccacctgcctgcacccagtggcaccatgcctggctggccttccgtgaccttcctgccagccgtctctgctggtcaggttgacctcctgacaccatccccaactgtgtgacccatcagctggccatctctgctcagccacacgacagcctccaacccaccagtcacacagtgcccagtcagacccttcagctgtcctgaatttggtcaggctgaccacttgatcatttccaggtggcaagctgcctgcctgtctctaatcacccaaaggtccttaaaggcacgacaggttgcctgcctgcccccggccaagagcacgacgaactgaccctctccttccactgtctggcaaacgccaatggcttccgactgacagtcgcagtatctgcctgttggagcatctgtctctggccaaatctgacagcccccacgagtttctcctgctcatcagctctcacccgcagaccagccaggatgcctctccactgggcctgctcgctcagccttaaaggccgaaggcttggcaaacccttccctaccctgtcaatgggggaccctgctccctggaccctcctcacactccttccagctgctgcagtggagggtgaaatgcgctacaggggtctccattactatgggacaggtctatgatcttcacagcccatctaggtgtgagtgccacctaaccagccaccctcctcaggctggctgcccctgcctggggcctggccctgggacctgttccaggccgtcctctgatctgcggggagccctacccaagctgcccccagcctggtttctgcctaaatgctatctcctgccagctacccggacgcttcttcccggacaggggccagtctctatctcgccctgtctccctcccaagcctcagttatccccttgaggctcctgacccaacctcggggaccctggacccttgatccctgcaaaccagaagcccttcattccaatcccaccaacccaggccgctgcttcctccagaccacagcagggagctgcaaagagaagaaaggagtcaaggcaggccagcctccccgccccaccctcacccatcccccccatcgccggggctcacccacaccggctagtgccgggctcaatggcctcccttccagtgcctgctttttccgagaacgtaggctgtggctccccggcttctacttctgcggtgcttcccggcttctggcctcactcatcaggcctcgacctggaatccagggagcccggccccttgtgtaaacacaggagggcccccacaggcccctggaggaggtccgggggtgcggctcacacgctttctttacctgtgctctcccagggggtgaacgcccctctagactcaggcttcccggtccccggggggttgagattgcctcacctgttcccaggcagtctctccctccccacagccctgccagcctgcaccctgcacttcccggtccacgccccacccgccatcccagcaccagggaggggcacaggatcctttaagaggggcgggcgtggctgacccaaggaagccggtgtgggaacacctgccacctggctgttgggaaggaggcagggagcttccggggcagtgggggcaggaagagggctggtcttcactggcatgacgtccctgtccccaaaccaaatgcattctcacccgcaggaaccaattctccaacccatcccccaataacacacacagagcactgtcagcaaaaatctttttaataagagagtaggatccagggttagtttttgtagcctcggctggcccgtcggcctctggcacgctcgaacttccggcccttggagcggacgtagggtctgtggggagaggagggagtgagaggggggccctcttaaaggaggccattgtggagtggcacaggaacaccacaagcctgtcacattcagccccaggagagtcaatgctgctggaaaagcttggcagagtgggaagccaaggagccaggaggggctatggaagcacctgccccaccacctggagggtcccagcctgggctggcaaaggccggtgaactgcatgctccccaggagatgcctgctcaggccctggaaaacacagctccaagcagtgttgaagggaaaagcaggcaggatgaggcagctgagagttccagaaggcctggggctggctggtacgagggataggagaagcagcccaagtgtggccaggcctggccctgcaggctgagtctggggagagggcagggctgggggcctgatactcacttggtgtggctgtgcggggttcctggggccttgccgaaatgccggtacacctctcggcccttgcgaggacctagggaaggggaaggagaaccgggtgagacagggatctggcgcccagcttctggcctcccagatccaggagggtgaaggctgccagtagccacacagctcagtccaaacccgtcgaccacgtatcactcaccggagagcaggacagtgccacagcccttaggggagtccagggccagctggtcgaaagtgaggatcttgcmccctgccctgaggatgyggctgcgggcccggctggtcacgcgcagtgcacatacctggtggagaggacaaggctggcgggtcagacccctgcgtggtcacccaggggctgccaggactcaccctccactgccttggcgcagcagagccctggtaaccaacactatcgtttactacccggagcaccctgggctgacagcagcagttctcaacacttccggaactttcaccaccacatccctggtgttatgctagaaactacagcaaggaagctgggccaaaaaaagacctgtgcagaggtgacaaaggagtctagacttgagcccaggctgtctggctctaggggccagcactaacagtttacaacttgccccagaagaagcttgcccaggggaccccaccatcaaccatgccagagacgacccacaccaatcctcaaagccactcagacaggcaggatgcttgcctcaccagcggtggcaagactgaggatggaccagcacagcacagcacagcacagcacagcacagcacagtacagcaagggtctgatgggtctgcccagcccccgccagctcaccttcagtttgggtacctcctgaacccgcacatcatcagttatggtccccacaaccacggccgtcttgttttcccggccaggaagcttcatcttccggatcttagggtggggaggatgtacgtcgtaagttgttctggtgtttacattcagccccgcttgaggcatccccaggccagggcagctgtgccctctaacgggaccccccactcacaccacaccccttaaaccccacaggcctctcctcaggtccagctggggaaagctccagataaaaaaaaaaatgcagactgttcaatagggcctccctcagcagagcctttgacataaaactcagttatgacttggggcaatctcctgaagccaccaggacacctccacctcacaaagagaaggagaggaggaccaggagacttgcccactgcccatggacactcagttccaaccaacagtccaagctctacgctcgcgactggctgagacaaacccttgatgccctggttgctcccagagctccaagtcctgcctcccttccagacagacaagacccagcggctcccaggtctaccgtgctctctggaccagccactcaccatccgggaaagggacagaggcggccggttggtgcgactcataaacaacctcttcaacacaaccwggttgaatgtggagttggttcttctggccagaaacctgtataactggagggacgggaagacagtgagaagctgggacagcctgctcccccgcagccttccagtgaaggggcaaacacatgatgatctggactaaaagaatctttatccctttcccccaacccaccgacctagagggagaaagctggcccaggtccttcctggccaaggacctagaaaatcctggctccactcccgagctgtacacagcctagaggctgaaaatacaaatgcaggagaccctggaacagaaccagagacccgagactgctctgcaggcccctgggaggagcttggtgccagcactagaatggaggatctgcaagtcagacctggggtgacccttcccaaagacctcagggcccagcctcaccttgaccaacagcctcaggtagatatcctggctcttgggctccttgcgccgaacctttcggtccttgttatggcggatgtccactccctgtgggggtgaagaggcaaccatggacccaattacccccaaccatagccaattattacttatttctgaaactgagagctgggacacaagcccaggtctgaacacaccagctcaaatcccaggcccaccaccaggagacctgtgggctgccactgatccctctgtaaaaaggggctgtttacaaagccttcagcccatggcacacagaaccctgaaacatcgtaacacagcaatcatattaacttaatacaaaaaggtcaattctttacaacttgtattttgcaacaatgttatcaaaactggttcccatacccggagggataaccaaaaatatcaaaccaatggcagtaatgatgaaaacgaatccttattcagaacctagcaatactactagaaccacctctcctacagcatcagtcaatccaacaacccttaccaaatagtgtctttttaaaacatcgtttttaaagtggagacagggtctcacaatattggccaggctggtcttgatctcctgggcaaggaatcctcccgcctcggcctcccaaagtgctaggataacaagcgtgagccgcctcgccaggctcctaccgccctgctgcctttctgagcaacttaagtttttcagactgtgttgacaattacaagaactatttaatagctccacttatgcagcacttactgtgtgcaaaaccccgtgatgagcatctcctgtgaattatttcttcccaaattcacaaacttgtcagatgagattactgtgtacccaacgaacagccagacactggggcaaaggctcaaaaaccatcacaaggtgggaaggggcctgagactcagagacctgcctggtccccaaatccagttattcggctctcgatcctctcacccgccgcggcccccatcgaacccgacttttcatactagaaagtgacaggtccagataaaggcagcaaagccaaataactaagagtggctgcgggtccagccacctgggtcggaatcctggctctgccacttcctggctttgtaaacccagtcatatcagcctccgagtacctccacttggtcatctactaagtgggggcggtaggctatgactgacccatccctgctctcctggcccccagagtaggtccccagtatcgggaattgctccctccgggcagccgcagaccccctgccgccctccagcgtgcccctagcccaaaaccacggcggatggcagcggattatccagccccgaacgccgcaaagcgagctcaccatgatggcgcctcctgctcggccaggtccggaaagagagaacgggctggggtgggcggggaaagcctcaagcgagtggcgccgccgtgacgtcacatgggtgcgacgcggcgctctaccacgatccggacttctctgtggtgagttggacgactgactagccgggcgataacggcagagagcatagagcgcaggaacaagcgcaacgtccaagagggaagggccagcacgtcgggggcctctctggccctacccaggccgtgttctcgatagctttccggaagaaagggatctgggagcgagatgcgtgtagctagcacgatgcgtcgcgcggtgacgctctggcccgacrccgacggcctctcagtggctcccggaggacccggcgggcccagtgttggaggtgaggaggcggggctggcagggctagtcggggcatctggaaatttccgaccccacgcttcgggcgtttccttatcaggttcaccgctccctgatctcgcgctgcacttcgtaggcgcagccgctgcttgggaagtcctacttaaggtctaacccgagatgatcttgctgcacctcaatctatagcatcctgtattcccatcctttgagttccgcttctccttctcccccggcccctagatggcccttccctgacctagaaagagggagacagagtttcataggggaggcaaaatggagactccgtggcttgggggtggggggaatggaggcccaaagggtaggaaggagacctagaaagaggggtgagatggagacccagggagaagtagtggcaaagaaagatggtgagatggggccttgcaaggctataaccaaattcaaatcctggctctgctagttactaatggggtgattgggcaagtcatttaacctctctgtgatcttgggaaaatcacttaacttctttgggccttactctccttatggacaaaaaggggatgacaacaggcctggcacacagggtgtttttcaggattatgaaagttaataaaactgctgaggtcaatattttgcacataataagtgctcaataaaaattagccttcactcctattatagcatacatattgtgtgcaaccagatggactggctggggcagtgattaaaatgacttatctactcttccccccacccgccagggaggcccctgcctcttggttctcaggcacattgagcctggaagggcctcctgcagttgrctgtcaatgctgctcckcacttacctctcctccacagagctgaaggtcaggccaggacagtgagacctgactccttgctcctaccagcctactatggcttaagacccagggccagggtcccgttgatgtaacagagcagaggaccagcagatgaatggacaccttgaagcagaggagcagcaggaccaggtaagggaccatctaaaagccaagatcctcatactgtggaaagacaaaatctgaagcttttctttaaaaaaaaaaaaaaaaaattggaggccaggcgtggtagctcaagcttgtaatcccagcactctgggaggccaaggcctgcggatcacctgaggccaggagttcgagatcagcctggccaacatggtgaaaccccatctctactaaaaatacaaaaattagccaggcatggtgatgcgcacctgtaatcccagctactcgggagactgaggcaggagaatcatttgaacccgggaggcagaggttgcagtgagccgagatcgcgctgcactccagcctgggtgacagagtgagactccgtctcaaaaaaaaaaaagaaaaaacagggtctcactcttgcccaggctggaaagcagtggcacaatcacagcctactgcagctgcaacctcctgggctaaagtgatcttcccacctcagcttcccaagtagcctccaccatggctggctaatttttttatttttatttatttatttattttgaggtggagtttcgctcttgttgcccaggctggagtgcaatggcacgatcttggctcactgcaacctccgcctcccgggttcaagcagttctcctgcctcaacctcccaagtagctgggattacaggcatgcgccaccacacccagctacttttgtatttttcatagagatgaggtttctccatgttggtcaggctggtctcaaactcccgacctcaggtgatacgccggcctcggcctcccaaagtgctgggattacaggcatgagccactgcacccggccaatttttttattttttctagagactaggtctccctctgttgcccaggctggtcttgaactcctgagctcaagggattctcccacctcagtctctcaaagtgttgagcttacaggcatgagccaccgcgcccagcctgggagcccttccataagtgatttcagaccttctctccaggcaggtgttccagtgggataatttaggaatcagagaaactgaggggttgaggaggatacttattatttattatttaggtgcactggcccagtcagattaacatcgaaaaagactgagcaccgaacaaagagtcaagttacattttaagtatttcgtggggtagggggagatctgtgcaggsggaagcatattatagcagcgagaaacaaagacagttattcaattgagacatgcattacattatttcttacttttcaaggaaaaacatgttttaggacttgagtttatcctgtctagtgaccttgcagctgcacagttagagaaacagggtcttcacgatgcctgggaaagggagttagataaggctcactagccacaaacagaaaaacaggcagttaatttttaaaggactcaatctcgggccgggcgcagtggctcrcgcctgtaatcccagcactttgggaggccgagatgggcggatcacgaggtcaggagatcgagaccatcctggctaacacggtgaaaccccgtctctactaaaaatacaaaaaaaattagccgggcatggtggcgcgcgcctgtagtcccagctacacacgggaggctgaggcaggagaatggcgtgaacccgggaggcggagcttgcagtgagtcgagatcgcgccactgcactccagcctgggcgacagagcgaaactccgtctcaaaaaaaaaaaaaataaaaaaaaataaaggactcaatctctttctcttcctcagggggaattgggttttttacatacaactgagtttttgcttacacattctttaatttcttttaattcctgtttcagtgtgaatagctttctccctacttcccagacaggacagctgaggccaagaattcaggggcttcccagcagtcacacagcaagtgtgtgtgagctgcagggtcctttctccttttcctcctccctgtcctctcgtctgtgtgacttaggctctatgtttgaatctcagcttctttgcccagtgtctctgcctttccttctcccagggccccaagctcagttgctgtgccccagtctcagtcttactgggtttctgttcccccttctctccgtgtcattccttggcacatactatctggtgctgttgctactgtgggttggatgctaggtacatgatttggcaataagcaaacttcttcctacatttgtctstcttttttttttttttttttttttttttgagacagagtcttggtctgttgcccaggctggagtgcagtggcatcatctcggctcactgtaacctccgcctcttgggttcaagcgatctcctgcctcagcctcctgagtagctgggattacaggtgcgtgctaccacacctggctaatttttgtatttttagtagagatgggggttttggaccagtgaggtggctcacgcctgtaatcccagcactttgggaggctgaggcggatggatcacgaggtcaggagatccagactatcctggctaacacggtgaaaccctgtctctactaaaaatgtaaaaaattagccggacgtggtggcacgtgcctctagtcccagctactcaggaggctgaggcaggagaatcgcttgaaccaggcaggcggttcagtgagcctagatcgtgccgctgcactccagcctgggtgacagagccagactccatctcaaaaaaaaaaaaaaaaaaaagagagagagacgggggtttctccatgttggtcaggctggtctcggactcctgacctggcgatccacccgcckcggcctcccagagtgctgggattacaggcgtaagccaccacgcctggcctacagcctacatttgtcactttctagtgagctctgtccttgtctcctaatgcatatctctttctctctatgcaattctgtttctaagtctcctaatatatacttgcctttctttcaatttcaccatgtctttgcctcggtgcatctgtcaacatcttcactttctgtcccagttcctcccagcccctgggcttccaatattctctccctccctcacctttgacctagagatactgtccccatctctctgtctctgtcttgccatgtgactggttcattcactgggcagatgtttatctcatgccgcttccattctggtttgagcctgagataaataagtctgaattaatgagcctctccttcgcggcttccattccagaagtgtctgtctccatctgtctccgtgtctgtcattttcagggttttcttgtatccttaccttgcacattctcaatcccactgttttggtctcttgtttatatctctgcttttctctgggtctctctgactctgtaactgtccgaaaaaaaagtatccttcactttccccactctccctctcctcccagctctcttattgcctcatccaacctctgtgggtctctgccttgctctgtgtctggatcggatctctgggcctttgttacgcgtgttagagtctctgtctttgcagctaaagacctcctccctcacgccccttttcttttgtgaattcaatggatgagacaggcccactctcccttaacaaagatggcgacaacggcgctgtctatggggccgcgacgtcgtctccgctgcgcgtcggccctcacccacgatggcggccagtctcccgaagcgcgaggccccgcccagytctcggcctctcccgcggccggtccctgcaccaagctcgcgagctgactggctccaccccccgcgccctcgtattggtgcggcccaggccggctgcacggccattggctgagcggatgcacaccctccccccacccctaggtctgatgggggctgttggtgctgacttgcgggaccgcctggaggaggacccggcgtgtgaggagggtgcgggggtcggggcagggaccggagtctaggggactgagggaccaagaggaacagagactcaggcccgggactggggcaccggggtgggagatggaaatggaaaacctgggccaggactgaacccagccaggcctgggactgggttctggaaataagagtgcggatggcggtttgggggcccagggccagacacgcaggcctatggattggggaccaatggatggagacccaggtccaggtctcggggacccagggacagagacccaggcccaagactggaggacatctagggctctgtgcttgaacctgatttgaggttcccataatggggccagggcaggtttgggggtgaagcagacgtcctggacccgagagagccgctggggataggggggcagatgtagttcctaagggtgagtccacaggcggtggggggtggggggctgtcctggcgctctgggcctggggaatgtgaggggcaggactggcaggtggctgggcggggcagtggggaacaaaggtgagcgaaaggaggaggcagaatccgggcagagggcagggagagggcctgtggggaagggacctcagtcctgctcccacccgctccctggagagcaggcggccagacacccaggtcagtgctcagggaccagctcttggcccctgccccttgcaggcgctcgcatgtggctcctctcggaccccgtagtccctgtcatatcccttctctccagctgtctccatgcctgcctcgtacccctcctatttgctctcccttccactctgtcttgcctttctcgttggggtgaaaaagtcttactctcttaagtatctttcatcgcctgagtttcacctcattgaccctgtttgtctcctctcagtgtttctctggctctcagaccctatctctattgcgtttgtgattgttttgctgttttacccactgcaccgtatggggggtgggggtgtcggggaggtgtgtctttcagtctttgcatgtctgtttctgcatatccaatcccactatccattccccttcctgtgccttcttttcccccaaagcccgttatcaycacccaaccacctgtatatttcaatcctttctcttgtttatctattcctatgaaggcaaggatttggggctattttgtctcctgctgtgtttgctaggcctagcaccgtgattggcacataaagggtactgaatacttactggggaataaatgattggatgtttgcatgcccgggtctccggccccctctgggatgctggcctctgtcccgcatcctcaaggtctgcccacacctgtctgagcctgtctgtctctgatgctcctgtctcacctgccactgcccctcattgtctcctcctgtccacagcccctgcccctccctgcccctgccatggggtcctgaattctcaccccttctctcctcccttcccacagaggccagaccaggagctgaccgggagctggggccacgggcctaggagcaccctggtcagggctaaggccatggccccgcccccaccgccactggctgccagcaccccgctcctccatggcgagtttggctcctacccagcccgaggcccacgctttgccctcacccttacatcgcaggccctgcacatacagcggctgcgccccaaacctgaagccaggccccggggtggcctggtcccgttggccgaggtctcaggctgctgcaccctgcgaagccgcagcccctcagactcagcggcctacttctgcatctacacctaccctcggggccggcgcggrgcccggcgcagagccactcgcaccttccgggcagatggggccgccacctacgaagagaaccgtgccgaggcccagcgctgggccactgccctcacctgtctgctccgaggactgccactgcccggggatgggggtgaggtgctgggcagctgctctatcctggagccaccttggtgtctctgcagaatttcctccataggcagctgtgtctttatttttctgtgtgtctgggtgatgtatctctctggatccgttaggagtgatacacagggatgggctacagaaggaacaaaaagacaagaggrccggatgtggtggctcatgtctgtaatcctagcaatttgggaggctgaggcggktggatcacctgagrtcaggagttcgagaccagcctggctaacatggtgaaaccccatgtctactaaaaatacaaaaaattagccgggtgtggtgctgcgcacctgtaatcccagctacaggagggtgaggcaggagaatcgcttgaacccaggaggcagaggttgcagtgagctgagatcgtgccattgcactccagcttgggcaacaagagcaaaactctgtctcmaaaaaaaaaaaaaaaaaaaaaaagcacaggcagaggtcgcgtgcagtggctcatgcctataatcccagcactttgggaagccaaggcaggcagatcacctgaggtcgggagttcgagaccagcctggccaacatggcgaaaccctgtctctattaaaaatacaaaaattagccgggcatggtgacggatgcctgtaattccagctactcgggaggctgaggcaggagaatcacttgaacccgggaggcagaggctgcagtgagccgagattgcaccattgcactccatcctgggcgacaagaccgatactccatcacaaaaagcaaaacaaaacaaaaacgcaggcagagaaaagtgatttacatctgctgttctcttgctagatttatgtttctgtctcctatcctcttcccctttgcatgggtcttgaccacaggtgagtcacccagggtggtgagagcagcagcctgagacaggaccaggtaccacccagagtgatgggtgccaacagaggtctagggcttccctggagttcagaggtggcatctaatcctgcctggggcccctaagggctggaagtaacctaatcctgggtaataggtgtttggggtgaggaaagtgggaaccacagctctgaactacagctcctcccacacatggggacaaagggcatttggtttcacacctaagccctgcctttgtctcagcagctaggagttggggcagggctgcatacctaggcctggccacatgagagccagcaggtcccaggggccagccctccaccaattccgttgggggctgatgaagggactgtttccaaggtggggggcctgggtcactggcctctgcagaccctaacctctctccacagagatcacccctgacctgctacctcggccgccccggttgcttctattggtcaatccctttgggggtcggggcctggcctggcagtggtgtaagaaccacgtgcttcccatgatctctgaagctgggctgtccttcaacctcatccagacaggtaagggccagtgagaatgggagctgggggctgggacagctgagtcctaagggagcaaagtggtgggtgggactcctgggtctatggggctggggtgggacagcctgcctaacagcccggtatcccacttcagaacgacagaaccacgcccgggagctggtccaggggctgagcctgagtgagtgggatggcatcgtcacggtctcgggagacgggctgctccatgaggtagagcaggagcaccctgcccctagccctgggccctgggggactatagagactgccaccaggacccaggcttctggtctcccaccctccaggtgctgaacgggctcctagatcgccctgactgggaggaagctgtgaagatgcctgtgggcatcctcccctgcggctcgggcaacgcgctggccggagcagtgaaccagcacggggggtaggttgaggataccacgaagggagggatgagcccctcctggggtgatagggacccctatatctcccactcagccaaacccacagtcagtcaagtaaatcagcctgcctgtgggatgctcacccccagctcctggacatttttgcctgcctgcttcccagctgtatcccgagcgcccagaactctgcctggcatgggaggcactcagtgaattgtagggagcaaatgaaagagatgaccaggaacctggccccgtaaggagtcgcctggaggtggccccacggctgtggtgggcctgggccatggccttcgtggtctcattgccagctgctttcctacctgtctctttccccaacccctgtttgctccttccttctgtgtgtccgtccatctccggctgtgaagatttgagccagccctgggcctcgacctgttgctcaactgctcactgttgctgtgccggggtggtggccacccactggacctgctctccgtgacgctggcctcgggctcccgctgtttctccttcctgtctgtggcctggggcttcgtgtcagatgtggatatccagagcgagcgcttcagggccttgggcagtgcccgcttcacactgggcacggtgctgggcctcgccacactgcacacctaccgcggacgcctctcctacctccccgccactgtggaacctgcctcgcccacccctgcccatagcctgcctcgtgccaagtcggagctgaccctaaccccagacccagccccgcccatggcccactcacccctgcatcgttctgtgtctgacctgcctcttcccctgccccagcctgccctggcctctcctggctcgccagaacccctgcccatcctgtccctcaacggtgggggcccagagctggctggggactggggtggggctggggatgctccgctgtccccggacccactgctgtcttcacctcctggctctcccaaggcagctctacactcacccgtctccgaaggggcccccgtaattcccccatyctctgggctcccacttcccacccctgatgcccgggtaggggcctccacctgcggcccgcccgaccacctgctgcctccgctrggcaccccgctgcccccagactgggtgacgctggagggggactttgtgctcatgttggccatctcgcccagccacctaggcgctgacctggtggcagctccgcatgcgcgcttcgacgacggcctggtgcacctgtgctgggtgcgtagcggcatctcgcgggctgcgctgctgcgccttttcttggccatggagcgtggtagccacttcagcctgggctgtccgcagctgggctacgccgcggcccgtgccttccgcctagagccgctcacaccacgcggcgtgctcacagtggacggggagcaggtggagtatgggccgctacaggcacagatgcaccctggcatcggtacactgctcactgggcctcctggctgcccggggcgggagccctgaaactaaacaagcttggtacccgccgggggcggggcctacattccaatggggcggagcctgagctagggggtgtggcctggctgctagagttgtggtggcaggggccctggccccgtctcaggattgcgctcgctttcatgggaccagacgtgatgctggaaggtgggcgtcgtcacggttaaagagaaatgggctcgtcccgagggtagtgcctgatcaatgagggcggggcctggcgtctgatctggggccgcccttacggggcagggctcagtcctgacgcttgccacctgctcctacccggccaggatggctgagggcggagtctattttacgcgtcgcccaatgacaggacctggaatktactggctggggtaggcctcagtgagtcggccggtcagggcccgcagcctcgccccatccactccggtgcctccatttagctggccaatcagcccaggaggggcaggttccccggggccggcgctaggatttgcactaatgttcctctccccgcgggtgggggcggggaaattcatatcccctgttcgtctcatgcgcgtcctccgtccccaatctaaaaagcaattgaaaaggtctatgcaataaaggcagtcgcttcattcctctcagaccttctgcccttcctccatccgacagcccgcgggaggactcagactccagcacttccagcagcgcctgccctctatggacgacagcccggagctgcycacgggctgcagccagtatgccwgggagctgccctcttcttccacaacagctggctctggggttctcaagatttattcaggatcgtgttaacggaggcggtgggaggatagggtccctgacgtgccggggacacacacagagaaccctccccgcccccgcaagggaggggggaggctcgctttttcttaaaaatataaatgtatttatctgcattatcacgtccctggggcacccagctggccggcccgtgggccacagggcaggaagggaacakggcgtaagtctcagcaaggcggaggagagctccgccaggtggggatgtggggcagcctcacagggccccgtgctgggcctggtatcgggacagcacggcgcggtagtgggacagctcctggcgcacggccacaacttcctgccgcagcagggcgttctccttctccaggaaggccgcccgcaccgatatctggttctccttgagccgccgggcgtcacgggaccgcttggctgcctcgttgttcttgtaccgccggctccagtatttctcatcctgcaggagaagagggggagagcactgaggtccagagggacccaggtcccagcgagagaggaagggagccccagcagcggggcctaaaccacaccaggtctctgctgggataggtacccaagggtctgcctttctagggccctggttgctaaggagattgggcccctagcaacagtaaaggcatgagatagaccccccaccctcaagcaactcgcttcaagtctccactctgcaaagcggaccccagccctccccacatgataaaggcctgcatgcagttagctcttgcttgctaaggatgcttgttccctagcaacaaggccttcatggtctgagggcttctcccaatgaagagcactgccctgccctgcacattgcctttccagatcctggttgctaaggaaagcttggtgccctggtgatggggtttggtgtcccataaaatcctcgcagagctggggccttctgacctggttgccaaggcaacctcatccatccttggcaaacaaaagtgaggtctaagtggtttcaatgactgtggccagcctctgacctgctggccttgaactgaggccagagaatagcctcctccccagtaggacctgactgagagaagagctgtctcttaggaaaggggactatcctgagacctccccagaggattatacctaaagtcctcccatcctggaagttggttcctaaggaagactcctccttagtaaccaaggaccacggggctcagaaagatgctctctactccactatttaattaaagcccagttcctgcttgtgagggtaaatccagtccctagcaacagggccctctagaaggagaaaccactggtgtagatctgacttccaggccagtcctaggtgcttcaagtagctatgtgttacgcaagggtatggcaaagtcttgtttgtttttgagatggagtctcgctctgtcgttcaggctggaatgcagtggcatgatctcggctcattgcaacctccacctcccaggttcaagcgattctcctgcctcagcctcccaagtagctgggattataggtgcccgctaccatgtccggctaatttttgttctttttttttttttttgagatggagttctcactctgtcgcccaggctggagtgcagtggcgcgatctcggctcactgcaacctccgtctcctgggttcaagcgattttcctacattagcctcccaagtagctgggactacagatgagtgccaccatgcccagctaatttttgtatttttttgtagagacggggtttcaccatgttggccaggatggtctcctgatctcgtgatctgtccgcctcggcctcccaaagtgctgtgattacaggtgtgagacaccacacccggaacatttttgtacttttagtagaggcgaggtttcaccatgttggccaggctggtctcaaactcctgacctcaagtgatccgcccacctcagcctcctaaagtgctaggattacaggcgtgagccaacgcgcctggcccggaatgacaaagtcttgtaacagaagcccaagcaactcttgctagggaagactccagtaatggcaaaaaacaaaatcatgcaaagatgcaatgactgctcaaatcaccccaaatcagaaagtggcactggctgctaacagaagcctgaagtctcccaccagtgagaagtccaggcccaggaaacaaggcctaaaggggctggcacagtcttcatcctagccaaatgcaatcactccaaaggaagtcccacatcagagatcaaaggcctgctgagtaaggagagacaggccacaggctgatatcccattgccaaaggaagactgtcctttgcaagtgtgcctggtggagctctggacccaagtaataggagaagctccaagtctctacaagtagacctagcagagctggctgagtcagcaccccacagtgacactgtcttttgttttaagacaaggtctccctctgttgcccaggctggagtgcagtggtgtaatcttggctcactgcagcctcaatctcccaggcacaagcagtcctcccacctcagcctcccaagtggcttgtagaaatggggttttgccatgttgcccaggctggtcttgaactcccgagctcaagagatcctcctgcctcagccccctaaaatgctgggattacacgagtgaggcccctcgcccagttgacactgtctttataaacctcaggcccctgcccccttgtgccccgtggccaaggaggactaatctgtggctgcaggccaggagaggctgagcactaatcccaaggagaagcccaggcttgactgtgagaaaaggcccctccctggctgtggggcatgtctccagccaagtctatctcccacatccagctctgctcaccttctgctcctccggcacctggatttttcttgccttcttcatgattggctggggcttaagttcctcttctgagaagcgatgtcttcgagggtcaaaggtctcgtggccaggaatgcttgatagggcaagatcagctgggtcgggttcaaaggtcatcaacacctcsacggtgtctgggtccacagggctgggtgtgtcccgagaggtcaggccttggggaaacagcacgtgtcagctgagtgtgtattttaaggagggggtttcctgaagctactttttgctgtggtatcatagccacatggaaagtccttctgggatctagcataaattcggccagggattaatctccctaatataaaatatgaaggttcccttggccaggcgcagtggctcacgcctgtaaccccagcagtttgggaagccgaggcggcgaatcacctttagtcaggagttcaagaccagcatggccaacatggagaaacctcatctttactaaaagtacgaaaattgcccaggtgtagtggcgggtgccggtaagcccagctactagggaggctgaggctggagaattgcttgaacccggaccctggaggtggaggttgcagtgagctgagatcataccactgcactccagcccggacaacagagcgagactccgtctccaaaataacgagaaaaatgaaggttcccctaagccataaagatgcttagagatcatggagccatatccacctttacaaacaaggaaactgagtcccagtcataactgacttgccctaggtaacacacgaatcagggctattgcttctacacttgatcttagccaaaaggccgagaagcgatggggctattgcttctaaaacctcaggacttcagatgcacagtctagcctgaatcctacttaccgaatccacgacctaagcttagaccccagactgtccagagaaaaagaatctactgcactgaaaagctctcaagttagagtctaagagctactcgctggaaagaggaggagaagctgctctaaggttccagaagattggttcgaaaggaggcgcctgtacctttaagcaccagccagccggggccagctaaggacacaggttcagggccgagtcacgtgctgacgcctgcttccctcctcctcccttcctcccaggcccccgccatcggcgccctcacgttcccccggccccgcccccctcgcgcttgaaggcgcctgcgcgaagcgcggaggagggatgggaggactcacgtggcgcaggaatgtgccgctgggaagggtagggccctggttcggcccggaggtcggacctggagcaggtgtgcccaggaatccccgacctgcagtccgtccctggagacctcaatgtgcccaaagggaaacatctttcctcttgctcttccagtcacttagttccactcaacctccaaagattcccaaccccctgctctccggggagcatcggcctcctggaccttcccagaacccccgccactgggctaccacgattctgggatcccaggcctctcctaggaatataggaagcttggccccagccccaattggaggatccagaaacaagatccctaacgttttcccttctgaagaactctgggacccggggctgcagcacgccccactgggggacccagggacctgggctgccagtctcttatgtcctgggtaaacagaattctgtgcctctcctttgcctttgcccctgtaaaggacctaggggctccagtcctatcccagttccatcgattatgggcccagattcgggggtcagtccactccccagtaaataactctggtgttccggacttccagttctggcttcacgagtatccacatcgtttgtccccaagtcccacagaaaaacccacaaaatctcattgggcaggcttcctggaatttagggttccaagtctctcctcccccatggatccattggtccctgacccattaagagacaccgaatctggccccctcccacgacacctctcgacaactggacacagaattcgaggccgcagccaggtcccacggtcccagcccccagcgtcgcacagccccgccccctgagtccaagccccgccccgtcaggacccgccccgcccccttcgccgcacctgcgcggtggccgctggcggtcccgagggcagcccgggcgggggcgtgcccaggagaggagcggggggaagccgagccgcacgaacccggccctggggagggtgcgggcgtccgcgcgggcgacggctccggcgacgggccaccggggggcggcgggctgggcgggagcccgtgctccagcaggaaggcgtccaggtctacgtactccacatcgccgaacggcagcgtgcgctcccacagcagtggcgccaacagacccggggcgggcaccggccccgggcgcccccgcggggaccctccgcccaccactgccccagccggggcatccgccgggcccgcagtctccaggcctggcccaggggttgtggctgcaggcagggccgccttgcgctccttttccttcaggagacctgcgggccgggaaagacgggttgggatgagggtgaggtgggggagatagagatggagaagagaccccgagtccgagaggcacagggcggagatccagagaaagaggggacggggggtcggagaggagagacgggagaaaaagggacggagacgcagagtgggagagagacccagaaagaatggagacgggggtggcagagacaggtggacagattcacagagatggggacagaatgccgggaaggaatagacacacagaaagacagcgaaccagagaaagagagacggaagttcaggaataggggggcagggacagggtaggtggagggttgggcaggtgagagaaaaaatgacagctctgtaatttcactgtaattacccaacccccatcccctgcgcgctgtacccccttcccctcccccaccatctgtaaggggcaggaaggggctctattcctggggcacatccctcatccctagactccatgtgaccccatgacgccccgcccaagcccgtgtcaccaccgtgtgagcacccgacacaccccctccctgggaccccaggggtccagactcccggaccaaaaggaagaggaggctggggcctacactcttgtgaactaagcggggaggacgttggggacgttggtgcctgggtccttagggtggacgggcttcagagccggcgcttttgggtcctgggcgctaagggatctaggggcctaar

SEQ ID NO: 93236 - DNA, 64613 bp, Homo sapiens
tattttctgtgtgtgtgtgtgtgtgtgtgtgtgtgtgtgtgtgtatttgctgttagactgtgagctataagctcttcaagggtggaaacggttggtttcctctctacaccccctggcctagcacagagcaggcacacgtaagtgccgaggacgtttggaaaataaatgaacagccatactttacttccccacatggtccgtggatgtgaggcctctgcctgctccagcagggaccccagcatgtgcctttttgtccctgagaagatgctttgcctgaaataactgagtgattggcatggggtgagcataggtagggccacacaggtgaggaaaggcaggcgttaccttcatcagcatcttccccgtccatttggctgccacaacaggacaccacagactgggtggcctgtaaacaacaaggttattgctcaacggttctggaggctgggaagtccaagatcaaggcaccagcagatttgctgtctcctgagggctcatttcctggttcatggacggtgctttctcactgtatcgcaaggggccaaggtagctctctggggtccctcaggtaaggcactaaccccgtcatgaggcctcagtcatcatgactgagtcacctcccaaaaggccctgtatcctaatagcatcatcttgggggctaggatttcaacatataaatttggggggacacaaacattcagcccacagccccagctcccttgtctctgccagagagttaacaggaacagggcgacggggtagcctgctgccctcccaccagcgccgtctctcagtcaatgcttagtgcaatatcagattagtgcttgtctcgcacaaacccccaccctttcctggccaagcagagtggaaagcccaagctttccaggatgccgtggcacagaggtgcatcagggacagcgctgacgactctgggccagatcccagctttgcagcacaatttgaagttctctataaccagaagtcaaattccagctacaaaacaatgtttgcagaatgactgtattgttgtttaaatactgactatagatgcagagaataacatttggtggtaggtaaaaagatgagttattaaccctttaaaaatatttttattctctgtttcctaaaatgaacatgtatttcttctgtaagaaaaaaattggccgggtgcagtggttcaggcactgcgtggtggctcatgcctgtaatcccagcactttgggaggccaagatgggtggattgcctgagctcagcctgggcaacatggtgaaaccctgtgtctactaaaatacaaaaaaaatcagctgggcatggtggcaggcacctgtaatcccagctactcaggagcctgaggcatgagaattgcttgaatggggaaggcagaggttgcagtgagccgagatcctgccgctgcactccagtctgggcaaccaagtgaaactttgtctcagaaagaaaaaagttataaaatgtatatgtagccctattaaaaaaacaaaccctacaatcataaaagaatgcatgagttcagctttgtggcagacctcctccaaaggaggagagagataggtggtgaaataggaccatgtcacccaggaacttgagagagaggaccactgtgcaccctggcctgccctcataacagggatggggtgtggccctctctcacctcagccccggggtggtggtgggggccggtggtgaagccatctgggggacaaaacctgagctacgcgaccctgcccctttctcaggccccagacgatcttcttactccttgcaaggattcttgccttggtttcctgcctggctctccacttctggctgtccttgaatcctggccccagatcagttttctcagatttttcctaaccagggatttttcttttttcttttcttttcttttttttttttttttttgtgacctgctcatgccccatccaccctatcccagcctctcaagaggggcggggggtggagcggtgtggcttcctgccccatgcccaggtctggcccttagtcctgctacccctggtgccccatcatcttaagtttgagctgaggatcggcctccctgaggcaggacactttgtccgagtcatgacacctgtgatgtctcccctgggctccctgaaccccacccactgcccactgtgggcagcactcagaggttcccctaggatctccctccccacgccacggagtgatccagtgcaggactcccagctgcaggcctcagggacctgcacccccagccccctgggccctctgctgaagttcaggaggccctgtggtccctggcctgggctgtgtctctaggccacagtgagatgtgcctggcatttctacatctggaagggcaaagggagatcaggaagaacaggtgaccactccaggtcaccctgcagccatagcccagccagattcaggcagagctgggctggtggaaactggtagagaggaccctgatgacagcatgagaattggcgaaagtccagcctggatcccacaggagttggaggaggccttcatcctaccatgggccacataaccctccccagaccatagtggaaatgtcacagggaaaagcagctgaacagggcctgtggccaagggatggcaggtgtagtcctcatctacctggacagccatgggacccagctgggcagtttgtgttgggggtagagcctgggggaggggaaaagatctctgggttgttcgggagaagccagatcaatgagcaaatctcccaactatcaagtgcttgcaaaagctgtgtaggtgaagcagccaggtctttggctcacttgctggccagaagggtggaggcactccgggaaagtgtggctggggccagcggtggagagcaggatgggcagtggacactgggaccattaggagcagactcagcaccctgctcccctgtaagcacaggtatggggtccagctgagagaggcacctgggcatggctccccgtgtaagcacatgtatggggtccagctgagagacgctcctgggcacggccctgcatcttccctcctcctgggccccctgatccagaccaggtctcctttctgggctgccaccggcttcctgcctacccactcccctgggcctcagactttagttccagcacgatccaagagtcaggactctacttggttgcaaatgacagaagtcacttcagagtacctcaagcaaagatgagaatttattgagccctgatactgagaagtccagggataaatcctggcttcagacctggccgaatccaggggctctgatgtgtatcgtctccatcctagatccatctgccttgctccgattgccccgctcttcagtggcctctctccaccccactgcaaaagtgatgagaaggtcccagcatcatcaggacattctcctaccagccacaccactcaggagagaataagccatcttttttacttaaaaaaattattttgtagagacaaggttttaatatgttgtccaggctgatcaagcagtcctcccgcctcctgagtagctgagactacaggcacgtgccatcacacctggatttttgttttgttttgagacagtcttgctctgtcgcccaggctggagtgtagtggtgcaattttggctcacttcagcctccacctcccagtttcaagccattctcgtgcctcggcctctcgagtagctggaactacaggtgcacattaccacacctggctaatttttgtgtttttagtagagacgggttttgctgtgttgcccaggctggtctcgaactcctgggctcaagcaatcccaaagatctcaaacttttgccccccaaagtggtgggattacaggcatgagccattgcacccagcgtgcctggcywtttttttttttttttttttttttttttactttttgtaaagatgggtctccctgttgcccaggctggtctccaacttctggcctcaagcagttctcccacctcagcctcccaaagtgctgggatgacagacccaagccactgtaccaggccaagttcatcttttctgctggtttccctcatgtgctggagcaggtcatcaacgtcccagcctgggccatatgctgacctctgaaccactgcccaggctgtgtggccaggcccaggccatcaacctcccagatgactctcagagggttctcaaagcaggagtgatgctaggccggcagctgctacagacacatccccatgggtggtagtgtgcactcatgccgttcctcaccgtggacctgtgactcctccaggaggataaaggacagatttggaccctgctaagaccccagggctcctggggtcttggtgctatcagagggcctgttgacatcaccctgtccccgcctcagttacaacagtggaggccagtctgggccaaacaacctgatctccacattcaagttctagccctcatccaggggacctttgcactgcctgctgctccctccttcctggcttcgctaggctctggaccacctgcaccagcgcagccctgcccagtcccaggcagagcctggcaccctctccaccgctggcccagccccctccttgtatcctacctggaatttttagctctctgtgtaaccacgagcttagtgtctgcttccccttcacttgtaagtgccaggagggcagggccagatctgttctcattcatcaataagtctcttgcacctgcaccctgacaggtgtgaagtgggttcttaggaatgagagaaggaaggaaggaaagcgaccctgcatagtggagggttgggggcaaacgctgcggctcctgaatcgctctgagatttcccaacaacaggactcacccaagccccctccttcgctgtcgtggagcctcagttttcccaaccctccaatggcacaacctccttcccccagggcttgcagagtcgcggtgaaactagggagggattatgttagaaaaatgctctagacgagatgtaaaaatctttttttttttacacgactgaggaggatccgtttagaatttcaggatttttttaagaaaaaaaaaaacttcaaagtgcgcaaacgttgggccggttctcgtgaccttcctcgggagacgaggggcccagagtgcagggggaacgggagggacggccgggaaccagggcggagaaacgcgggccttggtgcctcactggggggtcggattccgaccccaggcgtaggaacccccgggtccctcgcgggcctgcagcgcgaggcagatctggggagggggcagctcggcgcgggtggggtcggggcttcctggggcgcctccagcttcgttcacaacctgcggaaccctcgccttcaagctcgggctccgcggcaaatcccagggtcgaattctgccaccgccgcggcgtccggttttggcagagtccttgtctgcctccgggagcctcggttttctcgtctctccgccaagcccgggcgttctctccacgcagggtgagggccaggcttagaggtctgcggagctctgaaacaagcctgtcactcagatgggagcgcggcaggaacagcggctcacgcgggtttccggagcgcgcgagtgatgccggacccctcgctctgccccttacgcggcccgtctgacttctcagcaccccgtgggagggagcttccctgggtagccccgtttcacagacgggaaagcggaggcacagcgcgatcgggccctgcccggcttccacgcctactctggttgagtcggggtctgaactcgggccgttggttgccctaagccccgctccgggatctggcgcccggcgccccagccttacacgcccgacccgcgcctgggagccgcccctcggcccccctccctggctcctgggggccgggtcccgtcgttgtcacgacaaccgggggccaatgggagcaggcgggcgggggaagccccgccccttccccgcccccttccccgccctctcggagggctccgggttataagggctggaggccgagcggacgggagctggagcccgcggagcccacggagcccacggagcccacggaggagcccacggaggagccccagcgtccgaacgggcagaccccctcgagccgcgaaggagcccgagaagcagccacgatgtgcggtgagtgccgcgcccgcccgagccgcctcctccacgccgtccgcgggtcccggcgccgcagcctctccgcgcctccgcccgcaagcaggcgccgaggacctggctgggggcgccgatctgccccgggcccctaccgaggggctgtcgtcggccgggcctggctgcccctcacccgcgttccccgagtggccgtctcggaggtgtgggtgggggatgcccaacccgactcctggtctcggacacagtgagggggaccgaggcccggtccccacggaggggagggacctggtccggtccggcctggaccccgtaacagaggggtccccaccccatgccgaccgaggtcgctctcctccacgtctcccagtcgcccacaaaggcggccacgcgcaggccggcgcatcccgagtgcggggcgcccatcccgactcagcccgccgcgcccaccgaggagaggagaggcgaccccgccccgccgtccccgcagcccgcccggtcgcccccgctgcgtcagtgcctcaggcagggcctgcgcgtcctcctcgcgaccccaaaggaacgtctggtccctagaagggtcgctgccgcgttaccgcctctttgcgcggggaagaggcagtcactgcccgaacctcggcccgaagccacgagagggagtccggggcggggagcggggccgggcgtccgattcccgcggcgctcccgcgctgtcccgcgtggctgcgggaccgtggggagggcggccgcggcccggagcgcacatctgcaattctttactctcctggctgggccgcctccgctggccgggagagagccgggaacttctgctgggacaaaaggtcactgtgctcttttttttttttttttttttccttgagtaggattcggttacccattccagcctcctgtggctggaggacctggaggaactttcgaagccatgaaaggcctctctctgactttgctgagggccggggtggggtgcgcccgcggtgagccctggccgaggtctgtgcaggcctcttgtctcggaggccagctgctcggcagaagggaacgacctacggcggagcgggcagcgtgcttcgggatgccgcctcacccaggctgaacaggcatccgtggaaattcctgaaccctcagctaaaatctcgtgctcccagacgccattctccatgtgtagagccacctttgggtgtttctgggggcagagatgaggcaaaggtggtagttttgccagatgtccaagccctgatgttccacacctctcagtgtagcattcaagacccttggccaaaactggtggccttggggccagacttgtgcaggagacccttgaaccaggagggtctgcccacagcaccagaggctccccttccccttcctttcagatgctcctctgcccccactgccacccctgcctgtcatcctccttcctactggcatcttgctttttcccaagtctctctgagctttgggggggctctacctcctccagctcacaaaatcacaagtgtttttgttctgcttcttaaagggacacacacgcgttgtctcctagggaaaggttgagctttggggtgtgaccacctgtatcttcagattttctggtactgacttgtggttgtatgtgagaaggagcttgaggtccccaaaggacacccagggctcaggagtggctgcggtccatgggggtgcccactcggagccagaatcaaagagtgcgtgctggcttaggtgccttctcagaattcccagatttgctgatttggggctgggggcagggtgggggaagtggggagggcacagctcagcaggaagtcgtggaatccctgcatgggaaagttatttccttttcaagaacatcaggagaaagtttcaacttggtgctaacgtgtccttaacatctctctgacacttgcttaagtatcctgtgcagaggggaagccattcctggctcagagcaggcagcagcagctggctagaattgaatacattggtctgtttgggggggatgatggtctgagtatgtatgacaagtgatactgattttccttttatggttgttttcttttggcatgaattcatttaaatttttgaaaatttaatcaawttctgcagaagaaaaagtagtgattatgctattagtacaaggatactgcaagaatcgtgaagatgctcctagaaagaaccagataagctcttcactttacgctggggaagctgaggccctgcgaagtctgtgcgcacctggcgtctgagcaggcctcgggtctcagatctcctgggccgttccctcaggggcggagacctaaggcccttccttatcacttggctgatgrcactgctgagattatgtcttgctgtcctttatcctgctgcttctctcatgggaagccaggactcggcagtagttgatcctctacaaacagcagatgattctcaaaaactttcagtgcactgagaatttagctgaaatgacactttggttttattgacatctgaaagttgctggcattttgstgactttctgcgacagaaaatttacaatatttcctccctgtctctctcctttccttctctgcttcctttttcattcagccactagtggaaatgcccagtgttttccaggccctgggggactcgaagatctcatgggtgtggtcctcccctcaaagaaggggcaggtgagccgcagggctagtccagagactggtcaccagcagggacgggatgccgatcagggcagtgctgctgtggagggaggaccttgagcacgggctacagcctggtagagtactggccgaacagggaagacagacatctttttgtttggtgcacagggtttaaaccttttcctctattagttaccaaagtacaaaattgggagatttcacataagtaggtgggagttttggcttctcttgacaaaatctgaagatgagcaacctggagtccttatttccaaatagggcctgggtgaccccttgggtgatggacacaaactcgcctgttctcccagtccttcccagctgcctccctcactcatgggactctgcacaacagaggcaggagctgaccttyctaggaagaaggggagggacctggggcagtgccacaaggacccagacacgagcacgggccctgcagagaggagggggtggcaggcacgctgggctggggcacagcatgagctggagtgtggcagcatggaccaggcatgcatggggatttggcaggaaggatttgcgcttcccatccacgaatttgtaaactgtccctgtgcgtcccatactgcacttagtaatctgtgagggagaaaaaaaaaaaaacaatcactgtgaagagctggagaattcttagttcttgccagaaggtgaagcccttgccttgacatcaccgtcttttgtcctggttggtgtgttcgtctccactggctgctgtaacaaatgactgcaaacttactgatttaaaacaacagaaatgtattcgctcacagttctggagaccacaagtccagaatcggttttacttggcccagatcaaggtaccttcagggmtgagcctcctccagaggctctgaggagaatctgtcgccggcctctcccagctcctggggctgccgygttccttggcttgtggctgtgtcgctccagtctctgtgctggctgcagccctccactgtctcctcaggggwttcccaagttcagaaaamccttctttttataactttatggtatagcatcagtaaacagtgcttttcaattgagagattatttttgtatctagcaaaattagcttataaagagtgattaatttgaggttataagtttgagagaaaattctgaaaatgaatttcacaataaaacaattaaactatttaggtattttatttttatttttagaggcagagtctcactctgttacccaggctgggatgcagtggggcaatcatggctcactgcatccttgaactcctgggctcaagccatcctcccacctcggcctcccaaagtgctgggattacaggcatgagccactgtacctgtccccttcttttcttaagatttttttttcttttaattaaatatatatcacttccctctttgtttttggtgaaactgtaagaatgaaagggacactggcaacttttctattaaaaaatagaaatggcygggcacggggactcacacctgtaatcccagcactttgggaggccgaggtgggtggatcacgaggtcaggagatcgagaccatcctggccaacatggtaaaaccctgtctctactaaaatacaaaaaattagccaggtgtggtggcacgcacctgtagtcccagctactcgggaaggagaggcaggagaattgcttgaacccaggaggcagaggttgcagtgagccgagatcgtgccactacactccagcctggcgacagagcaagaccctgtctcaaaaaaagaaaacaaaaaaaaaaaaaagaaaagaaatgtcctgtccaggttaccacaggaagcagagtctattatctcatggattccaatggtgaggtcactttaactcctggggtcccaaagaggcctggggcagtctggggctgtctccaggggagccaagtccccttcttaccctgagccaggtgccgcgtctgctcagggcccccgccaggcccgcaggctcctctgtctttctgtaagagcctggcgtgggatcacatgcatccgcggcacctccagctttgatcttgtttctgcaaggaggtggcaggaattrtcatccctgcttcaccaagtgacctttcccagtgtatgagaggccacagctcctcagcagcccttgcccaaggcccaggggactctccacacctgtgggcctcacccaggagagtggacctgtccctcttcccccaacacacacaggcaggcccaggcacacacgtgcacacgctcgggaatttcacgagccctcattgaggcagacattcaactggccgtactcttctgttgaggcaggaagtaatccagtttgggacctgggatgatacctaatctctaggaggctcatggactataaaggtcagccccttcagttcggagaagcaacagatggtgggagaaagacagatctctgaggggtgagtcctggcctgggtgggtggtgacatagcttccagagccaacctgtcctgtgtggagcacyggctgggcctctccctggaacggtcccctcactcagagtgagggctgggctttcgttgggaagccgatgcttggaaagttggagagatttttcaaaacaagcgtcaccagaatcagaacgtgggcccaacctggctgctgcgaagtggtgtcttccccatcccccaggccgcaaatcatccctcccctccacccccacgctcagcactccaggggctgtagaggaaatcccaggaattcagtgccctagtgtggctgaccttctggctgggtgtccagggaatatcatctccctgcgctggccattgtcgttatctgtcacttgggggttgaaccctgagcttcagaggccctgcctgcgtgccccttcatggtgtctttgctcctgacttcctgtgtgatctctcgggccttgtgcagagaaagtgctggaagcccyagaatatagcagtgagccggggccaagaggctacagtctcctctcggagggctcatgtcgaatcccttctggaatccccttgagtttttctcggtccctctccttctgggacctttccmggttcattttatctatcaattttgaggatagggccctgaaaggctgtctggaagctctgggtgggtgaccacagggcacatgaccaaactgggtggtggggccagggcagcctctgcccccaggccgggcctttctccaagccacctgggctctcctgctggtaggaaggatgcttggcccagggccatctttgcagaggttgcaaagtgctccttttctttagaaagatctccaggctcctgtatctcagactttccataaagcctgcattttcaggctctcctgccttcggctctcctggcctctcaatcccaaccctctgcaggctcttgggaacctgaaggcacctccctgtccagcccctctgggcgctcagcatcccccacctggctgggtccatcccctgtctcttcaatgtgagaaataagactgctcccaggtttgctaggcctgatgtctgttccctctcagttctgcaaggagatttccaagctaagaagagtaacagaaaggggaaaactttcccccaaagaagtttggtgttatttactgccccgttctcagctcatttaaaatcctgtcgcctgccagtgatgcctytcttacgccgtgggcagccctgggagtggaggctaggaaagagcagtagatcaaggtagaaagtgacagatgccttgaaaaggggacggaaagttggaaaaaggggttcagaggagggaaaagatcttcatctggggtagggggttggagaaggcatcacatgtgcataggcctgggggccccaggggcgcacgcactgggctgagggcaccctgcaggagtgggacccagagggcggaagctgcagggtggcatggggagcaaggcgggctcaggccagacagcaggaggggttgacgtcacgcggtgggcccgcggggcagagaagacgagagagggatgtagctggaacctgccttgccgtggtcaccgaggccctggtggggtgggggctgaacaggaggagaaaggtggagttggaagctggactgtcccgtggtggggcttggctctcagggggcagcacctgtcctggacccatctggtgctaggcgggcatctcctcagaagccagggaccctctgtgtgagctatacctttcttcttgggataggtttctatgctgattgtggggaggtgggggtagaagtggtgagcccaggcttgcaaaaaggcagacctggctgtgaattcctcaagtctttggcagtggagcctccgatgccatctctatccctgggaaccacagtctcttcacacaggatgtcatgaggattagaggaggtgaagctcgggaagggttggcatgcggggagccactgtagatggtggtttacccagcagggttctgggagccttccctaggccctggctcatttgattagaaggctgtcctcatgccagtcctgggatcctcatggtgcatggggccgggggtgttgtgcggggggatgtaagcctctgtgtttgattatcttggggttaaccgagagttctggtggcaccgtgctcccattgtaagggtctggcactcagggacctcctgcctctgtgtccctcttgtccttgctgtgggtcccagyragcggagctgcttatgcttggctgaacgtggctgtctcagacccagctcaaaggctaccttctctggcattcctccatctgttcattcattcactcaacatggatttattgagcacctaagatgtgccaggccctgggccaggtgctggggactcagcaatggatgagacagatgtggtcccatcctccagaasgttacaatccagcggggagccgaagaaaaagacaaggaagcaagtgcagcgtggaataaccagggctatgtggctggagaaggtggtgggaaagatctgctaaaacctgcagaatgggtcagaggcgcctttgcgaagagctagcaagagccagccttgcaaagagctgcctactcccaccccagcgggaagccctttcccacctcccctgtgggcttgggaggtccctgtgcatccctgtccttccctggagcgctcagtgaggccccccgatgggtccatcccagtagcttgcagcacctagtacagcaacgcggccttgtgggcctgagaactgcttacagatgaattaaatcttgaccaagccacaaccaagtaacgcatttggtttaaccattatttccccaggcagaaggccaagatgaaatgacagtaaatggtactatttcccccttggttttattgaatgataaatctctcaagggataatttctcaagctccttgccctgtggcaggcactattgtagccatcaccctgtttcactgacagggaaactgaggtccgaacattcagtgrcttgctggagagtgcactgaaatcaaggggtggagctggggttcgaggtgggttccggcactggccacggcctctgtgcttctgggtatgccttggctggtgaatggcagcagcagggaggaagccaacccaggcgggtggccctgggctggtgtttttaaggctggggcatgtgcttaggttgccccttattacagccctcttatggccgttgctcttccaggggagtggaacaggggaccagccaagtcaggtgggcccggcccctcttgtcgaggggcaagaaggcctggccagggcaggcctggcgtcccctgcagagggaagggccattgtggccctggtgcttcggacatgccaggagggttcaagcaccggtggaaagcagaaccagccagaggtccggcctggctgggggtcccaggtgccgcacggtcactcctcctgtacccagaagctctcaggtcccactcagcagaatgcctgtgccacaggaaatccaggtgaaccaggcaggtctgcgtcatgtacaccactgtccaaacagtcggtccatgttaaccctcaggccttggctaggacatccccctgtggatagaatgaagtctttgcttatttagacattatctggcatctagataatggtgatgtactcatcaccacctaattcacataggggcacatgtgccatggcacacggtgaaatgtcttaaccatctaaagaggacacgtgcagtggaaaggaagtttctgctcaacatccagtgacctcagaggctacctttgactgccctctgggcgtggtgcccttctagaaatgctccatgctcctcccccagcccttgcgtaatttactcatattctgcaagcttctttttcccttgacacatcttggagatttaaattgccttccaagagaatgcacagctttcccttgctctctgttgagggctgcctgtaaaaggccctgctgtgtggctgcactgtcccttgcctgtcccttgcctgtcgcttgccagacatcagactgtcactagtctttggcaaccacaagagccctgagcagctgtcctcgcacgtgtgcacatgcatctctgcaaaaagtccgctggataccttcttagaagcccaacagctctggtccacagatgtgtacatttttaattttgagagattgccagattgctttccaaagagggtatgtgagtttaaactctcactgtccaactgtttgatctttaccgacctcatgggtttaaaaaagtggattctcactgtagcttttatttatggatggaaggaattccaaaagggaattctgatgtaaatagcaggagaaattcctgggaaaggagcttcattttattctgtgttttatttttaaatgataagagcacagcgtgaacgctattttattcacttgagtgcagtagagtgcagggaggatccagccaagaggatgagctgcaaaagcaaagaaacagagcttccttcatkaaagaagtgaccgaagggatgtcactacgcaagagggctcgtggtgaaaatgagatttatgctttcttgcgccaagatggtgaaaaccacactccttggcagcttttctcactgcagtcagctcccctgctgtgcctgagtgggcaccgggcctcctggctgggtacggacacagctggtggtcctgaggacaaggaccccttatgcccccgctgctgtccaggaggctgtcgtgggtctgaaagtcagcggtgccttgcggagcgtgccgaacgttctcgcctgacgtgtgcaggagtgaagtgtggctgggaggtgggggagctgcaggggggagttgcagagctgactcattatgcactcgggaacatcattcagatgcaaaaccttttcagagttggcaatgggtacatttctgaacctttgtgtcatctgtgatgtctgtctgcttcccttagggtggtacaagtataattctagaacattcccagcccaggatgccaggaaagttcagtgtaaaagactctaacagattttattgagttgttccctccctcgcttaactgtggtctttacattgaccacaatttgaccatgtcctcacagggaactttctggttgttgtttttttctttctttctttcttcctttttttttctttttgagatggagtctccctctgtcacccaagctggagtgcagtggcgtgatctcagctcactgcaacctctgcctcccgagttcaagagattctcctgcctcagcctcctgagtagctgggattacaggcacgcaccaccatacccagctaatttttctattttttaagttcagacagggtttcaccatgttggctaggctggtcttgagctcctgacctcatgatctgtccagcttggcctcccaaagcgctaggattacaggcgtgagccactgcgctggcctctggttgtttttagaagagttaatgttatgaaaagtttcacctaggctgggcactgtggcttatgcctgtaatcccagcactttgggaggccaaggctgtggggatagcttgggcctgggagttcgaggttgcagtgagccgagatcacaacactgcactccagcctaggcaacagagcgagaccctgtctcaaaaaaaaaaaaaaaaaaacatttcacctaaacatgaatggtgataattgcacaactctgaatatactaaaccactgaatcgcatgctttagatggcaggctgctacggtacatgacttatgtctccagaaagctgttaaaattttttaattgacattaaaagatgtattagtccattttcatgctgctgataaagacgtgcccaagactgggcaatttacgaaagaaagagggttaatggactcatagttccacatggctggggaggcctcacagtcatggtggaaggtgaaaggcacatctcacgtggcggcagacaagagaagagagtgtgtgcagggaagctcccctttataaaaccatccgatctcatgagacttattcactctcacgagaacagcatgggaaagagccgcccccatgattcatttacctccttacacgtgggaattgtgggagctgcaattcaagatgagatttgggtggggacacagcgaaaccatatcaaaaaataactatctttttaaaaaataaggtgacaaaagtacctcccatgcccagatgtttgggggctgtcgtgtgagcctctggaaccataaatactcagcagcagtgctgcgcggccctcactggggacactttggccctgccggagaagggcctgaactgcacacacagcccatacattcagctcctctcacctgatctaaagatggcaaggaagacaaaaatagcctaccgagaaaattgcccttggctgattttaaaggaaaacgcctgtaactgctcagaaagcatagtgtacatatttttatatataaatccccyaccttaatacatatgtgcaaacatatcctgtgtacagtagctttcagtaagaatttaagtataatttatagkactatttaattttattgcctatttttgactgtttatagattaattaagtttatatgatgggaccccactcactgtttaggaatataacattcatttcattgaagtttatcatttattcagatgtagcatattgacatgaatctgatcttcttaattaccagagatattccaggtggtttcgtatataatcacaatcagctgtctgttatctaggggcaggttgtcctctctgaggttcacctctggaaaaatttcaatcctgatcagacctttctctcatcccagcaaaacatagttgggaaaataaaccttcttgtaaccctcgtggcatccatcccggggyacyggccagtgggtaggagtgtttaagtcctgagtcggggattcttggttccactctggctctggacgagtcacaggctcccctgtggctctggtccagaagttaagaggagggccatggactagcctcagaggctgttttgagcataggatgaccctgtgggaactggtggcccagtgcccggcccacagggacttctcagtgaggcgagtcgctgttgtggcctgagagtttgttcccccgtcattcatctgttgaaatcctcagctgcatggtggtcttactaggaggtggggccttggggaggcgattaggtcatagggacatgggcctcacgaatgggatgagtgcccttatttaaaaactgcggagccaggcgtggtggctcacgcctgtaatcccagcactttgggaggcggaggtgggcagatcatgaggtcaggagattgagaccatcctggctaacatggtgaaaccccatctctactaaaaatacaaaaaaaaattagctgggcatggtgtcgggcacctgtagtcccagctactcgggaggctgaggcaggagaatagtgtgaacctgggaggcggagcttgcagtgagccaggatggcaccactgcactccagcctgggcaacagagctagactccgtctcaaaaaaaaaaaaaaaaaacctgcaggccaggcagggtggctcacgcctgtaatcccagcactttgggaagccgaggcgggcggatgacctgaggtcgggagttcgagaccagcctggccaacatggagaaaccccatctctactaaaaatacaaaattagccaggtgtggtggcacatgcctgtaatcccagctactcgggaggctgaggcaagagaatcgcttgaacccgggaggcggaggttgccatgagccaagatcgtgccattgcactccagcctgggcaacaagaatgaaactctgtctcaaaaaagaaaaacaacaaaaacaaaaacaaaaaaaaaaacctccagagagaccctggccccttccaccgtatgaggttggaatgagcagtcactgtctgtgaggaacgggccctcaccagacactgaatctcyggcaccttgatcttggacttctcggcctccagaactgtgagaataaacatctgtggcttataacccaggcagtctgtggtattttgttacagcagcccaagccaacttaggacagttaccgtgaatatgcctgaaacccagtgacatttctatgacccatactattgcctccctccagggatacagatacacactcatcacatattctgttccacatgtgaacaggactgggtgccaacacacagtgaggaatacaaagatagaagcaccagcctatgcccttggtggggactgtgggtgtcccatgacgtgagagcactgaggtggccagagccaggagcacacctgcccagggcgggggctggagctgagctttgaagtgggcaggttttcctgagcagtgggagcgaggatgaaaggacagagggatgatgggatgaggatggggcatgcacagggcaggagagaggacatcaaggatctgtcatcacaaacaaggagtggaggaatctggaaggcagaaccaacacaacggctaactttctgtttggaaaattatcttgaaatatgaatacagaaagtcaagtggaacaaaatcttcttgactcataggcctaccttgaacataaggattctgcaggggccaaggggcatgagatggttttattcttgctgtcataaaagtagtgcttttttttttttttttttttttgagacagagtctagctctgtcgccaggctggagtgctgtggcacgatctcggctcactgcaacctccagctccctggttcaagcaattctcctgccccagcctcccgagtagctggggttagaggcacacaccaccacacccagctaatttttgcatttttagtagagatggggtttcaccatgttggccaggctggtctcgaactcctgacctcaggtgatccacccacctcggcctcccaaagggytgggattacaggcatgagccaccgcccccggctcaagtagtgcttatttaaggtcaagttccagccttacggagaaggggaccgtggaagcaaaggccccagcgcctgtcccatctgccctgggggctgctgtccctttctatggcactcctagatgtgtgctctgcaaatcagggagtgcatggaggtggggacttccggatgtcctaaggcggttggatttcattgctgccttttctattatggacattgccacgctgaaagctgcctcctgcaagtacagcataggataagttctcagcagtggaactgccagcccaagacatgtgacacaggctttctgggggtttttgtcacaggaggaagaaggggtgcaccgttcttcagctgtgctcagggaggggcatacccacctctgcaagcccctgggagacctttgtgatgccacctcggtgcatcccccagaagcgttttcttccaaacacgagctgagtattttatgaatgcaccatttttttctctttgaacaggaatctttgcctacatgaactacagagtcccccggacgaggaaggagatcttcgaaaccctcatcaagggcctgcagcggctggagtacagaggctacgactcggcaggtgggtgtgcggccgcccgcctcgtrgctggggaccgggctccgctgctgtggtctcacccatctccactgcaggggggtttacaaccagggcattttttctgctactttttaacgtctcttttcaatataaaaataacacttgtccgttaaagaaattcgaaaactatggaaaaatagaagaagcaagggtaaaaaaccccagaaaacccccttcatcagaagtccccccatcaggaagcagaaagggtacaaagccacagtcatgcagcatgagtaagtcctggacagctgctctgccgtgcggtgcctgacttgagcaacactgtattttgcacataaaaatttgccaaaagggtagattttcatatttttatttttatttttgttactcaggctggagtgcagttccaagaaattggctcactgcagcctcaagctcctgggctcaggcgaccctcagcctcctcagcatctgggactacaggcgtgcaccaccacacccggctaattttttattttttgtagagatgaggtctcactgtgctgcccggcgtagccccaagcgatcctcctgcctttgcctcccaaagcactgagattgtaggtgtgagccagtgagcccagccaagagggtagagcttatgctaagtcctcttatcacacacagaacaatacataaagagggcaggagcagactctcggaggtgatagrttgatggcatagacggcagtggtggtttcatgggggcacacgtgcctccaagctcatcgagttgtagacattaagtatgcscagcgttgtgtttgtcagctccttcattaaaaaaggagcccccatcagtctttgggacccttctccggtcgctgttgtctgtgggggtggtctgtggtggaggtgttgtacgttgatattttttgtttttacctaattataattatgcaattttgtaattttatattcttctcttttcacttggcatttctaggatcctaaactcattcattctttttttttttttttcgagatggagtctcgctctgtcacccaggctgaagtgcagtggcgcgatctcagctcactgcaagctccgcctcctgggttcacgccattcttctgcctcagcctcccgagtagctgggactacaggcgcccaccaccacaccctgctaatttttgtacttttagtagagacggggtttcaccgtgttgaccaggatggtctcaatctcttgaccttgtgatccacccgccctggcctcccaaagtgctgggattacaggcgtgagccaccgcacccggccgatcctaaactctttctaagtagctttctaagtggctacacaatgctccgctgggtggctgtcccagagttcaggcctccattcactgcaaaggtggatgtttagtctgttgaccttgtttaattatgcagcctgaggagaaagggggagcccgatggttttaaatccttgtcgactcttaataggaagcacgtccgatagacgacgggaggaacactaacgcagtggagataccaacgaaatatcacartgcgaggagcccttgggataaatgccctgcctgggcccattgccattagccgagggcctgggagcgcctgcagcggggaagtgtcccgaggggctcaccctagctaggcaggagcagggctgggggcagctgcrgcctggaggaggyaggggcttcctcacttgctgttaagcctggccgcagtcacagcctctttcagagcagatttcctgaaaactgtacagctctccaacctgccataaacggacagcccggggcatgcagccctgaccctgcggagcacctgtgccaagtgtgtgagaaaaagctttggttgcaatataacaaatgctgtctacatcacaggtgtggcgatcgatgggaataatcacgaagtcaaagaaagacacattcagctggtcaagaaaagggggaaagtcaaggctctcgatgaagaactttacagtaagtggaggacctctgagtgggaggagccgctgcagcgccggccgctttctaggaccgtattccaacagcgccggagamtggagattctcctttgtcccagctcagataaacagagggagggctaagcccgtgctgtaaaaccgggcttcgcagggtatgggatggtttattttaggtggtggcggcgcatggataatttttttaagtgtgaagggttacatacagtagttattttaattattccagcaaatgatactgcttctctgtttatggtagggatatatcattttctttttaaagcaagtttatttctgtgaagaagtgagctaagctacagacaagtagtaaataaccttcagcacgggtggtttgtgggcctgcgcggactcccagggtgggagctggtggggaggtgccatcggtgtgggtgacgtgacttgggtaacgacaccaggttrcactcacagtcctgggtcgaggcttgttgttcaagtgcggcaaactgattttcctttcatttagaacaagacagcatggacttaaaagtggagtttgagacacacttcggcattgcccacacgcgctgggccacccacggggtccccagtgctgtcaacagccaccctcagcgctcagacaaaggcaacggtatgtggcatgcttccccgtccccatgrttccacctcaccctgagctgtgtcagggccagtgcccgccaaagcaggttccgcgcccacctctaactgacttctcagcctacttcatcttcccaagagaatgcggatgtcccctctcccagagctctgccagtggcctgggcctcagtcaggaggcaggcagcctggtcctagggtggtgctggcctcccaggagtgcacaggaaaacgatggcacttaaccaggagagctgctggctccttggaacccagcccatgagtgggatgaggccgcgtgagggactgaggggcctgggcactgttcctccccaagtgacggaaatgctgcagaagggtgtacccttcaggcaaggatgggttctgtccttatgcagctaaacctgtcttttccccacagagtggtccaggtgagggcaggggctgtactggtcttgattgctgccaccagacacaccgtgggccccagcgggagacctcagcagccaggggcttagggtttggagaagtaggggccgcagcccgaagcccaggggctcttcccaggtggagagccctcaactcagcttgcttcatgttcttaaaagttgagaaccactgtgcataaaagtccagacttctggcatcacttgaaaaactggaggatctggaaacactgagctgacagcacgttggagcaccacagattggcagagggccaaggtcgctgcacctgctgtccttggtgggtttcaggctctcctgttcgcccagtcaccccctcaggccagctcacaggtctgtgtcacttgcatgggtcgccaggacagttctccacgcgtgattctcttaaatgacacccttgccccctctcatgggggaaagactggtaggtctgcagctcctggtggcagttctcaggggtctgtggtcagccccagggcgccgggtcccctgcagtgggatgcagtaggcatggagcagaagagaggatctaatccctgtctcctcccaggcctccaagggcaggcaggagtctaagacataagctgggccttccagggggtcccccactctaggtgaggcctggtccagtcacgagcccctgaagcccccaacctggacatgccaggggagggtgtacagcaaagacagtgatttctgaagtcaactggaccccccaacccaagacatcctctggcatagtgtaagttcgtgccaagcctaatgttagataggaccaaatacatcagagcagttactgggagcttattagcaggcactaagccttgacacttgacaagtcccactgcggttaatccttgtggaagtcaggccacaggagagcagcaccagcctgcttggtgtcccccacccactgctgatcagtggttctccgaggcagtgtaactgggcgggatgggcaggcacccccaccacccacagaaagtgcagtggtgctgcttctccccagagcactctgcagggcctcaccagctcaccccgcccaatttggaagggaaggcgtcccccagaaaacggaaggagagccccatccaccctgctcagcagagmagcttggtggtagcacaggagccagggctactcatgcatcctagtgatcagggtcttgagggagtgaggtttttgcgagggcctsttccttgggtctggctcatgccctgaaccatagggcatttcgtgactgaggcacacaccctatgtccaggaggaggacagcagaccccatggtgctgaggacctagaatgtacatctggccagagcccaggtcaagtgcagaagctggtccctggggcagtcgtgctggccgagaaaacactgcgcccagaccatgtgccctgagatgttgccactttagccacagcctcctgcccttcccagtgataaaatgaacctcattggaaaatcccccacttcagtgtagatgatgattctcattgtgtccccaaagcagggaggctcccaggaggcccacccacacccaaacttggacactccagccctgactcaggatgagtaattgaaaagaaaacaacaggacaataagcaaagatttataaaatttctttgacactcagcagtgatagctgaagagcatgcttttaaggaagtctgaacgcccagcaactataccacacaaggaaattacacaaagattctgcagagacaacatggattccagaaaacaaattaatgataggatcataractgagatgaaagaaagtgtagcagaattaagagaataatgtaaagaaacaatatcaccggccaggcatggtggctcacgcctgtaatcccagcactttgggaggccgaggcgggcggaccatgaggtcgggagatcgagaccatcctggctaacacggtgaaaccccatctctactaaaaatacaaaaaattagccaggcatggtggcgggtgcctgtggtcccagctactcgggaggcggaggcaggagaatggcgtgaacctgggaggcggagcttgcagtgagccgagctcgcgccactgcactccagcctgggcgacagagtgagactccatctcagaaaaaaaaaaagaaagaaaaagaaacaatatcaccatagatataaaaaaatggagaaggggatggacgtggagccagttaatatggatccaacatatgggtaactggtgtgcacaagaagcgatcagagcacagagcagtaaaaaataaataaataaatacataaaaaataaagctgagctgtggtcagcacatctgttgaaactgggcttttcttatttaagccctcccatttttgrgtgtgacctcacaaaaacaaacactacaatttttttaaatagaggaaatcatggtgagaataaagaaaaagaataatggaaaagrtttcaaaagatgctgtgggagaaatctttcccgaactgaaggaaaacttgagttggatatccaaagaagggatcaaaaatagtcaatagaccaggcacagtggctcaagcctataatcccagcactttgggaggccaaggtgggtggatcgcctgaggtcaggagttcgagaccagcctggctaacatggtgaaaccctgtctctactaaaaaaatacaaaaattagccgggtgtggtggcgagcacctgcaattccagctacttgggaggctgaggcaggagaatcgcttgaacccgggaggcagcagtcgtggtgagccaaggtcacgccactgcactccagcctgggcaacagagtgagattctgtctcaaaataataatggtaataataaaaacaaataagacttcacagtgatgctttgaaaaaaatagtcaatatttatgaagcgtatcccacatctagacacctcctggtggaattattgaacctcaagggtaatagggaatctttctgtcctctagggggagagggaaacggagctacttgcccagaaaaattctcaggctggccttggatctttccctcaaggcactcatatgcgggctattcattgagaaaatgcagtggggtggaggcagacatccctcaccgcatcccccgcatccccctgctccccccgcccccccgccacctccccgccaggatcagcggggtgctacctgtgcaggaagccgcccgcgtgagctgggttgtgcggcaggaactggggaggtgggaaaagctgcagctggcagatcctgctgtgcaggaatgtggctgagcctggggatgccagaacttctgggatttttcccccaaggaaaccaggattttaaagtgaacactcagaattttaaaaactcaaatatttttacaacacagtgtgggtcaaacacagcacggtgctggactgttctttgcgacctctttgtgcctaaagccagttgagagtgcctggaatcacttctggaacgaagggctcatcatccccgtgggacatgaaccccaaagcctgtttgatactataatagcgcacaggggagagctctctgcacggtcaggctggtggctgctggtcactgaaagagggatgtgtatttcctccggatcccattgtagtagccgctgccctagwcatccctggtgctaatccctggttccactgtagttgctgcygtaaacatctgtgctaatcactgtaaacaaagtgtgcttaacagaagtcttgaggcctggagtttgcagagagttctcaagccttgaaatcatctctcttcwcatctgacatgaacctccttctcaatagcatttctctcttaacttttctttcagaatttgttgtcatccacaatgggatcatcacaaattacaaagatctgaggaaatttctggtaagatgcttcccctaggtgatgtctcagtccggtgggattggtctccccagaaactttccagccagctcatttccttgcggaaaccagtgtgggaactgagtgagacccacactcagccacgtcaccgtgttgagaagaaacctctgccttggctgagccaggccctgcagatctcgtttgaggagataacagggcattagtgtttatctcaagggccactgcagattcccagaatcaaaataacaggagcttcgttttattaaactgtctgcattatataacacagcgactcgtataccggcggagttgggacggaaagtcagacagtgactgtctgaagtttgaaaggctctgtggtgttagttgggatgtgggtgggtttgactcaacgtattttatcattttgactgctgttattttgcaatgtccagattagtggcaagggtgagcttctgaggtgggatgatctcagggcctccgggagtgactcagaggtatttggctgtgatgctggcaaacatttttccccccttcccggttttccctgttcttgacttaagtcactccaagggcagatcaccagggaggagagggagttggccaggcaggcattgtgcaatgaccaatctctcacactgtgccgactgcatattccaggaaagcaaaggctacgagtttgagtcagaaacagatacagagaccatcgccaagctgattaaatatgtgttcgacaacagagaaactgaggacattacgttttcaacgttggtcgagagagtcattcagcagttggtgagttacaaatcccatctgtctaactcattccttcattctttcattaaaaacatttttttcaagcagcaagtgccaaggaatccttcattttttataagcccttgttagacaaacttgcacagagtcctggggataaaagacagcccatctgcagagcctggccttaagatgttacactcttgtagaactggaagacgttctgtggtttgggtagtcaacatcaaatagaaagtgccctgcttcatcgtgacacttctgaaattgtgactggcattagagtccgtggctttttatgatgcacacgtgagcttggtggtggtgtgcagagagagttgtggtaccaagcgaggatgtgtttctaggtttttcttttttgagacagagtctcactctgttgcacaggctggagtgcagtggtgtgatcttggctcactgcaacctccacctcccaggttcaggcagtcctcctgcctcagcctcctgagttagctgagactacaggcacgcaccaccacacctggctaatttttgtacttttagtagagacagggtttcactatgttgaccaggctggtctcgaactcctgactttaagtgatccacctgccttggcctcccaaaatgctgggatttacaggcgtgagccactgtgcctggcctgtttttgtgataggtgatatcacagcatgtctgtatgtggaacggaatggcccaaaagagggagagagggagagagattggggacatcccagaggacagggcccagggagaagaagtccctgagaagggagcacacactgggcgtattgtccaaggggaggcccctacactgaggaggaggtggagcagacacaggcccatgcagggtgcgrgaggacragaggggtccgggcctctcagagcccatcctgtcagacagcagtgccacccagtagctcccccagggctgtggcagcctggacactggcccagagtccagaacatctggcaggcaccatcctgtagtgtaaaatacatcattcttgagcaggtgttttcagagtctgatttaaaaagtaagtctactgttgaagcctttttgtcctctaactcccgtttttggaggtccatcatttagaggacgtgtttataaaaaacagcctatcccacatttaatgtgctggataaggtacagtgagccaattaggtattacagcatgctgtttcttcttttccatttttattttgaaatttcagaaatacctctctcataatgacacttttaaacttaagacttttcctacctgggacagtaccgggctctttttggcagagaacgtgcagtgtttttccattcagtcctattttattgttgacaaaagcaccagggtctgcctgaagccccctggtttggggcagtttgaaagccccaatgaggcctggggacggtgactcaggttcctggccctgtagctgagttggcaacctggacccgacacgctgaccacccggggcctggggctgcccgtggcttccacacttggaggatttcttgtggaaattcagatttgcagctggttatatataactgagctctgctagggttgcggtaagttagtacaggatggtcaggacgtgggggaagaatttacaccaagaatttaagtcaaaaaaccatctggcctcttgtgttaggagagctggattctagttctggctttgcacaaaccaaccagctgaggcccagagggcaggtggcagtcgtatccatggaaaggataatagcagtaacggtcatgacaacctgtgcttctcttgggtctccggatgccaggctcagtgcattagcttatcatcgtcacggaagccccgccaggtggcgctgttctcacttccttcaccgatgaggagaacgaggcgccaagaaggctaaagggagagcccagtgcaggggtggagccaggatttgaacccaggccctaccgtgtgttgagctaaagtgcacttcacaggggcttgctgagtaggtgctgtccctgagcagggcagggaagcctggtcccagctatcatttcctgtgactctcactgccccgtctacccagctggcacccctgccgggctccctgtgggcctgggcaagccgcacatcgctcaccrtggaattcacatgttctggtttgtggtacttcccgtggcaccgtctgttttgctttccctcgtgatgtcaccccggatgcgctgttctgcactcagctccccgagggaccccaggacctcccgccatcaggaggggcccagggagacgcacctgggctgtggccaggctgcagcagcggctgctggaacgcgttgaccctcactgtttgtgtgttttcaggaaggtgcattcgcgctggttttcaagagtgtccactacccaggagaagccgttgccacacggtgaggcaaaacacactggcatttcccataagaaagaacgaaaataaaatcacttagctggagggagacgggagaggtagggcctgtggcacgctgaaaggtgctcgtggtgtctaaagaacaactgtggctcagccccggggaccgcgccccaccatctccatggctggtggtgctacacttctgaattaaaaaaaaaaaaaaagaaaccagaaagttggatttgtgtttgaaatctccacagatttttagaggtgggcaacaaattccagttataaataaaatcgtacagacagggcagatccaggttttgtggggcttgaagcctgtacaatgtgggcccccctttaagaaaaagcaaaattatgaacatgaaactagggagcaaagtgaatattgatttggatccagtacagcagaggccttgaaggcccggggctcaagcttcaccttcacaaaggagcatgccaggaatcggctcagagagcctgcttgccccaatgtgtccctctgttacggtgggcccccagtgctgcatggatttacagaagcaggttaagtgccatcctgtttatattcacataggttgatcatccatccaaccatgcaactaatatttactgtgcacttactgtgtgctgggccctggggacttagtgacatctgacctggtccctgccttgaagggctgaacagttgtacaggagggcagagaagggcagaggatagtgatgccctgtgcccggccccagcacaggatatcaccttacctggcaggggggcaatggcaggtagccccaggcaggcagtgggaagaggaaccagcatgagcaaaggcaaggggcccagagggagtgggacctcccaggatccccgttggcaaggtgggggcatggtgcaagggcattggtgggacggaggcgttctaggcccagtgtgtgtttactgacacctgctgtgtgccaggcatgggagacagtggtgagcaaggtggtatggacactgctccagggcctcaaaggctgtggggagtggagaggcggacagaggccggctctaaatggcctcagtgccctgtgggctgcgggcttcatctgaagccccaggggagccatctggaatgaacctgtggcctgggagacggccggagagggtgaggctgtctcttccagactggcgtagtatctcagcaggaaacaacaggaatttatcatcattttttttaaccttttctaaaactggaactaatttgccatttggaatttaattccttcaattcatagaattataaaataccagttggttcctatcaaatttagaagccctttttaaaatccaattttatcatgatttactattttaaatgaactcagaagaaggcagcgtgaagaagcaataaagctttatttttctaaattgcctataactgagggctctataacctgcagtacaatcttcgggttgtcttgggagaattatatgtctcaaggtctagagaaaccacagagctcaacctacagcaataaaatttgggggagtcatttgccaagaaaattagatatccacctactttctcactgccattattataaactatttatgctagttccccactggccccagaactatgtctcagatttgctttacacaataaatgattaaaatattcaaggtgttcatagcaccttcctcaaagccccagactttgtcccccgctttgagaagccataagtggggtccaaacaggccaacgtgactggaaaacaaggtctgttattgttgaagaaaaatttaggaactgcattgagtcaggctaacagattatggatatatgtggactggattcaagccgatgagcaagcacttcattagttcattgatctaagttagcaagaaatcacctaaggtaaaatgttactggattgtattccaattcatgtgtttgaaacagctctcttaaattgtcttattacagtgttcgtcggtgttttcttcttattaataaattaatgtgtagaggggaaaggcacacatcctttcgtaactactgcacttttacctgcctggttttgaagaaccgcaggtttagagmgcatgtgttaccagagtgagcctcttatttctgtgcacacctatggtagattttatttgcatgctrtaatttataagaatgagcaaaggattagattttggaatcaggatatcatttaaatcatgagatccttttatttatttatttatttatttatttagagatggagtctcgctttgtcgcccaagctggagtgcagtggcacgatctcggctcattgcaacctccgcctcccgggttcaagtgattctcttgtctcagcctccagagtagctgggattacaggcaccccccaccatgcccagctaatttttgtatttttagtagagacagggttccgccatgttggccaggctggtgtcaaactcctgatctcgtgatctgcgcgcttcagccccgcaaagtgctgggattacaggcgtgagccactgtgcgcccagccaaatcatgagatcttcatcacgtccaccactagaagttgtgaatcagaggaaatatcctaaagctctttcctaaagatcccctgctgaggtgctcagagagccgggctgcagtggctgagacagtgacgctgggacaggaggcctgagtgagggcccctcaccttggccagctgcagactccctgagattttgcctgtgacagttattgtcctctttatgatgaagtctacctggtgcggggtgaagattctaaacttccatccacggggtgtcactttggcagagacaaaaaaccacccaagaaatcaccttatgtcacctacaaagtagagaatatacaaaagtcagtcagactagtgcccactaatgctagagaactgggctaggggaagggaaggaacaacagggggtctttgggcagatggtgggtgcagagccctattgttatagggatgcgctgccgtcgaggctgggtggagacctagagtgcccctgtgccccaccagcgcctcctctgctgccaaacrctcagcctccgccatctaaccttgtgggttggtcacatgtggggacttgactggactggaggaggcccggcctaggagggtgggagtgagacaggttaccaagctttctgggcaggtgggtgatgccaagtcagggacctgggactcaggagctggcctttccatcctgtgctccaggcgtccrtcctgtgggacctaaacaggatcctccaccactgggaaagggctagatttggggatcctacctcagatgctgggcagacacccagcactgggcgtcaaaggcaatgggtaatgggatgcctctttctccctacaggagaggcagccccctgctcatcggagtccggagcaaatacaagctctccacagaacagatccctatcttatacaggacgtgtaagtttctcaagaagtaccggaacagcacrgctgctggtgtcgcaggactcggcagctgctctggcacagtcagctcccctctgaggcaaggaaaccccactctgagccagacccaacaggcgcacagctccaggtctaaaaggtttttgtgcaactgagacttggctccattttttttaagctttttatcatggacatgaatttatcatgattttgtatattgtcaaacatacacaaaagtgccattgtataacggcaactgggctttgatgtgagtgcttctttggtttgtttttgtttgcattcctctcacactgtagccatttaaatgcttttgcagtggtactgtgctattgggggatcttttacacratttggctgacacagccaaagctaaaaattgcaaatttmtcccacacataytcagaggggaaattggttccttgctgcatattakgcaaacaaaacatcccagtgggatttgcaacccattcctccayttgctaggcactctggagaatgtgaagaatatctgtaagacacggatgaagaggctggacagctccgcctgcctgcatgctgtgggcgacaaggccgtggaattcttctttgcttctgatgcaaggtaactgagccttcttctcttcgcttcctgggattacataatcaaagaatgcctgtctaaacactgccggttcttaytcatccttccatgtgagctatcgtggctcagcaagtcgcagggccaaagaagagttcagccatccctgggcctgggcctggagtccttgtcctaggagcacctgcatgactgtggtaggcagccctggtggccaaaggccagatgcactggtgggcacagtgcttcgagcctgcacaaaatgaatgggttagttgccaatgttgtaaaatttggagatttcacagagaaatctgaaatctctagcttctctggaagaactagcagatcggggcatgctgtgcagccctctctcaggtggcaggtgtctggatctgctcaaaggctgccccctttagatgagacaactgtgtctagacctcagtccctcccatgcccctccctgcctttgcctggggtgagaccatttgtgaaagacagagccaagacacagggagtttttcaattgattctaaagtccatgctctcatcaatccactgaataatgattttgaaatttgagaaattctgctttatactcatttcagaaaaaaaaaaagttatacacacactcacacacacacagagagagagagagggagagagagaaccagagcactttcctgccatttgaagtagaaaactgctgtaatcacctctggtaccttcttcaaagacccaaaggcttgggcctttgttatgtttccattcttgatgggttttctctttcccgaccagcctctaatagggccgtgctgtgaggcagggaggacaccaggccgggtctcctgggaaacgggagcgacagggaggcgaggcctgattaaacgcacagccagcatcatacttaacgctgaggtcaaggcagcgcttcccaaatggtgccccttagaacacgccgagaataccaacgagacgctggtattatttcagtgattctaaaacacggagaattgtagattttggcatagtaccattagaatttgttgaagcttttatttcttagaagtttgtcaaataattgtgatcttaacgatcaatagtaacttatattcaatgaaatatgatagatgtttctttttttatttttatttatttatttattttgtctcactctgtcgcccagactggagtgcagtggtgtgatctcggctcactgcaagctccgcctcctgggttcaagtgattctcctgcctcagcctctgagtagctgggactacaggtgccygccaccacgcccggctaattttttgtatttttagtagagatggggtttcactgtgttagccaggattgtctccatctcctgacctcatgatccgccctcctcagcctcccaaagtgctgggattacaggtgtgagccaccgcgcccatccagatgtttcttttttttwaaaaaaaaggcatgaatgcctgaaaggagaggaaataattatttgtaggcaatactattacacatttttaaatccagccaaaaggctgttagaactgatagtactagcagctgggagtaaaggtgtggaaatcctatatcctggccttagccactaagctgtatctggttcaagtgggaccttgtccaccttattctcaggtgtcacctcacgtgaccaggcacgatgcagtcagcaaacgttaggtgaaccaaaaaagcaatactattcaccacagctggaaaaaaaaatgctttagagtaaattttaacaaaaatactctagaacatatttggagaagtctacagaaatttaccatgaggaagtaagagatttgaatataggaagagattccacattcctcagtaggaaggcttactattcttttctttttttttttttgagacagggtctcattaagttgcccaggctgtcctcgaactaactcctggactcaagggatcctcctgcctcagcttccagagtagctattttcaaaaattaatgcactcaacatttaaaactaatttaatgattacaagttatttttaaaaaatattgactctacccaaattattctgtgaattctgtgctgtaattaagactgtccaggccgggcgtggtggctcacgcctgtcatcccagcactttgggaggccgaggcggacagatcatgagatcaggagatcgagaccatcctggccaacacggtgaaacccggtttctactaaaaatacaaaaaaaaaatcagccgggcgtggtggcggaggcctgtagtcccagctactcgggaggctgaggcaggagaatggcgtgaacccgggaggcggagcttgcagtgagccgagatcgcgccactgcactccagcctgggcaacagagcgagactccgtctcaaaacaaaacaaaacaaaacaaaacaaaacaaaacaaaaccctccatattattttatttgtttatgcctttggaacttcaggaagtgattctgtcgcgtgtagtgtagagataagaaagacaacacatgctgagaaaggaatggcaggtggccctcccagatgtgagcacrctgtccagcttttgggcaacggtggccagtgtgtgcggggcacggtatgagagcctcaccaggatcccatgcgataatcatgacagacctctggggaaggcacagctcttttctgtttacagaggcggaacctgagacaggaactccagggggttatgtatgttgcccacgggcacrggtctggcaagtgacagaggccccgagtccacctcaagcctaactggtgggccattggttttaatgactagattacatgactacccattttggaaataaaataattatatttaaacaaacatgtacatgcacacataaatataaacacacatgcgtcatgcattgttggttggttaatgctacaatggaagcagtgttgatctctcggagacaggatagggccgtttttacttcttgtcactccatgtttctactttttatacaaaaaaatatatttctatacaaaattttgtataaagctctgtatacttttatacaaagcatacaaagttatttgtacacttttatacaaagcatacgaagttatttgtacacttttatacaaagcatacgaagttatttgtacacttttatacaaagcatacgaagttatttgtatacttttatacaaagttttgtttaaaatattttttccagtacagtggcttgccatctttctttctctttcttccctaggatctggctggatatacgtcttttagagccttagaccttgatggtttctctctttacctttgcaccaggagtttaagtgttcattttcaggcagtcacgtgtgggtgtggctcttgatagaatgagagtgttttttttgagacggagtcttgctctgtcacccaggttagagtgcagtggcacaatctcagcccactgcagcctccgcctcctgggttcaagtgattctcctgcctcccaagtagctgggattacaggtgcccgccaccacacctggctaatttttgtatttttagtagagacggggttttgccatgttggccaggctggtctcaaactcctgacctcaggtgatcttcccgccttggtctcccaaagtgctaggattacaggtgtgagccagggctcccggccgagagtgttttctccagtagtccttcaagcccaacctgatggtttataccacaactatataccattaatcacctttctttttcatttagcaacttttcaaacttaaaatgattttaaaagatactttgtattatgatctcaagggaaaaaaatcattattcttttccatacagagaaagttataaaaataaacacaatgggctgggcacggtggctcacacctgtaatcccagcactttgggaggccgaggcgggcggatcacgaggtcaggagatcgagaccatcctggctaacacggtgaaaccccgtctctcctaaaaatacaaaaaagtagccgggcatggtgtcgggcacctgtagtcccagctactcgggaggctgaggcaggakaatggcgtgaacccgggaggcagagcttgcagtgagtggagatcgcgccactgcactccagcctgggcgacagagcgagactctgtctcaaaataaataaataaataaacacaatgaccctatgtttctttggtaagcatagcttgtagactacttttagggctcctttgtgtatgtgtgtgtgtgtgtaagaaactaggtcttttgtcctgatgagtttcccattgtctgggttttgctgagtgcaacccctggtgtcatttaccatcttcctctgtccccwgtgtttcctgtacgctggagtttacaagtgttaaaagctcgatcttattcaggtttgattttttttggcaagactacatagttggtggtgtgtccttccatcaggaggcgggtgatgtctcaccatctctctttttgtgctaagagccatcaggggtttgagtgttgccagccttatccatccatgataaagcttcgtccagctttttaccttctggtttcaacagccatgaatggtccttgattagagctattaataattaggasttcataaattgattcttctattatttcttcattactagctgtatcacttcttagagaaacttgccttcataaagtatgtggttgttctgaaagacagattgtttagaaaggcgagataaatgctttattctttcccttcacgattcagaataatgtgttsgttctcgagtatcttccagaggtgacattgtttggatcctgatttgaagaaaccggttataaaaagacagccgtgagattattggagatatgtaaacatgctgaatatttgatgatataaaggaacaactattcattttagatatgattatggtattatagtaggttaaaatagttttagagctctatggtaaagtgtttacagaagaaatgatataatgtctgggactggcttcaaaataattccgtggggacaggagggaagagtggagaagaaaaggaagattcacctgcaaatcaatgtttttagtgtggtctctctgtccctcctaaaatgccaacgatgtggcctccacgcttgggaaccagcaaggggctgctgcctcgtaactgctcagggcagggcactgatgatgcctgtttcccttgccccagcgctatcatagagcacaccaaccgggtcatcttcctggaggacgatgacatcgccgcagtggctgatgggaaactctccattcaccgggtcaagcgctcggcyagtgatgacccatctcgagccatccagaccttgcagatggaactgcagcaaatcatgaaaggcaggtgtcctccrgagtccacgtgcrgcagcctcgggagccagcgcgcctggtggagctcctgacactctgcctggtcctagtagaggccacagccctcctgccctctgtggccaccagggcggggctgcaggtagcctgtggcttgcacaggtgaggggatgtggggaggctggcctggcaccyccaagcgggggctcctgtgtgcagccagccgccaggtctttcctactggaactgagcccagtgtgtcagctgccttccttcaccgactccgcgggacacatgcccaccctcaggcatcatttctcctctgggtggaagtctgcaggtctgcagtaaatggggggtgggggtacactttctccctacaaggagagcctctctgtctgcacccatttctgtccccttacaacctctaccccacagggcagcctgagcaaacktctaagaacatgaatcagcccctgtgatcatcccgctgctcaaggccctccaatggtttcctactgttcttagaataaaatccaaactccctgccacagcccacaaaccccacaccccagtggggccaaagcctggccccaccacactcaaccctctgtcccactgtgccccgccacagcccctgcattcgctgttcttctcataggactggttccttttcattgcctccagctcccttgaaatgtcaccccctcagagactccttctctgctcctgtgtctgccatggtccctccccagcccctcccctatggtggccacccctcattcccctcacttgcttcatttgctcgtcgcacaagtgccaggtcatgggagacaggccgggagcatgggcgatgttggtgtcatgagtgtgcgtatcctagagaacacggcctgccctgcctgtgggtacctccagagcatcaggtgcaggggcttgaacaccctgcagccccattgtcccatcagcaccatccaatcccactcaaatcagagccctggaaatgcctgtgtggctggaaaggtttttttttttttttttttgagacggagtctygctctgtcgcccaggctggagtgcwgtggcgsgatctcggctcactgcaagctccgcctcccgggttcacgccattctcctgcctcagcctcccaagtagctgggactacaggcgcccgccactacgcccggctaattttttgtatttttagtagagacggggtttcactgttttagccgggatggtctcgatctcctgacttcgtgatccgcccgcctcggcctcccaaagtgctgggattacaggcgtgagccactgcgcccggcctggaaaggtttttattacggaaaccaggagggtatttattagaaggaaaattgcctgtttctttgggcctgcttagctgtactttcctagctggatggctttttgggagtgaagcactttactttcttttggccttgctaagggagcatggcccagagggatcagccaggccatttgttacttgcatgccttgggcaaatccctccctttctcaagctgcagggtccaatatgtaaattggagatagtcctggttcctgacctgcttccctctgatggtagtgagtgtcaggcagggtaatccctggggatgcctttgggaatctgcagtaagctttacaggagttactatcgctgctgcataatgaaaagcagtgaaatataatgaaattaaaactgaccagacgtttatttgaccaggtaacttcagtgcgtttatgcagaaggagatcttcgaacagccagaatcmgttttcaatactatgagaggtcgggtgaattttgaaaccaacacaggtaattcctacactcggtggggagcctccgcccgagcctagtctcagggaatgcggtgactgtgtagactcagcattaacgccttgtcgtgtgccctgcagtgctcctgggtggcttgaaggaccacttgaaggagattcgacgatgccgacggctcatcgtgattggctgtggaaccagctaccacgctgccgtggctgtaagtgtgacacatgtgcgtggggaagtcgayrgcagtctaggaccagacactggccttcagttttatcactcatgtggccttctgaatttggctaagcccttgtacccattcccatgagctagcgtgagaaatgacacggagcccttttatcttcgaggtggcctgtgggtgaccgaagtcccctcgccacctggacagtgaggttccrtgtcacaaactgtccctagaagcccagctgccccatgtccctgtcgtgcctgtgactgactttagtctccatgcttgcttgttggcttcagacgcggcaagttttggaggaactgactgagcttcctgtgatggttgaacttgctagtgattttctggacaggaacacacctgtgttcagggatgacgtttgctttttcatcagccagtcaggtaagggacacaggcattgtggccagccttgcrtcaggtcagctctgggctctctcctcttctccttcwttcagttaagtcctctgcatggctaccctgtgctgcgaaccctctcttgcagcggtcatttaaccygtagagccatggattactgtcgccattgtacrgggagggcaagagatgtctaaggccatgcagtcagggggtgacagctgggattgggctggaaatccacgcacgttagtctttcccctgccccgtggcttctccctcttcttgcctatccaagacttcaaggaccacttaccgaagtgctcataaatgtttgctgatttatgttaatagaaaaagcatctcctttaacattttgttaggttgagagtcacgtggaggacccagtatgggctctgtgcccaagtgtccaagccgagctgcctgtggcatgcagtgcccatgctgcccagcagggggaggtgtgggggagacagtgctcccttttagggccaaggaaggtctcccaagctacatgcaccccatctggtgccatcccaacactgggcttgacatttgctccagctgtctcagggaggtgatccagggccataggcttggagtctccttgagctcgtggaagatttttgaaatgttttaattacggataattccaagcctttataaaagtagaattttcatataatgaatatcctagccttatccagcccatcttgtgcyggtcggacacactcatattaacccctcgtctccatggggttactttgaagccaatcccgggcatcatgatattcatccatataaatacttcaggctgcatgattaaaatgacaaaagaaaaacatataaccggccgggcgcggtggctcacgcctgtaatcccagcactttgggaggctgaggtgggcggatcacgaggtcaggagattgaggccatcctggctcacacagtgaaaccccgtctctactaaaaatataaaacaattagccgggcgtggtggcgggcgcctgtagtcccggctactcaggaggctgaggcaggagaatggtgtgaacccgggaggcggagcttgcagygagctgagatcrcgccactgcactccagcctgggcgacagagcgagactccgtctcaaaaaaaaaaaaaagaaaaagaaaaacgtatgaccacggtgttactaccacaactaaaatactgattgtaatgccctatcatctattaggacttttagtactcctgccattttccattttaaataccatttccattttgttgacaagtgaagaaaaaccagtacagatacaccgaccatccggcccaccaccttatgacgcaggagctgctgccrtgttcacctttgggtttctgatcccaccagagcctcagactattttataaattggtgggagacattaacaaaagaacagaggtggagctaatatgaaaataatgcagtggcagcttccgaatctctgtgtgtatagaagtcagccctttaatgagattgaaaaaacactatcgaaccctagggcgcgggtgacagaagttagaaccccctttcccgcaccctcaccgcagtaccccgtgacactccagtgccataacccagggctctgaagaaagaaaagcagaggagaattgggccacctagcaccgggcggcacctgcctgccctgcaaagctgggacagacacagccaagagcagtggccctgcaaacagaacagcctcccgactcatgaggatttcaacagttttgattttatagtctggcttatgctgaatttaatttgagygctttaggactcacaaacatagggagcttgtgctggtttatgcatgaagctgtttagctttattctaaaaacaatttgagtccacactgagaggcttgcaagaagtgtcctttcaaacaggatctagctgagaaacaccacttggggacattcctgcttgtcagatgttaaatctgttccatctcagcacgttctgaataaggcagcttattcagttgcagagagggcgctgggagccaagcccacctgtcaccagctgtatggctttgatcagagcaccggtttcctcctgtctctgagccctcatcctcaagaggaaaatggggacgatggtcctcacggggttgtcacgagatttaaatgaaaagatgcttgccacaaatagtaacacaccttgaatgtaagaatcaaccgaaaaggctgttgagcgagcgttttcctttctgaacacccgctggctgtgtctcgggcgccgatttccctgtaagagccggcggtgaaggaggaaggggtttggggtggggccgaggctggcggagcgcggcactgagagggcccctgggcggcaggcgagaccgcggacaccctcctggcgctgcgctactgtaaggaccgcggcgctctcaccgtgggcgtcaccaacaccgtgggcagctccatctctcgcgagaccgactgcggcgtccacatcaacgcagggccggagrtcggcgtggccagcaccaaggtaggaggagccacgggcgcccgtcccagggagagcctggcggaggcaggtgcaccagaggccgccctcctccggcctgctctgcccgcgccaccgcctttctttccccttcccgcctcaccccttctctccgctcctttcctttcccctcccctcttggattcccgtatcttcattttttttatttttatttttattttatttatttattttttttgagacggagtctcactctgtcgcccaggctggagtgcaggggcgcgatctyggctcactgcaagctccgcctcccgggttcacgccattctcctgcctcagcctcccgagtagctgggactacaggcacccgccccacacccggctcattttttgtatttttagtagagacggggtttcaccgtgttagccrggatggtctcgatctcctgacctcgtgatccgcccgcctcggcctcccaaagtgctgggattacaggcgtgagcccccgtgcccggcccccatatcttcatttagtctcattttattcccatgccacgttcctgtgtttcgtccatgttgtcctgtggctctttgagcaccttggagatgcttattttaaagtcctttagggctggcacggggctcccccctggaatcccagcactgtgggaggctgaggcgggagcatcccttgaacccaggagttccagaccgccccgggcaaccccgtcccttcaaaaataaaacttaggccaggtgcggagactcaggcctgtaatcccagcactttgggaggccgaggcagggggatcacctgaggtcaggggtttgagaccagcctggctaacacggtgaaaccccgtctctaytaaaaayacaaaaattagtcgggtgtggtggcrggtgcctgtaatcccagctactcgggaggctgaggcaggagaatcgcttgaacctggkaggtggaggttgcagtgagccgagatcgagccactgcactccagcctgggtgacacagcaagactttgtctcaaaaacaaaatagaaataaataaatagataaataaaacctaaaaattaactgggcagggtggtggcacctgtagtcccagttactcgggaggctgaggtgggagaatcacttgaggaggttgaggctgcagtgagccgtgatctcgccactgcactcaggcgtgagcaacagagtagaccctgtctcaaaaataaaagttgatttaaaaagtgaaaataaggtccctgccacctccttctttgtgcacaggcttataccagtcagttcatctctctggtgatgtttggtttgatgatgtctgaagaccgaatttcactacaaaacaggaggcaagagatcatcygtggcttgagatctttacctggtatgttctagaattcagctttccatgttttcagatctagtggactgttgctggccattctctgttgactctcacctgtacaggatgttgttcatttcttcttcctcctaaaacttcctagcttccccaactccctcctggaggccttgctgcctctgacctcatcctgctcggcccccacctccccctgcgctgccgcgctgcctccctgcctccctgcctccctgcctccccgcctccctggtcctcagcctccctgcctccctggtcctcagcctccctgcctccctggtcctcagcctccccgcctccctgcctccctggtcctcagcctccctgcctccctggtcctcagcctccccgcctccctgcctccctgcccctcagcctccccacctccccgcctccctgcctccctgcccctcagcctccccacctccctgcctccctggtcctcagcctccctgcctccctggtcctcagcagtgctcagtgctttctcaccgcagggccttcgcactggctctttactctgctgaaccatcttcttcctgctctgcatacagccgacagcttctcatctcccaaacctcagctcaaatgtcacctcctgagaccctccctggccatgctcacagaggccccgacgccagcactctgtgaaacattagcctgtttatttttttcataacacacctcatgacctgaaattccctgttcacctgttgactggcctgtctcccccaactaacatgtcggctccgtgaacacacagctctgtctgccagagctgccactggacagctggtgtccagcacagggcaggcatacagtaggtgctcagtaagtactcgagaaagagcaaatggccccaggtccttcctatgccaggcgctccttggcagccccaccrcactttccccgtttgctgggcagcagcagtcgcagctgtcgtagctggtgagatacaatatctgttgcactaaatcatgmcctccttggggaccgtggcctcccctttcttcattcatccaccacatatattaagaaccagtgccgtgccctgtcccatgtgctatccctggcctgccaagataagcagcagctcacctccttcagtcactcacatgccagagtaggagagagacttctgtgcaggcctgagaggcggagatgaatcgagcctcgccccrggctggcatggaacgctcactgcrgacaggacatcatggggcttctggggagtgccctcccagagacagagtggrcgctggagcttccctgggagccagggccaaaccccagagcaggcagttggggaagggccaycatagagaatggtcaattccaggccctcggggcctgacactggccgagacagcttgctgaaagtttatttctgagaaaagcattcttcctttaagccaggtcataaccatgcaaaacaggacccaattctgacgtctaagtcagtggttctccagatgtggtccacaggtcctgggtgtctgcaaagccctttgaacaaaattgttcacatagtaatacattctttatactaaaaattttttttttttttttttttttttttttttttgcctgtgtccacatttgcaaaggcagtggtggctgtgcccggcacccagcacactagaaggcctactggtcattgtgtccttcaccagcacacacccagtttcccttaagaatggccttgatggccgggcgcggtggctcacgcctgtaatcccagcactttgggaggctgaagtgggcggatcacctgcggtcaggagttcgagaccatcctggtcaacatggtgaaaccccatctctactaaaaacacaaaaagcagctggatgtggtggcaggtgcctgtaatcccagctactcgggaggctgaggcaggaaaatcacttgaacccaggaggcagaggttgcagtgagccaagattctgccactgcactccagcctgggcaacagagtgagactccatctcaaaaaacaaaaaagaatggccttgatggtgaggcgcagtggctcacgcctgtaatctcagtactttgggaggccgaggtgggcagatcgcctgaggtcaggagttcgagaccagcctggccaacatggtgaaaccccatctctactaaaaatacaaaaattagctgggcgtgctagtgggtgcctgtaatcccagctacttgggaggctgaggcaggagaattgcttgaacccaggaggcggagattgcagtgagccgagattgtgccattgtactccagcctgggcgacaagagcgagacttcatctcaaaaagaaaaggctgggcacggtggctcatgcctgtcatcctagcactttgggaggtcgaggcaggcagatcatgaggtcaggagatcgagaccatcctggctaacayggtgaaaccccgtctctactaaaaatacaaaaaattagccgggcgtggtggygggcacctgtagtcccagctactyggggggctgaggcagaagaatggcgtgaacctgggaggcagagtttgcagtgagccgagatcgcaccactgcactccagcctgggtgacagagygakactccatctcaaaaaaaaaaaaggaatggccttgatgaggtggtaaaaattattagtctgtaaattgcaactctttgtaatatyctttatgatgaaatggggagtacacgtagcgcctttctactggggccaggcgtggtggctcatgcctgtaatcccagcactttgggaggccaaggcgrgcggatcacctgaggtcaggagttcgagaccagcctgaccaacrcagtgaaaccccatctctactaaaaatagctgggtgtggtggtgtgcgcctttaatcccagctacttgggaggctgagtcaggagaatcacttgaacctgggaagcagaggttgcaatgagctgagatcacgccgttgcactccagtctgggcaacaagagcaaaactccgtctggaaaaagagaaaaagcctttctgctctacactgaagtgtgatgcttgtctcaagagaagcagccatcccaytgagtagcaagctgattttggtgtttgttagacattttctcaaaatgaaaaatcagctgacgcatcagtagaagcaacccatggtatttgttgccaatgataaactttaagctcccaggcaaaacttttgagtgttagaaaacacctctgttaccatgagcttgaccagttccyaacatttaaagacttctctagggccgggcacggtggctgatgcctgtaatcccagcactttgggaggccgaggtgggtggatcatgaggtcaggagttcaagaccagcctatccaagatggtgaaaccccatctctactaaaaatatttaaaaaatttagctgggtgcagtggcaggcacctgtaatcccagctactcaggaggctgaggcaggagaatcacttgaacccgggtggccgaggttacagtgagccgagatcgtgccactgcaccccaggttgggtgacagagtgagactctgtctcaaaaaaaaaaaaaagtcttctctgatgagatcaaggtgacttcaacaaggtgatttttaaagaacattttataataaaagtgtccattttaagaagatttacatacctttgtggccagttcacgrtgtcacagagttatgcacttgtaaatgatccatttaaaagcacaagacagaaaaataaattttaacctaacaaagtagaaaaagtttaytgataggatttcagattctatattggcacctaccctttcaagaacctactgtttctcaagtttgatgtactgtggtgtcaaagaacaatattcacaattatttgtaaaataatttaaatactcctyrcttttccaactacaaatctgtatttgtaggctgaattttatttttatacttcaaccaaaagagcttatcaccacagattgaatgtgaaagcagatatkagagtcaacagtcttttattaaaaaggcagacactaaaaagatttgcaagaacaaaaagcagtgccattcttctcactaattyttgttgraaatgaagtaatgtaatagatttagtgttgttattttaaagtgaatatttttaaatttctcattgttagtttctttctttctttttcttcttttttttttttcgagatggagtctcgctctgttgcccaggctggagtgccgtggtgccatctcagctcactgcaagctccgcctcccaggttcacgccactctcctgcctcagcctcccgagtagctgggactacaggcgcccgccaccatgcccggctaattttttgtatttttagtagataccaggtytcaccatgttagccaggatggtctcgatctcctgacctcgtgatccgcctgccccagccttccaaagtgctgggattacaggcgtgagccaccgcacccaaccacgcccggctaattttttgtatttttagtagagacggggttttaccatgttagccaggatggtctcgatctcctgacctcatgatccacccgcctcggcctcccaaagtgcggcgattacaggcgtgagccaccacgcctggtcctcagtgttattttctaatctggtaaatgttgacagatttaactcaaaaacaaaggctcttggggatgtgcaataatttgagggacttgcaataattttcaagagtgtaaaggagtcctgagaccaaagggtttgagaaccggtggtcccacttacaggggccttgtcttgagacacagcaggaaagaggggtgttaactggtggtgtcagctctgtctccagtgggtgatttttgcctctctgagcctcagttgtcttacctgcaaaacggagtgagaaatggtacttcctaccttgttggtgctcaagaaagtgttcacacaacacgaatccccatcctaacagaatcctggccaggagcccaagttatttcctgtaatctacgtttgaaacgaatgcgaggaagcaaagtgtgctaagtgatgcggtttcaaaagctcctcttaaaccccagcatttgtcttcatgaatattgctttaaagtcggcctgactggttttctccctctgctccgtgcrtggcccagagctgatcaaggaagtgctgtctctggaggagaagatccacgacttggccctggagctctacacgcagagatcgctgctggtgatggggcggggctacaactatgccacctgcctggaaggagccctggtgagcccccacccccagcccccacccccacggaggrcaggcacaggagaccctgaggagccagcgggaaggagggcagggcgttgggcttggggagggccgggcctaaggaccccttggccagtcctgtgagcctgcgctgagcaccagctctccaccaggtttctagccctgggcacacagagatgggtgaggcaggtgcctgcccccagggatctcccaatctactgaggagaaagggrcagggcgcctggggtgtgcccctccggctgtccaggcactgccagggtccacttggaacagctcactcagacctcatgagctgcttctgagaggttggcggttgctattcaccctcattcaggaggaaacaaagcctctgaaagcttaagtatctcactcaagatgacgtaggggacccgaatcagacctgagtccatggggccttcgcttttttccaccaaaattgaggggtgggttctccgcagagtttccttgttacccctcaaacttccaaggggagtttgagatcctgcaggaattaacttcgaaggccttgctttttcaaaaattggtgacaggccatttgccccctgcagcattaaagatccacgccaggaaagagaaagctgatggggcagggacagggtgccagggccacagggctgcccagagggtgggcagagagccgtgcagggtcctgcatctcggacttgccctttcctcgctgtcagcrtgccatgcacggagcagatgctcagcccaggtracggggacagtgctccagctgaggctgcactggccaccaagacgagggcattaaccgtggcccagctgggctgccatcctctcccatctcctccccaccacccccatttgaaagacaatgctaggctggcacagtggtccacgcctgtaatcccagcactttgggaggccaaggcagtcagatcatttgaggtcaggagttcgagaccagcctggacaacatggtaaaagcccatctctaccaaaaattcaaaaactagctgggcgtggtggtgcacgcctgtaatcccagctacatgggaggctgaggcaggagaatcgcttgaatccaagaggaggaggttgcagtgagccaagatcatgccactgcactccagcctgggagacagaacgagactcccatctcaacgaaaaaaaaaaaaaagaaagaaagaaaaaaaaaagaaagmcaatgccagttacaagtggttaccggaaacattcagagttgatttccttggtcttggtggggagtgcagggctgtcctcactgagctccatctcctgcacctgccccctggagattctgactcctgttaaagaacaggcaggtgctgcttcttggagtgcagtagaggcaaggcctggggtgcactgtcagtccccagatgactctgcgtcatgggtgggggctgagctgcggtggctgaacgtgctggcgggagatgcacattgcagctatgcctccgcmtgagtctgctgaaggaagaagcgtttaggtggctgctggcacgagcccatggtcctctggtcactgggaggccggcactgcagctgtctgcgcctccagactggagccgcactccttacagtgtggccctgacctaaatcagcagtgctagcggggagtcgagagatgatttatttgactgtctcaccatttcaatgacgtggatttgtggtaactgaatagagatggatctacctgaacacaggaaaaaaattaattcaaataacaccccagtttgtgtgattttgcttggaaccactctttagaagttattaatgggcaaatgctyaatcagataattaactgaaggtgtagctaagctgaatacgatgctgtcgttatacacgtggctggctagggaggagcagggggtgagctaggctgactccgacttgtttktcctaaggggtggctgtgcgtgggactggagagagacaacagcagtgcccggggctggtgtggggacacagaggttgtgtcccgggctggtgcatgctctggatggtagccaggcctctccccaggcccttgctgggtgtcctcagtgctgtcaagcactccaggcatctgtctgccttgcaacccttggctctctgccttccagagtcatccttcccctggttccccttcttcccctctggctgatctgctccagccccatctgcccagtgtgactctgatctcacctcctgtttccagaaaattaaagagataacctacatgcactcagaaggcatcctggctggggagctgaagcacgggcccctggcactgattgacaagcagatgcccgtcatcatggtcattatgaaggatccttgcttcgccaaatgccagaacgccctgcagcaagtcacggcccgccaggtgagggctctccactggactgrgccagctctctcctgcttttccccatgcatgccyacctcaccactgtctgccartaccagtgatggatggtctggccagtgagtggctgtgaccacacaccctcccccgggccscctgtggggagtgcacacacttggaaaggagctggtcagcccgcagctgtcccacacagctctttggtggggcccagggacccacactgctgtgagcagcaccagatcctagcctggagctcaggggaggtactcctggtggacatccctggggcagggtttccccaggttctgcggccaagcagctccgatgggaactacctggagttaggtcaggtctcatagggcaggggcacagctttccataagactgccctygattcaggcacctgttgcaagccaggggtccacccacacatctgagcaactgactatgaatccaaggattcccactctcccctgaagttcagtaattttctagaacgacccatagaactcaggagatgactatatgattacagttttattataaaagatataaatcacagccaacccaaaagaagagacccctagtttgagggccccagatgtgaagcttgtgtcctcaggatgtgtcaccctcccagcacgtcactgtgtgtcgcccgggagctcccctgagctgctagctccagtgtccagagtttgtattgtggttttattaagtaggcaggatggagtgaaccattggccatgtgatcraactcagtcgccagccccacttttgtccttggaggttgggaggtcagactgacaggctcatgtctcaaagccccarccttctaatcatgtggctggcctttctagcagggccagacgccatcctggaactatctacaggcccaccacgagtcgtcaccttagcataaagtyaggtatagtccaagggacctcccataaataacaaagatgcttttgtcacatgggaaagtccagaagccaggagctcccttcctggaaccggccacaaagaccaaccaaatgctttgtacacagcagctgccctgaggtaggagggcagagttcatgaagtttcggggaggtgaaatccaatgaggtgccccatccagatgttgccacctggctcagcacagaggtcagagtgagggtataaaacacaatggcatcatttccccacttaaaaccctcccatacctgcctgtcaagccacagagacccacagtcctgcgttatctggccctttcctcctgtttcagtgagttccaggcactccagcyttccttctgcgtcccackctcattgcgcccgcgcccgcctccgggcctttgcgctggccgctcctgctgtctggaatgcccttcccacagaatgctccgccgagggttgtcccctcatcatttagggttcagtccagatgtctcctgtttttgagagagctttggagacctcaccagtctcccaatgacattatcctgttttctagccttggtggcatttctttggaattcattttttttttttttttgwgaykgagtctsgctctgtcgcccaggctggagtgcagtggcgcmatctcggctcactgcaagctccgcctcccaggttcacgccattctcctgcctcagcctccccagtagctgggactacaggcccccgccaccacacccggctmattttttgtattttttagtagagacagggtttcaccatgttagccaggatggtctcgatctcctgacctcgtgatccrcccgcctcagcctcccaaagtgttgggattacaggcgtgagccaccacgcccggcctggaattcatctttatttcttggtttgcttgtctaggtttttgttttctaccactagactatgagccccgctagagttaggagtgagtctgccccgctctcggcaaggcacaaatgggtgccaaatgatgcagcaggatggcaatctccttaccagggaaggggaagaaacccccaaaaagcatcagacactttatcctttccaagcatttgtgtcccacacataccacctcacccatgactccagcaaatgcaaaagaggactgttctcatcacagtaatgtagcttccagatactctgtatgcatcagggatagcttcttycagagagggtctattttatgatgctatttctctgctctagggtcgccccattatactgtgctccaaggacgatactgaaagttccaagtttgcgtataagacaatygagctgccccacactgtggactgcctccagggcatcctgagcgtgattccgctgcagctgctgtccttccacctggctgttctccgaggatatgacgtgcgtctaaaaactgcacctaacagcagagaggagagacataaccccagagttcctttctgttctttaaatacttggagtaaatagtcatagartaaataattttatttaaagtagctttcttttttttttttttgagattgagtctcgctctgtcgcccaggctggagggcagtggcacaacctcggctcactgcaagctccacctcctgggttcaagcgattctcctgcctcagcctcccgagtagctgggactacaagcacccgccaccatgcctggctaattttttgtattttttgtagagacggggtttcaccgtgttagccaggatgaccttgatctgacctcgtgatccacctgcctcagcctcccaaagtgctgggattacaggtgtgagccaccgcacccggcccagtagaagcgtacttatgaaccattcctacctttccttcccactccaccctaaacaaataagtcccatggaattcatatatattcttgcaagaaaagttaatttttaacagtacacaccaagttacctgtgtttaaaagcatgaaccktattctttaaatcatgttaacagatcatgacacacatcaggtgcacagtaaatgtttattgagggactaaaccttatacggttaaatgaggcttctggactaaggaatctgcctccaagacgcaggtctctaggttggtgaccatggtgaacrtctgtctcttgtttttaagtactctgaaaattgtctgtgagaggtagcatgttgctgagatctttggggtcctgaacagtcactttctttcattttaggttgacttccccagaaatctggccaagtctgtaactgtggaatgaggctgagaccgtgacaagaccatcaccacctttcatctgattccagacctgtcccaacagcagggatgctacatgggaagagaagtggacatcccacatgttctgcgtgctcctgtagagcttgacagcttccacgtgccttctacccaagtgcttttgcttacagcagatactgtttctctgtgtcctgaagtcgccagaggagaagggaatcattgtttacacatggggatcagagcagacttctccactactgtgcaatagagatacagctctcttcagagtaactgtgaaccttttataaccaacactagagttagttttaaaagacaagatatttataatgacgactgtatagcttttaagttatttttctagtatgtggctttctgtagccgtggtaacggccaaactgttcatcctagctacccatgctctgtgtccaggcttgctcctggcaggtggcattcatctcagatgtgagcacaaggcattggccctctggactcctttctccttttctttcctctctaggctgctcctgaatcctgttctctgacatcygtggagcccctcctgcatccacctatgcctcctataagtccarttgaaatctcagcctccttcaacattttcttctcgtgtgtggcccacatccctccacttctccaacttctgtttaatctgatcacgkctctttttaagccctggcagcattttggtccctgctccttgcccatagtaaaacagcttgaaatatcccatgcaagagagtagtttcaagtgggcaactctgctctctatttaaaagcgtgcacaatcaaaagtactatgcaattttaggacaataaagaacatacagtttttttgtgtgtgtttgcattttrttaacctcattctttttgtgtactttgaattttgaggactgtgcaggagctcggcagtgtttggaggggcagccctgtttgttagtaacattggcctcgtccacacctgagacctatgggtttctagtaggaaaaggagggctgttgtccaggatacaacaaatccaagagatttgggactcagcagaggggccactgaacctggaaggggttgggcagaacctgtagacagcatagaggggtgaaactctcaaatttgtatttttttcccaataaggctattatagtccctggtttcattaatacaatcagatggaaagattgaaagccagagagttctgaagttttgtgaagtcagaacttaggcttcctacgtaagtgctgtcacacacaacctgaatgatgtcttcatgacaacgggtgtgtgtagccctagtatctcataaaccctgtccaggattacctatgggctactcagcaaatttccatcctgtcctatgccctcacctgtatcatgggctggaaacctgggagctacatttccagttatccaccatcctgtcctatgccctcacctgtatcacaggggctggaaacctgggagctacatttccagttatccaccatcctgtcctatgccctcacctgtatcacaggggctggaaacctgggagctacatttccagttatccaccattctgtcctatgccctcacctgtatcacaggggctggaaagctgggagctacatttctaggttatccaccagtgagaggcattcatgggagacttggaagatagttgagtggcagaaatcatattttgtatttatctctggcagaagcagatagaaatgttgcttcagcaaacggggttctgctgtggccctcaggggctccccaaaacgcacccacctcagcatgccaggcagtggtgaccatgaacagaggtcgcctgtggctcctctaaaatcccaactctggagagctggcagcaaccaggtgccacaggggcttttcctgacttctgtcctccaggccctgggtcagtcccagggaaatggctagaatagtttctgtcctactaatcaatccatgaccaatacaacttccaagattaggagactacaaactagccagaacatttttctctggacaagacctagaaagtgtatttcatccttatgcccaagaggcgacggccattctgacttttgtgccaattgttcccttgcttttctttatagtttcacctgtgtatctatcccccaaatacactgcctagttcgaaagtggagggtgagtgcatgctggcggtgcaaggagagggcggcactgcctccactagacggaggttccaggaggtgagcagatcagtctccaggtcgtggtctgacccctgcttctctgggaactgacaaggcccctcctggggaagtcatgaggaaggtctcgaggaagtcttgggctcagcacagtcaggcacctggtagggccaaggtggggaccacgcgctggacctgcagtggaaatagtcagagggagggggctgacctgtacgtcctgcttctaagctcgccacggcctgcctccagctctcggtggggggaaagctggaaacttctgtgaatgttgtgcgtcctcagcagaggaggggagcgcccctcgtcggcacatggccaagccaagtaccgccaagaacctaggccaggctctcctgggcattttgtccccgggctacagatggcctgatggaggtggggtcttggtgaagacagttcaccccgtgggtcacgctgctcagtatggctcagtcgctctccacgtctggtgcagagccatcacctcagggtcacttctcgccaccctccatgggcctcccaggccatgtcttctgtgttgggttcctgtttttgtttttttgtttgtttgcttgttttttgacagagttttgctctgttgctaggctggagtgcagtggcgtgatctcagctgactgctacctctgcctcccgagttcaagcaattctcctgcctcagccacccaagtagctgggactctaggcgtgcgccaccacacccagctaatttttgtatttttagtagagacaaggtttcaccatgttggccaggatggtctcgatctcttgacctcgtgatccacctgcctcggcctcccaaagcgctgggattacaggcgtgagctgccataccggcctgggctcctgttttctgtatctgtgtcttccttcttctgagtttccttttttgttctggtgaagcccattcttgagaaaaggtgcttgagaggtgtcttaagtcagttcagactgctgtaacagccctggtgccttataaaaatcccacatttctttctcacagttctcaacagtgggaagtccaagatcaaggcaccggcagatgtggagtcttggtgagggcccatttcctggtttgtacagagcagccttcttgctgtgtcctcacatggcagaagggacaagggagttctctggagcctctttgataagtgtactaatcccattcataagggctccaccctcacactcatcacctcccaaaggcctcacctcctaataacatcacatgtggcaggggttaggattgcaacatatgaatttggggaaacacaaatattcaggccacaacagaaggcaagttttttgagaatctgcaggtgtggaaatgatttttttatttatacttgatagagggtttagctaaacacacaattctaggtcagaaaaaggtgttcctgcagaattttaaaggtagtgcttcatcgtcttgttcccagtgctgctattgagtccaaagtctgatgtctttgtaggtgaccttttggtctcttttttgtttcctgtgttctgaaataccacaagttgcctagagcacatttcatttagggttgattgcatctggtaacttttgcctttcagactaggaaattttcttgaattattttgttgtggatttctctgtttctctgtctctggagtgtctattattcccagggtgaagctgctggactggcctctaatttcttatcttttttatcattcatttgttgtctttttgccctactgagagatttcaattttatctcccaacctgctactaagatttttcatttctgccaacatgatttaatttttcgagggtttttttttgctctgactatatatatatatatatatatttttttttttttttttttgagatagagtctcacttcgtcaccaggctggaatgcagtggcgtgatctcggctcactgcaagctccacctcccgggttcacaccattctcctgcctcagcctcctgagtagctgggactataggtgcccgccaccacacccggctaattttttttggtatttttagtagagacggggtttcaccatgttagccaggatggcctcgatctcctgacctcgtgatccgcccacctcgccctccgaaagtgctgggattacaggcgcgagccactgtgcccggccacaaacttttctattcttccccatttattatttctattagaatgaaccatagatatttattttatattttgagtcatgcccaatactatgttagtttgttgttccaatggttccagcaacagccactgggggctctttcagttggctcttgtgtctctttgacatagccccatctgtgtgtgtgtgtgtgtgtgtgtgtgtgtgkgtgtggtaagtacttccgtgtgtgtgtgtggggggggtaagtacttccgtgtgtgtacttccttacgtgtgtgttgtacttccttgtgtgtgtgtgtgtgtgtgtgtgtgtgtgtgtgtgttgtaagtacttccttacctgcacaacaatattctccaggctygtcttgtccatcccctgtcccggccctagaatcaaccatttctccagggatccctggttccttttatggcgaatgacattagagaacaagatctgggctctgggtgtgtcagtcactgctgagatgtcattgcttctaggccatctcagctgacagagcaaggccatgttgcatacacctgtgctgcataatttttaaatggctggttcttgtttgaaggatgcaatattttttcattctctctgaagctagcagtagttttatttttattttttgaattttccttctccacagagtctgtttctttcaagatgcagttttttgtcttacttttcttagccatatgacatggagctgtctgttcagattcaaggggggctgactggaaggtctaaggcatggtagggctggtcgatgcaggattcactgctgggaaatctggtgggggtgggggtgtcataatgttcatacctcaggtcttcccttcagggctggtcagacttctggagaacagcttgctggctccctgcctgaggacagtcccagctgctggtgctctgggggattcccggaggaggagggctaagggccactgggttcagcattcagttatacagcccccaaataaccctgtttccatacagtgccacaccctcagctgcgccccagctcagatgccctcattctaatcatcaccatggaagaaacttccagacttctgcctttcccaattctgcccttccctgccatgtcctcacatgagcctgtctgcccagcatggctgactagttccagaatggaagccctgtctgggggaccatcagagtccattgttgtgggttttcaaactccatttgggcctgcagtggcctccatggccctagagtttccagaccagctctgcccctacctcccctgggtatgatgttacaggcacctcccagtaaacgtccccattggtttaagtgcagtttagttttctacaacacacagctgggacagccccgacttacaccctctagcacatctctgggtccttgtaggggagaagggaagatgtgggttagtgcaatggggggagggcaggcaaagtgttgaggggacagaggcagtcagcataaggacctacaccatccctgctgcatgggccgcacccagctcttcctgcttccgtccttctccatgccacttcctacagaaccaaggcagacagaagtgaatcccttgcccagaggagcacagctgacaagagtcggattggaatccaggccagtcaagggtgggggatatcaggatcacagaaacccgttggcactgtggctgcatacacagctggcctccggacaggtccccaatgccccaggcacccctagctcctccaccccgctgtgctcttgtcttagtctgtttcttattctgttgcttataacagaatacctgaaactgggtaatttactttaaaaaagaatttatttgttacagccctgggggctgagaagtccaaggttgaggggctgcacctggtgagggccttcttgctgctggggactctgcagagtcctgagggtggcgcaggtgtcacatggccagggggcsgagcatattcacaggccagctcaggtcttccttcctcttctaatgaagtcaccagtcccactccggtgataaccctttaatccatgaatccatcgacaggttaatcccaaccacgcttagaggccccacctctcagtactgccacattggagattaagtttgaacatgagtttcattgaggataaacatccaaaacagctcatcccaaatctaaatgtttcttaaatcaactaatcaattaaaaaaagaaaacctctctgggctgaacaaggcgtatcagtgagctaaagccagcctacatgcctggcagtgccaatctacctcaaggtcctcagaactctccagtcccctcacctttccctaagaccaggtgacttgtggctccctgaacacagcaagcaggtcctcacatctgagcatktgggcctgagcgccctttctgcctaagtcacaggcccaacacatcctgctcggcagcctcagcaacaacttcctcctgcccagaaggccttcctcaattgc

SEQ ID NO: 93237 - DNA, 14533 bp, Homo sapiens
tggcgcaatctctgctcactgcaacctccatctcccgggttcaagcgattctcctgcctcagcctcccaagtagctgggattaccgtagattgcagacctgaatataggagactatcttgatgacctcagagttgggaagaatttattagacaaaatacaaaaagagttaaccataaggtaaaacactgattcatttgttacagtcaatttaagagcttctgtgcatcaggagacaccatcaggagcctggaaacacaagccattggtgaaagagagcctctccctggaggcaggttttggctactgtcagggagcatgctggagccacagcagtgggtgacataggagtttgcttgtgctaacctgtgcactgggatgccgtgggtgctggagcatccttctactgcaggaaggatggccttgggcctgcacactgttggacttcttgggcccaacagaaccagctcctgtggcagactgccctggccacgcagtcacttggtgccccaatgtcccaaggtccagttttcatttgttttgtttttggaacaatgtccattccctgctggggaaggcacagccttgatctgggaccataagattatgcactatgactctctcacgaggcttctgctagaaacaccacctggccctgtctctaccacagctatttctagcaccagggggtgtgctcgattttctgaaccaagcagaaggttgcttgccctgcatcctggcaggagtcaaagcagcagtcccgagtgtgaactgtgttgcatccaaagcctccagaggcccgccaaggcctgtgtgcctttcttagtggcaagagatcaaaagtgctataacttgaatttttgcccgggctggagtgcagtggcgcggtctcagctcactgcaacctccaccttccgggttcaagtgattctgtctcagcctcccaagtagctgggattacaggtgcatgccaccatgcccagctaatttctgtatttttagtagagacggagtttcgccatgttgggcaggctggtctcaaactcctgacctcaggtgaggacaggcccacctgggaaactcctgtttttaaaaccatcaaatggaccaggcttggtggctcacgcctataatcccagcactttgggaggccaaggcgggtggatcactgaggtcaggagttggagaccagcctgcccaacatgggcaggctgtattttttgtaaaaatacaaaaaattagccagacgtggtggcggacacctgtaatcccagttactcgggaggctgaggcaggagaatcgcttgaacctgggaggcggaggttgcagtgagctgagatcacaccactgcactccagcctgggcaacaagagcgaaactccatctcgaaaaacaaaaccaaaaataaaaataaaaaaatttaaaaaaaagggagtgtccctgcacaagctcctctctctttgcctgctgccatccacgtaagatgtgacttgctcctccttgccttctgccatgattgtgaggcctccccaaagtccaataaacctctttcttttgttaaattgccccgtcttgggtatatctttatcagcagcgtgaaaacggactaatacactgggcatggtggtgcacgcctgtaattccagctacacaggaggctgaggcaggagaattgcttgaacccaggaggcggaggttgcagtgagctgagatcacgccattgcactccagcctgggcaacagagtaagaccctatctcaaaaagaaaagaaaagctgggtgcagtggctcacgcctgtaatcccagcactttgggaggccaaggcgggtggatcacaaggtcagaagatcgagaccaccctggctaacacggtgaaaccccgtctctactaaaaataccaaaaaattagccgggcgtggtggcgggcgcctgtagtcccagctactcgggaggctgaggcaggagaatggcgtgaacctgggaggcggagcttgcagtgagccgagatggcgccactgcactccagcctgggcgacagagctagactctgtctcaaaaaaaaaaaaaaagaaagaaagaaagaaagaaaagaagaagaacagagaagcagagagaagccaggccagctgccccagtaaagactcaggttctcacgatcccaggccacttccagactgaatcagttctcagctgtacagcaggtgatctctgccctacagggatctgcacccatttactcaggaaactgtcttcttactatccagttttgagagtttttatatattttgaattcaaagtatttttttaatcatatatatgattcacaaatgttttctctaagtctatggtttaatttttctatttttttatttttgagacagagtctagctctgttgcccaggctggagtgcagtggcgcgatctcggctgactgcaagctccgcctccctggttcacgtcattctcctgcctcagcctccagagtagctgggactacaggcgtccaccgccacccccggctaattttttgtattttttagtatagacggcgtttcaccgtgttagccaggatggtctcgatctcctgacctcgtgacctgcccacctcgtgctgggagtacaggcgtgagccaccgcgcctggccctctctgtgcctttttttttttttcttttcttttcttttttttttttgttggagacggagtttcgctcttgttgcccaggctggagtgcaatggcgcgatcttggctcactgcaacctctgtctcctgggttcaagcaattctcctgcctcagcctccggagtagctgggattacaggcatgcaccaccatgcccggctaattttgtatttttagtagagacagggtttctccatgttggtcaggctggtcttgaactcccgacctcaggtggtccacaacctcggcctcccaaagtgctgggattacaggcgttagccaccatgcccagcctggcacaatttagcataaagtttttgaggtctttgtactattccagtaggacagttggtgaaacttgaataagatccgtaaaatacttgattactaacttgtatcaatggaaatctcttggtttataactgaattttggttatacaagtttttttttttttttttttttttttttttttttttttttttgagacacagtctcgctccgtcgctcaggtgtgatcttggctcactgcatcctctgcctcctgggttcaagcaattctcctctctcagcctcccaagtggctgggattataggtgcctgctaccacgcctgactaatttttgtatttttagtagagatggggtttcaccatgttggccaggctgacctcaaactcctaacttcaggtaatccgcccaccttagcctcctaaagtgttgggattacaggcatgagccaccgcgcctggccgagactgtagatttttgcaacttttttgtaagtctaaaataatttcagccaagcatggtggctcatgcctgtaatcccagcactttgggaggctgaggcagaggatcacttcagcccaggagtttgagaccagcctgcaacgtagcaagactccatctctggaaaaaaaaaaaaaaaattagagcctgtggtcccagctacttgagaggcttgaggtgggaggattgcttgagcccgggagtttgaggatgcagtgaggcatgttgagccactgcactccagcctgggcaacagagcacgatcctgtctcaaatataaaataatttctaaataaactttcttgttcaagctcagggtctgagttgtgcactgcctatgatccactccacagaagttctgatttcttctctgtgcaatggttctgccggcctttctgccgcccagaggtcctggtgagtgggcatcagagactccttagggctctgtggaggctcagggaggagctttcgcttccctcctgatgctggtgcctccagagctagacaggaagatggaagctgggtggcccgagcaggggtgggggcttggctggccctcctgtcagcttgagctggcttgagcccaggcagggccctgacagcctgggcaggctcagagggagggaggtgggaaccaagagacccggggagggctcccggggccaagacccaggtccctgccctgcacatctgccaagggacttcctcagaagctgctgatgttaggctttggcttcctgctgtggactgaggggatgaactccgacgggaggacattcaggccttggaggaaatgagagcttggctgacaggagggcctggactcacgaagacacttggacacccacaagcacagagacatgggtgtgtgacaactgaccaaggggcatgcaggtatgtatgcgtggtgcacacagacaccctgggcacagcccactggcaccagcgtcaacccctgcgtggtgggctgcatcccacccttcaggcaggccctgtggggcaggtttcagggaggaaggaggctgagtgggcagagtctgaggacgcggccaccatcgctccctggcactacatctgtgtccgggatctaggaggcagtcctccatcactgagccccaagatgactgtcacagcttggtctaaagcaggggccgggcctgagccctggcccctgccctggaggagctcacagagcccccagctggggcatatctggtttccgggggcaggggcgatacccagaggaggaagaagggattctgagagagcccaacaggctccgagcctcaggctggagctgagcttggggcagcaaggaaggaccaggtgcgagggcagaaccatgcggcccgacccctgcagcacggcctgtggcctcccccagctcctgcccgtgcttctgggtcagtctggactttgccacttctgaccaaaagccaccgcaaacccactcaagccaaaagaggaagtgaccgttaggcccaactgggaaggctggcggccaggggcactccaggcagggcgaggggggcggccgggggcgctccaggcggggcgagggagacacccagaactccaggcaggagtcctcgggtgccacctttcctctccacctggccctgcgtgggctctgtcctcagggtggcccgccgtagtccccctccccactctgagtttcctgtcccaaagtcctaaggaagtttccagaactacatctcaccatcttgagtcagccttggctcagtgtccatctcacaggcctggaaggggcaggagtcagcactgtccagaccacagggcctgagtgtggggagggcagccgtctaggaaggtggtggagggttgttaccttgaggcaagagggctgcggggcagaaagacacagcaggtgactgttgtgggaggcccaagagaggcctgggagagggatggcccacaagggctgaccctcccgccacccagggggccttggacaggtttcctcctggcagggtggcccttgtgcatggaacccctacaacgactaaggctggcaggcatgaggtttcctgaaggagaaagagcttgtggggcccagtgtggctgggggggcgctgggactccattctgaagccaaaggcactgggaagggcttccgcagaggagggtttggcaggggttgccaggaacagcctggatggggacagggaacagataaggtgggtggaggagttagccgggagcctggggctggctccagcatgatgtgggggtctgcaaggccctggagaaagtggggtggtgcagcagggggcacacccacagctggagctgacccagatggacagcttgggctctgccacgcgggactaggcaaggaaggggcacgaacaagcaggaagtggtgaggcggtctccagctagctgctctcccctgcccagactttggtttcctccctgctggcttggcctggctccctggctctgtgtggtatggtcacacccccgtgcaccccctccactgagatggggcggggagagcaccgaggctgctcttcctctcctgggccgtcctctgagcagcagacggggctaagcrttccccagctcgccttcacacacagcccgtgccaccacacygacggtaccatgaaggacgaggtagctctactggctgctgtcaccctcctgggagtcctgctgcaaggtgggctggktcctatctaggaagagggtgggccttagatccctacagcttgccctctgccccctakgcccaggtggagggcasaggtggggactccagcccaggcccaagctggaagagggtggggactttcagggaactggggggcacctggctgtgagagctgtaggacttgggggtggcaagggtgccaggacaaatggtaggatagccatgggcttggggaagctgatctctgctctttccagctgtcccctctctgggcgtcccagcaagcggcccccattccctggctctgcttcaaaggcacctccatactgggaccacgtggagcagggtagaggtgggactccttcctccagccccctaaaaagagcctgcttaatgcctttctcagactggccctaaaggacacattccttggccagatatccttgccacctaagagacaccactactccacagtgtgtgggctaggataaggcacagcctggggagggggctctgaaggggctgaacagacaggccagcctgacctccagctgctcctgcactgagctggatggccaccctgtgacacccatctgcagagggcccagaaccaaaggtgccagggctgcaggactcagggggagatggtccgacgggakgtctggggagggagcgcacagccagcactggtctgtgtgtggtctggcctggcctcacctgaccaagagaagggctcctgcccacagagaaactttagggccagcccaccctctgcaactaccccagccctggggtcctggggttaggctaggagagtcccagctgcaacctcctgggagcaggagagaaggtgtctgtcagatttaggcctgggaccggaatgcaggaacagagaaactgaggtttggaggcacagggacgcaggctttagtgatcccggcctgaggcagggtcagagggccctgctggtgggcgctggtaggtgggtgaccagggactgttagctacagggagtgtgcttccttgcacctgggaggatgcagccagctctgccctcagactcccgaggcacttcctggccagggacctgaaagctgcatttgcctgtgttttgagagtgaaatgattcagaaacaaggactcaagtggtctctctcgcggagcaggtgtccctgtgcctgaatcactcaccctcccccatacactcacaggttgggacagggcctctctgcgccccaggcttcagccctgccctcctcgctgaatgtcagggacacagggcaggccagggatgggtgagacgagaggtctcctcgggcggggagggggcggggttccgccttagggaggagaggacacggccaagtgaagggccagattgcaggatccctcccactcccatctctggggcttcgggtgtccagacctgactcccgctccccctcctcccccagcctacttctccctgcaggtgatctcggcgcgcagggccttccgcgtgtcgccgccgctcaccaccggcccacccgagttcgagcgcgtctaccgagcccagtgaggcgcggcgggagggcgcggggcggggagcgagccccaggcgggtccgggtcgcaggaccatcccggccggcgcgctcatcccacccgcccaccgcagggtgaactgcagcgagtacttcccgctgttcctcgccacgctctgggtcgccggcatcttctttcatgaaggtcggggtgtggggcaggggcgcacgcgctggacccccgggacccgcgcagggcgctcaccaggcccgtgcgtacctctcgcaggggcggcggccctgtgcggcctggtctacctgttcgcgcgcctccgctacttccagggctacgcgcgctccgcgcagctcaggtgagggccgggcggggagcggggcggggccggggaaagatcgcgggcgggcggggctcctggggagcgggaccgaagctgggggcgggcgacgggccggagcccagcgcctttggggattcggtgggcgagccctggcggcggccagaggaagtccccgtggggccagggttgcggcggggaagaagcgggcctcctcgcgccacctccccgcygaccgccgcccgcaggctggcaccgctgtacgcgagcgcgcgcgccctctggctgctggtggcgctggctgcgctcggcctgctcgcccacttcctcccggccgcgctgcgcgccgcgctcctcggacggctccggacgctgctgccgtgggcctgagaccaaggcccccgggccgacggagccgggaaagaagagccggagcctccagctgccccggggaggggcgctcgcttccgcatcctagtctctatcattaaagttctagtgaccgagacccgggctgcgttctctgggtccgcgggggtggcgcaccgcgggctacggagcctggaggggcccagcccgagtccgggcagcccggggcgggcttcctagtggcggcgtgagagtggctgcgaaggaacgagccctccccctggggcgggactggatccggtcttcacctcctaccccactccctactcagcctcggggtcacaaggccgcccagtcctgccggggttcaccctcctagcgctcagcggtctcctcaccggtccccctcctcaggggccttccctcgactctcagccgccgcagtccctcgtcccctggccttcacagctgacactagatagagcctgtggctctctccccaggtgagggcaggggtttttcttttggtcagcactggatccccctcgttaactgtaggtgttcagggcagccctccgaggtccgcagagctgcgggcaccatgggaacgaagtgagtcagtgacaggcggtctcaaggaaatgtccagaagccttggggatccaggggaggcccacagaaacaaagaagtgacttttagccaagtatgcaggagaaacggagaaaggagagctttccaaggaggggcaacagtgtgtgcaaaggccctgaggtgagcgggagaccctaatgtgccagaggagtgtcggggacccaggatgaggaccaagctgagacacacggaggggaacaaggaggctgggaaatgccttcagcttgaggagctaagggaaggcctcatcgcaggccttggacatgggggagacattcgggggacctgctataggcattgtggtcccagattctgagctggtttcaccagtgacagactttgcggcctgatcctaggaaggggggtacgctggcgccgaggtggcactgcagctgcacagccaggggctggaccccgcgcctgcaggccaggctggctccttgacttagcagggaaaggtcgctgctgatgctggctggggaggcccagtgccaggcttagttggcatgttggggcacagaccaaatgaagccaaccgcaggggcagagggagatgcccagggcgctcacatttgaggcacacacttcattaaccctttattacaagtcacgctcttatagaagtatatgtggacttacgtgaaaaaatcaaatgtatccaagaataaaaaacacagcacataaagtagtatatgcattccagtgttcgcgccagagacggcgggcgcccaagtaaaagctcttctaaaacggcctgactggggcaggccgggtgcgaacggttccgggcctcaggcacagtgtgggggccgcctgcctcctccgcggcccggcgggcgggggcagcaccagctcctagggcctccgggccagcggcggaccccaggccggcccaagcccgacgccaggcagaaccctttgggcggggccgtatctggccctccggggacggcagtgacgacacccccagaaatgtgggcttcagggctggccacagggtaccctcagaagcccgcagcttagtcggcctttttcaggaagatctggaagagccggacccagggtcagcagggcctctgagctccgccagggtctccctggctgctccccgtgcctggcctggccctgcccagcctcacctcgctcagaatcacccacacaggggagtccgtctggatcgagaggcgcagtgcttccagagggccgaaggctgggtccacctctccctctgccactcccttgtagaaggagcctgtgggagggcagtggtgagagggtgtccctgaaccccagcccacgctctcccccaaaccctacccaccgatctggaggtagccgtcggggctccgagggtaccggagggtggcggtgcggccctcctgcagggcctccttgtctgactgagggttctgggggcagaatcaagggctgaggcaggtggtcacaggaggcccggcttcagtgcacaccacacccaccgaacttacgtcgaagggcagcacctccacagacgtgttgaagagcttgtcctccgggtgctcgatgttcccactgcggaagaagaacctgcagccaggcaggcctgtgagctgctgcaggggcagcgttccagcacagcacccagggcccagcagagaaaggccaggcctgcgccaggagggccccccaggcagctgtcaggctgtgcaaagagaccagggccttcctctgggaggatggtgacaggaaacatccctgagctcctaggggctgcctgacttagtcctcacaaggtagctaccattacgaggcccacttcagatgcggaaactgaagaacgtgaggataacttgccggtgaagcctacaccctgggggccacccagccccgcccccatcgcagacccatggtgctggcactgaccgctccagtcttagaggttggaagaagcggaagcggatgaagtcccccgcggcaggggtgaaggcccagaagaagtcctcgcgcaggtaggctttctccagggtgaagtgctggtatgtcttcaggctcgtgctcacctctgctggcgggttcacatgctccttccgcagcgcctgctttccaaagtctttgtcctgcagcggaggagggacagcagtgatggcgtgggccccgaccttgatcccggcctagggagagcgtgcagtgcagcccaccttcagtttctggatcttgccagccagcgaggagtgagtgcccacgtgctggaagagggacggtttgaagcggatccgcaggttggctttctgccggtcacagtgcttctgtggagggtgggcaacaccccagggctcggcttagccctccttcctcaacacggcctctcctggggactaccagggccctcccacagctgacagtgctctatgtgagcagatgcaaggacagggacacagtttggggtggaggctgcctgccccttggccctgcccctgccagtcccgccagctcttgctcaccgcatccttctcggggttgcagactttcacccacagaatatggtccaggagccagtcgatgggcttgtcccggtagaacatgagaatgaactctacaatcaggctcaggtccagcgacttgaacatcttacctggtggggaggggcctgagtgggcagtgctgctctgcctacttcctttctccctgcagcggcccccgagtcccacagcaaacccaggggcaggcttcaggcaggtgtgggcataacggggcagggaggcagacaggtgatgagggcagacatgtctgatgcacaggcaatgagaacaggccaggtggggctgtagcacgcacaccaggcagggcccacctgggcaaaggctcacagtggacacagtgggactgggagagaggatggcagaggcaggtgggactgaaaggcaccgtcaggtaaggggaggggcacaccaatgaagcccagctgggagaactccaggatcatccagtcctctgaaggctgctgcagtgcaaagttcttcatggtgctcaggtagttgggcttggccacgatgtcatcctccagctgcgaggtgagcagagaggggctggggctgaggaagggcacccagatggaccagacccatcgcagggcagggcggcgcagggcagggcagggcaacgcagggcttggggctgacctgcacgtagtagatgcctttggactgcgcgtacatcatgaggaagcagtaatcgaggttctgtttggtcctccacctgtgggccggggcggggcctcagaagttcagacccctccacctccattgtggctccgcagagaagccgctgggtgggcagcttctgtccccccacccccatgcacgggtcctcccatggagaattcagggcactgcagggaaacaccctggactcaaacaccagtagatgggttctcagcacaggcaggcgggttgctgagggtatgggggagtaactagtacctgactctctccttggggtccccaaaggactctcggaggcgggagaagtcagggtagaagtggggggagggtgagatgacctccaggagcccagaatggatctccgtggggaacctgggggacgggaaggcctagtccgtatgcagcctccaggggctgagaggggccgagcccaccagactgtggccctttcttgaggctcacccagtgccagccccccaccaccccctacacccagccaactgaggtagcagagctccagaggggctgggccacttctgcacacccacccctcccccaccaggtccctgcctccccacgagataggaaaggcactatctcatggggaggcaggaacctgccagcacaacaccccgcaccgagctctcccgccaccagctctctggggtcgccagtactcacaaggccttgatgttctctgtcactgccgaagtgtactgtgagtcagtctgtggggagaccaagcaccctcccttagccctgctgctgccccaaaaggcctggaagggcttggagaaggggcacaggcttcagatgccccccacgtggagggagtgagcctgctgtgctgagggcggagtaagggggcccccagagacggccctttccctttgggactcgcatggccaaggactagggggtggcgggggcgatgggtaggggtagagggtgccagaaagccctttcaactttctatctcggagcatttgcgaatgaaactagcaactgaacttccgacagctttctcctcggaatggttcctgctgtcagttctgcaccgcgggggctcctctgaatgtcccccaaccccgcgtcccggctcactcgcctcggcgatcagcaccacgatgaccgagtcctccttctcctgcgggctcagctcggagatgagcgagtgcagagtgtcagtcaggtacgagtgcacctcgcgccgcacgctcgggatgcccatcaccaccgacactatgggggacggaggcccgacgctggaaagggtgcgggggccacccgtccccccaccccgtgctcctccctgtctgcgcccatacctccggtgcggccctggcccacgcgcaccgcgggctgcagactgctctccttggccagcaggtgtggcaggtgatggaagacggtgggcaggtgcagcacgtgccggtgtgagccgttccacggcttcaatcgggggtcctctgggtgggtcgggaaggatcgggactgagaccagggaacctacaaccagcccgcccccgccttttccccctcccgccccagacctcacctgttaggcggccccaggtgcgattgccgtctccgtctcgcagcgcctgcctttctgacacggccctcttgatctcgtccagcaccaggttgagctccttggagcgcttgaggctctcctgctcagctgcgtgcaaccgatcgcgcagcgccaggaactcccgctggtaaacgtccacaacgtcgcctgcaggtggtaggcaagccgtcacgagggggcggtctagagccaccctacgggcccctccagtgtgccagcgcacacatctgggtgtccacctctgcaatagctcattgacatctgttcttgtgcctgccacacgtgacatagctggggtcactctaaaattacactgacactaatgctcatggggagaaaaccaggggaattagccctcttccagtactctcccccaccgggggttattttatcctctgagaaggcatctgaagtggaaatacgatttccagacctaggtaggtggatcctaagcaagggctggaacagcctcagactgaatccgctccatccgttggcctccaaagcccactcttgctttttgcagcacacgctccctccagcgggtgggctacccaaggtcctggtgctagctcttcactgtccttgtagcggtcgctggttgctcaccctgcactggattcttagcctcacgatggccccggggggtggctgctgcagttccaggagcccacctcacttcattgctcag

SEQ ID NO: 93238 - DNA, 26266 bp, Homo sapiens
agaggcacgggggccatgggaggggcacgcccacaaggggtttgcaaagatctttctaaaagaaaaggagttcaagtcatggacagacatggttagagaattcagtgatgccaagttgtcaggcctgagagccccagggaccctctcctactggaaggccagagctgcagaaagaggtcccctgggctgggcgaatttctccaaataaattcaaacatggcctgcctcgggacgggggcgagaccctgggccctcaggggcactgaggggtcgtccatgccgggggacatggccacttgggggcggccctcgtcaaccgcggagtggggaaaaggggggagggatggaggacgaacgcccggcggtgtctaaaggcacgacgcggagcaggaaccacagccctggtccccagaaagcgcgcgcggcccggggcagaacctgccgaagttccagctcggggcgcaagggatgtgggggtcactggaagacggggcgcgggccgcccgtggggaggagactggacccgaacccggcccaccccacccgagcggcgacgccagcgctgaccccaggcgtgtcccggcccccggcgcggctccggcccaaccgtgcacgcccgcggaaggcctcgcacccgcgtcagaagtggcctgcccggggccaccggcccgcaagtccccggtgttctcgaggtccctgccccgtcccgcgcggctgtagccggcgggaggggctgagaggcgggtcgcgctgggacctaaggcgccgccccctcgccagcctctccctccctccgtcacagggtggccggagacccgggggcactgctggggtaccccaaagcatagggccagcctgagtgcgcaaggtcctgaaaagacggggaggcggcgacaaggagtagggaggggggctggaggaagacggcaaagtgaccccggaagggtccaggcgccccaagcccatcgaagacgggaggctctcagtggcgcctggggggactgtgggaaaagcagctcaagaaggggaatctggagcgaggtgggggagaggtcggcatggccttctctaggagcgccagcgccagacagagcggtgacaggccgcaccgggagtaccccgtctatactgaacgggtcaggagtgtgggatcccgtggaggggctgcccttgcagcaggagcgatggccctctcgctcccctccacctgctgccatcgaaaaccttctggaagaggccaggcgcggtggctcacacctgtagtcccagcactgggaggccgaggtgggcggatcacgaggtcaggagttcgagaccagcctggccaacagagtgaaaccccatctgtactaaaaattaaaaaaattagttgggcgtggcggcaggtgcctgtagtcccagctagtcgggaggctgaggcaagagaattgcttgagcctcggaggcggaggttgcagtgagctgacatggcgccactgcactccaatcttggtgcctcaacaaaacaaaacaaaacaaagaaaaccttctggaagaattatcctcctttgaggatctaacccttcttgctcccaatgcttcccagcagggcccgcaccccaggacgggtacttaccgcagtcccccacctccagctctgcacactcgcagcccagtgcccgctcttccccctcagcctcccgacgagactcagctcttcgacctccctgcgagtccctgtgcacccactttgttctgtgcctgtccctgccctgactatgtgggctcaggtagttttgtggggtgtgtggatgttgcgtgggagtgtatgtgtgccccgtgtgtcccatgtgttataaccctgatgctctggagcagaaggcgtggggtcatctgtggataaaggctggtattgaagcagggtcccccacctgtgttaggccaccacatactcttgcgtaaaagtagggtgaggtaaaccccatggccaaagcttggccaaccagagcactgtagcaccctggtcagggatggacatgtgacccacgctggcggacgaaatgcacactggggtcatctggaagcaggagccttggggaggggggaatcctgagcagatcaaagcttgatctcagtatctgacccctggatccaggctggcctaatgctgggttataaaacggcttaagccagttgattgtggttttcgtcaattgtatccaagagtagtgacccatgacgtataccccatgcctgctccaggttttcttttctttttttttttcgagacagagtcttgctctgttgcccaggctggggtacagtggcttgatctctgctcactgcaacctccacctctcggattcaagcaattcttgtgcctcagcctcccaagtagctgggattacaggcgcccaccaccatatctggctaatttttgtatttttagtagagacggggtttcaccatgttggccaggctggtcttgaactcttggcctcaagtgatccacccacctcagcctcccaaagtactgggattacaggcgtgagccaccacacccgacctgctctagggttcctgatggcagtgatggtcacaatacaggccagaaacagtcacaatacaagccagaaacctgggagtcagctatgaccatatgctccccctcaagccaccagcagttcctgttgattgtactttctggcaatagcaacagtaataatacacacgtagcacatcttttatgctaggaaacattctaaatattttaatttttagagacaaggtctcactttggtccccagtctggagtgccgtggtatgatcatggatcacggcaaccatgatcttcttgggctcaagcgatcctcccgcctcggcctcctaaagtgctgggattagaggcgtgagccacctcacccagcttgaatatttttctgcatttaactcacctgttcccttgaggtgagaccatgtgattaattctggccaaggacctgagccagaagagccatatatcacctatacgccaagcatttatttatttgccagtgctaaagcttctagagctctctttctctttgccaagaaagcctttgatttccacatggttatgcctgtagccagggcaggaactacaatgagcagagaccccaggggacccttgaagggtatacagctttgagtatacttttattagatcagagaaatttggggttgttagagcagcataatccagcctatcctgactgattatccccacaggcatagaagggactaagttgctgttaaccgacggaagcagaattgtgaacccagaagggccattccctaggacatcttgacctcagtgatgtacattctccaaagactgtcctgaatctatctacttctcctaactccattccctacccctctgaccctccattccagactttctcctggatggttatgtcagggaggaaaagcttttcctctgccctcttagattcagcatctggggcctgcaaattaaactgacaaaagacaaattagcaagagaaacggagttgtatagctttctgttttttgtttgagatggagtcagtattgcacaggctggtcaggaactcttatggtcagaggatcctcccacctctgcctctcaagtacctgggactacaggctcacgccaccaccccgatagacatttttattcgtgtactaggaggttagaattgagagctcgtaaaccaacaaaaggttgggggaaagggcacttggggaaaacaaaggacttctaggaaagataatatgctagttttgtgacagtgtctgtttgcctgtggtgccatgtctggggatgagtcccttgtgctcccagggagggggcttatctctgtttcctcttattctctccagcccctttccatgcctgcccaaaaggttatattttattttattttgagaaaaggtctcactctgtggcccaggctgaagtgcagtggcaattagagctcactgtaacccaggagtcaagtgatcctcccgcctcaccccctgagcagctaggactacaggtacatgccaacatgcctggcttttattattgttttttttttaatttctcacagagaggagggtctcgctgtgttaaccacgctggtctgaagctcctggctttgtgtggcaaatgctcattttaaaatacaaatacaacctcagcctccactcctcttcttgttttagactttatgcacagcttcaaaggtcaaaacccaaattcaattcccaacactgtgtactaggtcctgcaagctgtgctctgccctgcccaggtctgccccagggccagctttcctggtactcatgaaccacctcccgctacccaggcggcccctacaggcacggttaattttcccattacaagttgtcagagtcccatggactctgataaggtggctgtggatgggactatagtaagacagtgaggaggtcaatgtcagtgcacatgtgtttgtatcattagtgacatgtgtgtttggtacatggtgaatatacagaacatttgctatgaatgaaacacccagctgccaggtgaggtgaggctttagggcagggcttccaaacttttactgtgccagggacacccttggcatctgcagaagatgaaggacccctggttagaaacatgcttttttctttttcttttcttttttttttggggggggggggaccatgttttgaatgcattacattaccaaaaaaattaatattgaaatgcaaaagtcaaaatataaaaacacggccatttgctcttttcctagactagctatggctgggcctggtcaagctttgggaggctgaggctgtggagttccaaccctcaaccttggaagagctgtcttggaggcaggcaggtccagagccccacgtgccatgggacctaaaccgagagcaagcctgggcctgggcactggagaacttccctgtgctgagccgccactcctgccaatgccatcagctctacgggagcactgctgcgagctggctgctgcactgcacctctactgggcacggagcccttcccggatatgagaggggccaaaaatggcctcgacacttccatgtccagaagtcaatggctgaaaccatagacgggctccagtcacctcaagaagacgcagatgctaccgatggtgaggtccaaagcggcctgaagcagcctggagatgccagcgcctgcggaggtggaagtacacacgcccagggcgccttctgcagtccaggcggcctccggaagctgctgaaaacctaggattccatcaggaaggaaccgctgaaaacctaggattccatcaggaaggaacccgaaaaggagaggaaccccagcctttctgcaggcctgcagtacgacccgcttcaactgctgccctggaaggagcccgaggcacccagtgggggccctcatgccgtgcctgcggacatttgcactggaactgtgccctgcatgcataacagccttgaggtctgtgcggtggagatcattccttaatctgttctttctctcctgagcgtcctaaacatttttcatttagaaaaactttcttcatggaggggtgggcgcggtggctcacgcctgtaatcccagcactttgggaggccgaggcgggcggatcaygargtcaggagatcgagaccatcctggctaacacggtgaaaccccgtctctactaaaaatacaaaaaatcagccgggcgtggtggcgggcgcctgtagtcccagctactcaggaggctgaggcaggagaatggtgtgaacccgggaggtggagcttgcagtgagccgagatggcgccactgcactccagcctgggcgacagagaaccgccgttcgcccatccgtccagaagtaaggaaaaggccatggagaccaagggggtggggtcacggtttcccctcccctccccctcagaagtccgaagataaataggcttagaaagagaggaaaaaaatttcttggtttgcatctcactcaccctttctcaagccccatgttgcacgccaaactgttgtaggactttctccttagttcagctaaaagccaggttcttgtgcagcggccatgagagattaatctcgcagacactttgaagagtgagaaaaatggaatttattgggcaagaaggaaaaaaagggaaacagggactctcagcaaagcgagagagagtcccgctagctggtttctcgcctcccagatagaatcccaagttccaccccgaacatgagaccaagctcctcccccctgcatagctcctccccctgcatagctcctccccctgcatgctcctccccctgcatagctcctccccctgcatagctcctccccctgcaaagctcctcccccctgcagagcttctgtggctctacccagttcttccagtgcttaggcaggtgtgggagtttctcctggacctctttttttttttgagacggagtctcgctctgtcgcccaggctggagtgcagtggtgcgatctcggctcactgaaagctccgcctcacaggttgaagctattctcctgcctcagcctcccgagtagctgggactacaggtgcccgccaccactcccggctaatttttagtagagacggggtttcaccgtgttagctaagatggyctcggtctcctgacctcgtgatccgcccgtctcggcctcccaaagcgggacccctttagacttggctgtctcacttggattacaggcgtaggccacagtgcccaactgagtcactttttttttttccttaaaaaaattgttggccygcagacacatgaaaaaatgctcagcatcactggccatcagagaaatgcaaatcaaaaccacattgagatagcatctcacaccagttagaatgccaatcattaaaaacccaggaaacaacaggtgctggagaggatgtggagaaataggaatgcttttacactgttggtgggactgtaaactagttcaaccattgtggaagtcagtgtagcgattcctcagggatctagaactagaaatgccatttgacccagcaatcccattactgggtatatacccaaaggattataaatcatgctgctataaagacacatgcacacgtatgtttattgcggcactattcacaatagcaaagacttggaaccaacccaaatgtccatcaatgatagactggattaagaaaatgtggcacatatacaccatggaatactatgcagccataaaaaagaatgagttcatgtcctttgtagggacacggatgaagctggaaaccattctgagcaaactatcacaaggacagaaaaccaaacaccgcatgttctcactcataggtgggaattgaacaatgagaacacttggacacagggtggggaacgtcacacactggggcctgtcgtggggtgggggaagaggggagggatagcattaggagatatatctaatgtaaatgatgagttaatgggtgcagcataccaaccgggcacatgtatacatatgtaacaaacctgcaaattgtgcacatgtaccctagaacttaaagtaaaataaaaaattaaaaaataaaaatttaaatttaaattaaaaaaaaattgttggcccggtgcgttggctcacgcctgtaatcccagcactctgaggggccaaagtgagcagatcacctgaggtcaggagttggagaccagcctggacaacatggtgaaaccccatctctactaaaaatacaaaaattaggctgggcgccgccggtggctcacacctgtaatcccagcactttgggaggctgaggcaggtggatcacctgaggtcaggagttcgaaaccagcctgaccaacatggtgaaaccccatctctactaaaaatataaaaattagccgggtgtggtagcacacgcctgtaatctcagctactcaggtggctgaggcaggagaatcgcttgaacccgggaagcggaggttgcagtgagcccagatcactcaactgcactccagcctgggccagggagcaagactccgtttcaaaaaaaaaaaaaaaaaaaaaaaagggccaggcgcagtggctcatgcctgtaatcccagcactttgggaggctgaagcaggtggatcacgaggtcaggagtttgagaccagcctgaccaacatggtgacaccctatctctactaaaaatacaaaaaaattagccgggcttggtgccgtgcacctgtaatcccagctactcaggaggatgaggcagcagaattgcttgtatccaggaggtggaagttgcagtaagccgagattctgccatcgcactccagcctgggcgacatagcgagactctgtctcaaaaaaaaaaaaaaaaaaaaaaaaaaaaattagccaggcgtggtggcgggcgcctataatcccagctactcgggaggctgaggcaggagaatcgcttgaacctgggaggctgaggttgcagtgagccgagatggtgccactgcactccaacctgggcgacagaccgagactccgtyttaaaaaaaaaaaaaaaaaaaaaggccggggtggtgactcacgcctgtaatcccagcattttgggaggccgaggcaggtagatcacgaggtcaggagatcgagaccatcctggctaacacggtgaaaccccgtctctaataaaaatacaaaaaatcagccgagcgtggtggtgggtgcctgtagtcccagctactcgggaggctgaggcaggagaatggggtgaaggtgggaggcggagcttgcagtgagcccagatagtgccactgcactccagcctgggcgacagagcaagactccgtctcaaaaaaaaaaataagataaactaaaaataaataaataaataaataaaattacaaaaaaatccaaaaaaatttgttttaaaatttttaatgagatgaggtgtcactatgttgcccaggctggtcttgaactgatgagctcaaatgatcctcctgccttagcctctcagagtgctgggattacaggcatgagccaccacacccggctaattttttgtattttttagtagagacggggtttcaccgtgttagccaggatggtctcgatctcctgacctcgtgattcgcctgcctcggcctcacaaagtgctgggattacaggcatgagccaccgcgcccggcctctgggtgactaagttttaacattaagtaactcattaacaatttctaaggccctttatgtcacaacctaagtgaaaagccattatcctttgccacaaatagaagacacctgtgaaaacacgacagtttcctctagaaggctcctataagtcccagtctctagttcggaaagttccaggagcactgagtggggagccctctcctttaacagggggcctcaggatccagcccacttcaacctctggctcggccacccccttcttggcatcaatctctctgtccagacccctcgaagctcccgattccactcagccccaggtgtgggccggggctgaactaggaagacaaagccgcattcaatctcagtctgagtccagcccctcgggcctcccccgggcgggtggggcagaggtccctgcagcctccaccaggaaccgggcccctaggtctgggaggtccaagccggcagcgggccaggcgctgcccaaagcctgcccagaggcggcgctgggccagtccctttataatttgcgcccttcctggttccacagaggattgaggaacgcctgaaattagaacgcaaatgggccgtgcgtggtggctcacgcctgtaatcccagcactttgtgaggccgaggcgggcggatcacaaggtcaggagttcgagaccagcctggccaatacggtgaaacctcgtgtctactaaaaatacaaaaattagccaggtgtggtggcggccgcctgtagtcccagctactcgggaggctggggcaggggaatcgcttgaacccgggaggcggagggtgcagtgagccgagattgcgccactgcactgcagcctgggcaacagagcgagactccgtctcaaaaacaaacaaacaaaaaacaacaaaaaacaacaacaacaaaaaaacaatgaaggcgtgggcccccatcaatatcgggctgggctgggcggggcgaggtggcccctacaccaccgggggcagggcccgttgctcccgttagcggcgckctcgggccgcccctgccccgggaagccggtacggttctgggctggtcactgctctgcatccacgagcatcggccctgataccgcctagaaaggcccatcgttcccgcctcccgggcccctgcgcgcctccgtccagaggcccagaggaagctcctgagcggggaagcgccctgggcggcagcgaaggcagcggtcgctcccggcttcaaccgcccagtcccccgcgccacccagagcccctcacgcccgggaaagagccccgagaacgtgcgaatggggtcggggtccgcgcgcggaggagatgttgctgagaagggtaccggggtcccggagcgccgcccccgccgcccgccccccgccccggctgcggtcgacctgcactcccactccagccttacctgaggccgactcgcacgagcccacgcggggctgcgggagccgatcgggatcccggccgccggcccccaccccaccccctcgcggcgccggcgacggcggtgctgcggcccctttaaatccgggccgccccgccctgcgccgtcgactccgcggcggccccagatccaggccccagatccaggccgggccgcggctctcgccgcccagcccagcccagcccggcccggcccggccctgccgcggaggcgaggccgccagtgtcccgcgcccctgatatctgcagtgagcctgatacctgcctctgcccttctgagcctgttcctcttccctgagtacagggcacaaagcttgcgccctgaggggcggccggcgcgctccctggcccggtccccgcccggccccgggccccccgcccctccccgacccggggccggggcccctgccgccgccgccgccgccttccgacccctgcgccccggccccggtcccccgggccatgcagcctcggccccgcgggcgcccgccgcgcacccgaggagatgaggctccgcaatggcaccttcctgacgctgctgctcttctgcctgtgcgccttcctctcgctgtcctggtacgcggcactcagcggccagaaaggtgagcgcgacccccgcccggcccgcacctggcgcacctgggcgtcggcggcgggagcgggcccggcggtggccgcggaaggcggccggaagccgacgcaggcgccccttccccgcccgggcggcgcgaggacgcccctcccaccctcccccacttgtttgctgctggagccgcggcgttctcctcgggcccgggccgcgcccgtgggtgctccggaccggactccgcgggcgcagctgtcccgacgctgagctggggacccgtggggttctcggagaggggcagagacccaaggtcacagaggtcccggaacgccagccacagccacctgggcaggagctggggcggcgtgagggacacaggcgcgagggcacccccccaccctgctgcctgctgccccgcgccggcctgggcgaccccggcgtgacacccggtcctgggactcccttcggcgcccagaacgcgtcggcagcatccggcctgtgggagggagggagggagggagggaggcgtcctgaggcagcccggcccctgctgccctgcgctcccgtgcggccccagcccgtcctccgcaccccgagcttcccgggctggcccccgccctccgcgtgcgcccagcgctcttgcaggcggagggtgcgggccgatccccccgcgccgccccgctggccggtcttggcgatggtggggccgagtagggcctgagccctcggaggcgctcttcccccggcctggaggttccgggagagtggcctcctgcctgcctgcctgctggaggcctaagcgggctgagtccagctgcccctcggcctccccgccacctgcttccctgtttccctgtcccggagcgccatcccagagaggctgcggaggagggcgagggaacctggacccttccggaccctccgagctccatctacccacgccgagctctgccagcacgcccgcctgccgcacttgttctgccagagcagaggcctgggctggccttggggctccagggccagagaggcatcacccagggactctgcggggagcctgcctgacacgggagggatggctgggcagaggccgtgctggcggggtatattatcaagggcaggcatggctggggcagaattctctgtaggtagggtgtgtcacctggggaaggacattctgggtccttggcagggtgactataaaagcacactggcatgaaggcctaggtggggccatatctgaagggctggggcatgctctttgagtcgtgggtagagccgtgagcccttgccctttgtcctgagccagtgtgtgcctcccgcagcagccacatgcccgcggattgatgtcaggagccacctctgcaagcctggcttaccacagggagccaggctccaggacagcagagtgagggagaggcactggctccatggcacccactgtgtctggggggcatccaggaggctggctctctgagggcctggggaacaggagagcaaagaaggggagcacttagattcacgagcccagcccctaggggatagaagcctaaggatcctgtgaggtatgagtatggggtgacataggcctcccttgtcgaggggctgtcactgtttctgtrgtgacccagtagtaccaggtctttggaggcctcaagagaagctgggaatctgggctcttatgtgaacccatctcgttgtcacatgtagaaaatctgtcttaaacccctggtgaaaccagacgtagccagtcggaggccagattggaacctggcctccactttgcagccagcgggggtccaggaacttgagggaaggacccagkaagtggaatctgcagggaaggaaggaggtgggcagggaaccagagaggaagggcagcaggtgtgggcatcatcctggaaacgcaaggtcaagcccaggacggcctcttagaccaacgcaaaatggaccctggagaagggtttggggcccaatttcctatctagcccgtgcagcagctctgccagcgctcaaactgtggccctcggtcaagcacctgctgaggatctgcccagggaggcagacccttgggggcagcccggggtctcagccatgcagcgctcccagccttcargctgtccgcctccccaggcctggacttcagcaatgatggacacccttactcctaggaggttgcagggtctggagaggaggcagacacctgccacacacatgcatggtgacagcagaccgttaacgggcctgatatctgcctmtgcccctctgagcctgtcccttttccctgagtacaaggcacaaaggttgtgccccagcttggctctttaatctttccccaaccaagagggaagcagggggaactgtggtttgtgggccccaggatgtcctaatgactcgcctccaggggagggtgacacagcctccaggcctcattgctgctgctcttaacaacgtggtcctgaggcaagaaagtgtggcaggggctcccaggctggtccctctcctcacctgagctgcctccccagctcccgagggttatagggtgccagcatggcttggcagagccctggcatagggcctggcccatggggaggcagtcacagagttggacccacagtcagagaagctgagggcaaggcgggtggaggagctggcaggcgggggaggctgcccagggccagggcctgcagtgtgtagggaaatgacagaagggttggtgtgggcgggagcccgtggggccctttatctcctggtaaacaggacccgggggagaggggaggcccctaggaaggaagcgagggtaaggcgcaggctgttgccagggtgattcaggcagcatcacccaccactgcccacccagcctgtccatctgaggcagtcgtgtgggacagagaaagccagggtggggctcgggggtgggggtgggcagtggctgtaagtaggcaagcggggactggcatctaggcaggagggaggcgcacctgcaggtgcaggtggctctgaacccattcctgatggctctctaggcctctgcacctccagtcccatccctgtgggcgagtgctgcctacacctggtgtcacccagcaatgggtgagccctggggatagccagctctgcattcaaggggttaggtttccagggtaaccgagcccctgagcccagcgtggagcctggcagagccrgtaatctgactcccctttccctcccgccasgggctgtccagaggctccgctttgcctcagcctttagccccagagaggcagggtgtggagggtgggggctggcttcttgggtaagagatgcctcagggaagatctacctggctccctgctccttaaacctttccctcctgcccaggtccaccccttcctcttccctggtcacttggcacttcgacctcctgcccgtttcggaaaggggtgtgccctgaggtgactgaactttgcctgatcatgaccttgatcatgcacagggctgctggtggggtgaggccatcccacgcaactctggggtctgtgaagccaccaaggatcaaggaatggaagagctgcctgagtgtagagggagttcggtcaggcttcttaaacttggagacttggaaacagaaggccttgtaggccacataggttttcagagactcgcctggcagaggcctggagcgtcctgctgcgtggactgtgggcaccsagccaccaggaggttgttgatctcattcttgctcactggtccctgccagactggtggtgcctctctactgtcgggcagccccacctctgtgstgccccatccacctacagccctcatgcctgggcccagctggaggttctgacaggggccccctggggtggcatgcggacccttcagggtgccccaggcgcagcacaggtctccagagacacaggcaccagggcgttcagagctagtcccctcgctgctgttgactgtscttgagcagccccagggccggtttctcaacctcatttgctcacctgagcaatgaagtgaggtgggctcctggaactgcagcagccaccccccggggccatcgtgaggctaagaatccagtgcagggtgagcaaccagcgaccgctacaaggacagtgaagagctagcaccaggaccttgggtagcccacccgctggagggagcgtgtgctgcaaaaagcaagagtgggctttggaggccaacggatggagcggattcagtctgaggctgttccagcccttgcttaggatccacctacctaggtctggaaatcgtatttccacttcagatgccttctcagaggataaaataacccccggtgggggagagtactggaagagggctaattcccctggttttctccccatgagcattagtgtcagtgtaattttagagtgaccccagctatgtcacgtgtggcaggcacaagaacagatgtcaatgagctattgcagaggtggacacccagatgtgtgcgctggcacactggaggggcccgtagggtggctctagaccgccccctcgtgacggcttgcctaccacctgcaggcgacgttgtggacgtttaccagcgggagttcctggcgctgcgcgatcggttgcacgcagctgagcaggagagcctcaagcgctccaaggagctcaacctggtgctggacgagatcaagagggccgtgtcagaaaggcaggcgctgcgagacggagacggcaatcgcacctggggccgcctaacaggtgaggtctggggcgggagggggaaaaggcgggggcgggctggttgtaggttccctggtctcagtcccgatccttcccgacccacccagaggacccccgattgaagccgtggaacggctcacaccggcacgtgctgcacctgcccaccgtcttccatcacytgccacacctgctggccaaggagagcagtctgcagcccgcggtgcgcgtgggccagggccgcaccggaggtatgggcgcagacagggaggagcacggggtggggggacgggtggcccccgcaccctttccagcgtcgggcctccgtcccccatagtgtcggtggtgatgggcatcccgagcgtgcggcgcgaggtgcactcgtacctgactgacactctgcactcgctcatctccgagctgagcccgcaggagaaggaggactcggtcatcgtggtgctgatcgccgaggcgagtgagccgggacgcggggttgggggacattcagaggagcccccgcggtgcagaactgacagcaggaaccattccgaggagaaagctgtcggaagttcagttgctagtttcattcgcaaatgctccgagatagaaagttgaaagggctttctggcaccctctacccctacccatcgcccccgccaccccctagtccttggccatgcgagtcccaaagggaaagggccgtctctgggggcccccttactccgccctcagcacagcaggctcactccctccacgtggggggcatctgaagcctgtgccccttctccaagcccttccaggccttttggggcagcagcagggctaagggagggtgcttggtctccccacagactgactcacagtacacttcggcagtgacagagaacatcaaggccttgtgagtactggcgaccccagagagctggtggcgggagagctyggtgcggggtgttgtgctggcaggttcctgcctccccatgagatagtgcctttcctatctcgtggggaggcagggacctggtgggggaggggtgggtgtgcaraagtggcccagcccctctggagctctgctacctcagttggctgggtgtagggggtggtggggggctggcactgggtgagcctcaagaaagggccacagtctggtgggctcggcccctctcakcccctggaggctgcatacggactaggccttcccgtcccccaggttccccacggagatccattctgggctcctggaggtcatctcaccctccccccacttctaccctgacttctcccgcctccgagagtcctttggggaccccaaggagagagtcaggtactakttactcccccataccctcagcaacccgcctgcctgtgctgagaacccatctactggtgtttgagtccagggtgtttccctgcagtgccctgaattctccatgggaggacccgtgcatgggggtggggggacasaarctgcccacccagcggcttctctgcggagccacaatggaggtggaggggtctgaamttctgaggccccgccccggcccacaggtggaggaccaaacagaacctcgattactgcttcctcatgatgtacgcgcastccaaaggcatctactacgtgcaggtcagccccaagccctgcgttgccctgccctgccctgcgccgccctgccctgcgatgggtctggtccatctgggtgcccttyctcagmcccagcccctctctgctcacctckcagctggaggatgacatcgtggccaagcccaactacctgagcaccatgaagaactytgcactgcagcagccttcagaggactggatgatcctggagttctcccagctgggcttcattggtgtgcccctccccttacctgacggtgcctttcagtcccacctgcctctgccatcctctctcccagtcccactgtgtccactgtgagcctttgcccaggtgggccctgcctggtgtgcgtgctacagccccacctggcctgttctcattgcctgtgcatcagacatgtctgccctcatcacctgtctgcctccctgccccgttatgcccacacctgcctgaagcctgcccctgggtttgctgtgggactcgggggccgctgcagggagaaaggaagtaggcagagcagcactgcccactcaggcccctccccaccaggtaagatgttcaagtcgctggacctgagcctgattgtagagttcattctcatgttctaccgggacaagcccatcgactggctcctggaccatattctgtgggtgaaagtctgcaacccygagaaggatgcggtgagcaagagctggcgggactggcaggggcagggccaaggggcaggcagcctccaccccaaactgtgtccctgtccttgcatctgctcacatagagcactgtcagctgtgggagggccctggtagtccccaggagaggccgtgttgaggaaggagggctaagccgagccctggggtgttgcccaccctccacagaagcactgtgaccggcagaaagccaacctgcggatccgcttcaaaccgtccctcttccagcacgtgggcactcactcctcgctggctggcaagatccagaaactgaaggtgggctgcactgcacgctctccctaggccgggatcaaggtcggggcccacgccatcactgctgtccctcctccgctgcaggacaaagactttggaaagcaggcgctgcggaaggagcatgtgaacccgccagcagaggtgagcacgagcctgaagacataccagcacttcaccctggagaaagcctacctgcgcgaggacttcttctgggccttcacccctgccgcgggggacttcatccgcttccgcttcttccaacctctaagactggagcggtcagtgccagcaccatgggtctgcgatgggggcggggctgggtggcccccagggtgtaggcttcaccggcaagttatcctcacgttcttcagtttccgcatctgaagtgggcctcgtaatggtagctaccttgtgaggactaagtcaggcagcccctasgagctcagggatgtttcctgtcaccatcctcccagaggaaggccctggtctctttgcacagcctgacagctgcctggggggccctcctggcgcaggcctggcctttctctgctgggccctgggtgctgtgctggaacgctgcccctgcagcagctcacaggcctgcctggctgcaggttcttcttccgcagtgggaacatcgagcacccggaggacaagctcttcaacacgtctgtggaggtgctgcccttcgacgtaagttcggtgggtgtggtgtgcactgaagcygggcctcctgtgaccacctgcctcagcccttgattctgcccccagaaccctcagtcagacaaggaggccctgcaggagggccgcaccgccaccctccggtaccctcggagccccgacggctacctccagatcggtgggtagggtttgggggagagygtgggctggggttcagggacaccctctcaccactgccctcccacaggctccttctacaagggagtggcagagggagaggtggacccagccttcggccctctggaagcactgcgcctctcgatccagacggactcccctgtgtgggtgattctgagcgaggtgaggctgggcagggccaggccaggcacggggagcagccagggagaccctggcggagctcagaggccctgctgaccctgggtccggctcttccagatcttcctgaaaaaggccgactaagctgcgggcttctgagggtaccctgtggccagccctgaagcccacatttctgggggtgtcgtcactgccgtccccggagggccagatacggccccgcccaaagggttctgcctggcgtcgggcttgggccggcctggggtccgccgctggcccggaggccctaggagctggtgctgcccccgcccgccgggccgcggaggaggcaggcggcccccacactgtgcctgaggcccggaaccgttcgcacccggcctgccccagtcaggccgttttagaagagcttttacttgggcgcccsccgtctctggcgcgaacactggaatgcatatactactttatgtgctgtgttttttattcttggatacatttgattttttcacgtaagtccacatatacttctataagagcgtgacttgtaataaagggttaatgaagtgtgtgcctcaaatgtgagcgccctgggcatctccctctgcccctgcggttggcttcatttggtctgtgccccaacatgccaactaagcctggcactgggcctccccagccagcatcagcagcgacctttccctgctaagtcaaggagccagcctggcctgcaggcgcggggtccagcccctggctgtgcagctgcagtgccacctcggcgccagcgtaccccccttcctaggatcaggccgcaaagtctgtcactggtgaaaccagctcagaatctgggaccacaatgcctatagcaggtcccccgaatgtctcccccatgtccaaggcctgcgatgaggccttcccttagctcctcaagctgaaggcatttcccagcctccttgttcccctccgtgtgtctcagcttggtcctcatcctgggtccccgacactcctctggcacattagggtctcccgctcacctcagggcctttgcacacactgttgcccctccttggaaagctctcctttctccgtttctcctgcatacttggctaaaagtcacttctttgtttctgtgggcctcccctggatccccaaggcttctggacatttccttgagaccgcctgtcactgactcacttcgttcccatggtgcccgcagctctgcggacctcggagggctgccctgaacacctacagttaacgagggggatccagtgctgaccaaaagaaaaacccctgccctcacctggggagagagccacaggctctatctagtgtcagctgtgaaggccaggggacgagggactgcggcggctgagagtcgagggaaggcccctgaggagggggaccggtgaggagaccgctgagcgctaggagggtgaaccccggcaggactgggcggccttgtgaccccgaggctgagtagggagtggggtaggaggtgaagaccggatccagtcccgccccagggggagggctcgttccttcgcagccactctcacgccgccactaggaagcccgccccgggctgcccggactcgggctgggcccctccaggctccgtagcccgcggtgcgccacccccgcggacccagagaacgcagcccgggtctcggtcactagaactttaatgatagagactaggatgcggaagcgagcgcccctccccggggcagctggaggctccggctcttctttcccggctccgtcggcccgggggccttggtctcaggcccacggcagcagcgtccggagccgtccgaggagcgcggcgcgcagcgcggccgggaggaagtgggcgagcaggccgagcgcagccagcgccaccagcagccagagggcgcgcgcgctcgcgtacagcggtgccagcctgcgggcggcggtcrgcggggaggtggcgcgaggaggcccgcttcttccccgccgcaaccctggccccacggggacttcctctggccgccgccagggctcgcccaccgaatccccaaaggcgctgggctccggcccgtcgcccgcccccagcttcggtcccgctccccaggagccccgcccgcccgcgatctttccccggccccgccccgctccccgcccggccctcacctgagctgcgcggagcgcgcgtagccctggaagtagcggaggcgcgcgaacaggtagaccaggccgcacagggccgccgcccctgcgagaggtacgcacgggcctggtgagcgccctgcgcgggtcccgggggtccagcgcgtgcgcccctgccccacaccccgaccttcatgaaagaagatgccggcgacccagagcgtggcgaggaacagcgggaagtactcgctgcagttcaccctgcggtgggcgggtgggatgagcgcgccggccgggatggtcctgcgacccggacccgcctggggctcgctccccgccccgcgccctcccgccgcgcctcactgggctcggtagacgcgctcgaactcgggtgggccggtggtgagcggcggcgacacgcggaaggccctgcgcgccgagatcacctgcagggagaagtaggctgggggaggagggggagcgggagtcaggtctggacacccgaagccccagagatgggagtgggagggatcctgcaatctggcccttcacttggccgtgtcctctcctccctaaggcggaaccccgccccctccccgcccgaggagacctctcgtctcacccatccctggcctgccctgtgtccctgacattcagcgaggagggcagggctgaagcctggggcgcagagaggccctgtcccaacctgtgagtgtatgggggagggtgagtgattcaggcacagggacacctgctccgcgagagagaccacttgagtccttgtttctgaatcatttcactctcaaaacacaggcaaatgcagctttcaggtccctggccaggaagtgcctcgggagtctgagggcagagctggctgcatcctcccaggtgcaaggaagcacactccctgtagctaacagtccctggtcacccacctaccagcgcccaccagcagggccctctgaccctgcctcaggccgggatcactaaagcctgcgtccctgtgcctccaaacctcagtttctctgttcctgcattccggtcccaggcctaaatctgacagacaccttctctcctgctcccaggaggttgcagctgggactctcctagcctaaccccaggaccccagggctggggtagttgcagagggtgggctggccctaaagtttctctgtgggcaggagcccttctcttggtcaggtgaggccaggccagaccacacacagaccagtgctggctgtgcgctccctccccagacmtcccgtcggaccatctccccctgagtcctgcagccctggcacctttggttctgggccctctgcagatgggtgtcacagggtggccatccagctcagtgcaggagcagctggaggtcaggctggcctgtctgttcagccccttcagagccccctccccaggctgtgccttatcctagcccacacactgtggagtagtggtgtctcttaggtggcaaggatatctggccaaggaatgtgtcctttagggccagtctgagaaaggcattaagcaggctctttttagggggctggaggaaggagtcccacctctaccctgctccacgtggtcccagtatggaggtgcctttgaagcagagccagggaatgggggccgcttgctgggacgcccagagaggggacagctggaaagagcagagatcagcttccccaagcccatggctatcctaccatttgtcctggcacccttgccacccccaagtcctacagctctcacagccaggtgccccccagttccctgaaagtccccaccctcttccagcttgggcctgggctggagtccccacctctgccctccacctgggcmtagggggcagagggcaagctgtagggatctaaggcccaccctcttcctagataggamccagcccaccttgcagcaggactcccaggagggtgacagcagccagtagagctacctcgtccttcatggtaccgtcggtgtggtggcacgggctgtgtgtgaaggcgagctggggaacgcttagccccgtctgctgctcagaggacggcccaggagaggaagagcagcctcggtgctctccccgccccatctcagtggagggggtgcacgggggtgtgaccataccacacagagccagggagccaggccaagccagcagggaggaaaccaaagtctgggcaggggagagcagctagctggagaccgcctcaccacttcctgcttgttcgtgccccttccttgcctagtcccgcgtggcagagcccaagctgtccatctgggtcagctccagctgtgggtgtgccccctgctgcaccaccccactttctccagggccttgcagacccccacatcatgctggagccagccccaggctcccggctaactcctccacccaccttatctgttccctgtccccatccaggctgttcctggcaacccctgccaaaccctcctctgcggaagcccttcccagtgcctttggcttcagaatggagtcccagcgcccccccagccacactgggccccacaagctctttctccttcaggaaacctcatgcctgccagccttagtcgttgtaggggttccatgcacaagggccaccctgccaggaggaaacctgtccaaggccccctgggtggcgggagggtcagcccttgtgggccatccctctcccaggcctctcttgggcctcccacaacagtcacctgctgtgtctttctgccccgcagccctcttgcctcaaggtaacaaccctccaccaccttcctagacggctgccctccccacactcaggccctgtggtctggacagtgctgactcctgccccttccaggcctgtgagatggacactgagccaaggctgactcaagatggtgagatgtagttctggaaacttccttaggactttgggacaggaaactcagagtggggagggggactacggcgggccaccctgaggacagagcccacgcagggccaggtggagaggaaaggtggcacccgaggactcctgcctggagttctgggtgtctccctygccccgcctggagcgcccccggccgcccccctcgccctgcctggagtgcccctggccgccagccttcccagttgggcctaacggtcacttcctcttttggcttgagtgggtttgcggtggcttttggtcagaagtggcaaagtccagactgacccagaagcacgggcaggagctgggggaggccacaggccgtgctgcaggggtcgggccgcatggttctgccctcgcacctggtccttccttgctgccccaagctcagctccagcctgaggctcggagcctgttgggctctctcagaatcccttcttcctcctctgggtatcgcccctgcccccggaaaccagatatgccccagctgggggctctgtgagctcctccagggcaggggccagggctcaggcccggcccctgctttagaccaagctgtgacagtcatcttggggctcagtgatggaggactgcctcctagatcccggacacagatgtagtgccagggagcgatggtggccgcgtcctcagactctgcccactcagcctccttcctccctgaaacctgccccacagggcctgcctgaagggtgggatgcagcccaccacgcaggggttgacgctggtgccagtgggctgtgcccagggtgtctgtgtgcaccacgcatacatacctgcatgccccttggtcagttgtcacacacccatgtctctgtgcttgtgggtgtccaagtgtcttcgtgagtccaggccctcctgtcagccaagctctcatttcctccaaggcctgaatgtcctcccgtcggagttcatcccctcagtccacagcaggaagccaaagcctaacatcagcagcttctgaggaagtcccttggcagatgtgcagggcagggacctgggtcttggccccgggagccctccccgggtctcttggttcccacctccctccctctgagcctgcccaggctgtcagggccctgcctgggctcaagccagctcaagctgacaggagggccagccaagcccccacccctgctcgggccacccagcttccatcttcctgtctagctctggaggcaccagcatcaggagggaagcgaaagctcctccctgagcctccacagagccctaaggagtctctgatgcccactcaccaggacctctgggcggcagaaaggccggcagaaccattgcacagagaagaaatcagaacttctgtggagtggatcataggcagtgcacaactcagaccctgagcttgaacaagaaagtttatttagaaattattttatatttgagacaggatcgtgctctgttgcccaggctggagtgcagtggctcaacatgcctcactgcatcctcaaactcccgggctcaagcaatcctcccacctcaagcctctcaagtagctgggaccacaggctctaattttttttttttttttccagagatggagtcttgctacgttgcaggctggtctcaaactcctgggctgaagtgatcctctgcctcagcctcccaaagtgctgggattacaggcatgagccaccatgcttggctgaaattattttagacttacaaaaaagttgcaaaaatctacagtctc

SEQ ID NO: 93239 - DNA, 37626 bp, Homo sapiens
taatttttttgtattattagtagagacaggatttcaccatggtggccttgctggtcttgaactcctgacctcaggtgatctgcctgccttggcctccgaaagtgctgggattacaggtgtgagccactgcgcctggccattttcttagttttatccatgaacttttctatttcaaataggttgggaattaatatctatggaagaggattcaactattcaggctttcaaaattgccccagtatcctggcaaaaattctaacctacatttagaggcatagagacaggttgtgtttttgttttgttttatttttgttcttaaacatttggggtatctaaggctgatttctgagaagtaaaaacatttggtaatgtgttgaagtatgtcacatcataaaagaagagcctgcaatgcattatattggttttgtttctgccttcattttccagggagtaaataaaccaagacttttatacacattactaaatttctaattataccttgggaaagaataacctttgagaggacatagttatctccccttgtctaagactaaaagacattggtttagtcactgatttcatgagatttctaaagactctttaaattaaaaaaaatatgtaagacacagggaatttttaaaatactgtattttatgaggttgggtgcagtggctcatgcctgtaatcccagcactttgggatgctgaggtgggtggatcacctaaggtcaggagttggagaccagcttggccaatgtggtgaaacgccatctttactaaaaatataaaaattagccaggtgtggtggcgtgcacctgtaatcccagctacttgggaggctgaggcaggagaatcacttgaatcacttgaacccaggaggcagaggttgcagtgagccaagatcatgccactgcactccagcctgggtgacagagtgagattctgtctcaaaaataaacaaattaataaaaataataaaattaaaatattgtattttaggccaagcacagtggctaatgcctgtaattccagtactttgggaggccaaggcaggtggatcacttgaggtcaggagctcaagatcagcctggccgacatgacaaaaccctatctctactaaaaatataaaaattggttaggcgcagtggcttatgcctgtaatcccagtactttgagaggccgaggcaggtggatcaggaggtcaggcgcaggcgttcaagaccagcctggccaacataatgaaatctcgtctctactaaaaatacaaaaaattagccaggcgtggttgcctgtgcctgtagtcctagctactcgggaggctgaggcaggagaatcacttgaacctgagaggcggaggttgcagtgagctgagattatgccactgcactccagcctggacgacagagtgatacaccgtctcaaaaaaaaaaaaaaaaaaaaaaacagaatatgtatctttctataaggcttcttgtacaatagcaatgaagtcagctttgatgagaatttatgattggtttatgttaaaacatgaaacacttcccaaatttgtgtcatcgttgcccaggagccatgctaatcttctctgtatcgttccaattatttatttattcttagtatattgctgccaaagacagcacgtgatgacaatttaatgtaattcacctaaatacttctgtagttttaaaaagggcaccgtaaaattattcaatattaaaatatcaaggaatatcaaactttttttttttttcttttgaggcagagtctcgctgtgtgtctcaggctggagtgcagtggcgctatctgggctcactgcaaactccgcctcccgggttcatgccattctcctgcctcagcttcccgagtagctgggactacaggcgcccgccacctcgcccagctaatttttttgtatttttagtagagacagggtttcaccgtgttagccaggatggtctcaatctcctgacctcgtgatccacccgccttggcctcccaaagtgctgggattacaggcgtgagccactgcacccggcctaggctacctacttttctttacccccaactataaccaccatctgtcatcaagattactgtgagaacaggccaggcgcggtggctcacacctctaatcccagtactttgggagcccgaggcgggtggatcacctgaggtcaggaatttgagaccagcctggccaacatggtaaaaccccatctctactaaaaatataaaaaaattagctgagtgtggtggtgggcgcctgtaatcccagctacttgggaggctaaggtaggagaattgcttgaacccaggaaacagaggttgcagcgagccaacacggtgtcactgcactccagcctggataacagagtgagacaacgtctcaaaaaaaaaaaaaaaagaaaagattagtgtgagaccaccttctatttggtctttctgactctagtcacatctgctcccacatggcccccagagtgatctttataaaatgcaaatattatcatgccacactcacctacttcactgatattttactgccctcaagctaaaccttttatcgcctggctccttctttctccatctttattatcccgtgctgcacctcctttcactatatgtcagcttgccaaataacctgcttttcttcaaattctcctcattctaattctttacacagactcccctatagccaccatctccacctgcctaatttaaggtctgaagcagtaattaggaataattttatagcacaaaatgcccatattaaaggagaagaaagatcacgaatcaatgatgtcaactttcactttaagaaactataaagaaaagagtaaatacaacctaaaataagcagaagaaagataatataaattaaaatggaaaccaatgaaatagaaaatagaaaacaataaggaaaatcagtgaaaccaaaagctggttctttgagaagaccaatataatttataaaccattagcctgactcatcattaaaaaagagagaagacaaaaattatcagtatcaataatgagaggtgacctcactacagactctaaagttatttaaagcatgagagaagaatattctcttagcacattcttgctgctataacaaaatagactgggttatttacaaagaacagaaatttatttcttacagttctggagactgggaagtccaagatcaaggtgctggcattcagtgtctggtgaggtccttcttgtcattaatacatctccacatggtagaaggcggaacatggaagggcatgggggatgaacgctgtgtgctcacatggtgatgagaatgaacccattccctcaaaccctttgtaagggccccagttccatccataacggctctaccctcgtgactttatcacctcctaaaagccccatctcttattactaccacattggcaattacgtttcaacatacaaattttgggagatattcagaccatagcaaatatcaccaaaaactgtatgtcaataaatttgacaacttatatgaaatggacaaattcccaccaactactgaaactcactgaagaagaaataacctgaatagccctatatctattacagagattaaatttatagttgattgatctttgatttttttttttttttttgagataaggtctcgctttgtcacccaggctgaatgcagtggtgtgatctcttctctagtaagtctatgcagaagcagaggaaaatgcatgttcaaattggtctgtaaacccagcataatagtgttaaatcacagctctggggataaaccagggagaagttcatttacatgaatgaatttccaaactagggtccgtttctatgattctttttttttttgagatggagtctcactatgtcgcccaggctggagtgcagtggcgcaatcccagctcactgcaacctccgcttccagggttcaagtgattctcctgcctcctcagcctcccaggtggctgggattacaggcacgcgccaccatgctcagctaattttgtatttttagtagagacaggatttcaccacgttggccaggctgatctggaactccccacctctcatgatccgcctgcctcagtctcccaaagtgctgggattacaggagtgagccactgtgcccggcctcatatctatgatttgacagacagcctctctacgcttacaacaaccaactgtggagatcttggatatagtcatggaagtatcatttctcatctctctccattctgaccctcaacacagtgctgtttgtacccataacaaaattgagtgaaaaatttagggataaagagaaaggagctttccaacttgataaagttctgttttgttgaatgaacttctatagctataccctaaatgctttcaaaaagaacattgttactttaatgtcacaagatatatgtgtgtttatacacatatacagacagcacttcaagagccttcttcctatctttgtatcaacaaaaggccagtgaaattgtgtttctcccaccactgagcaaatggggtcctcattcctctcagtttaacagtgtcataggaaacaagaagaaagatgagaactctgacttgtctttttgaagaacaggtctatctttaacatgatattaaggctgggcacggtggctcacacctgtaatcccagcactttgggaggccgaggtgggtggatcacttgaggtcggtcaggagtttgagaccagccaggccaacgtggtgaaaccctgtctctactaaaaatataaaaattagcagggagtggtggcgggcgcctgtggtcccacctacccgggaggctgagacagtagaatcacttgaacccaggaggcggaggttgcagtgagaggagatggcgccactgcattccagcttgggtgacagagcaagactcttgtctcaaaaaataaaataacatgataccgaactgtctggtggcccacattcatagcactctaataaatcagtgtgtacagttgcataatgttctgccctacaaaattgaccaggaaccatcagattaataggcattcaacaaaaaaattaagtatttttaattgctaaggtctgtgagttatcccttttttcttcctcacgtaataatctgcacacacgagaaaatattcctgaacttgagtttctattttttttcttttccctatttgccttctcaaactcccaggtgttaaaaaaaagtctcaaacttaatgcacattacaggcttcttttctgacatacaaaaatcgtcatcttaacctagttttcttctccaaagtggtcaagagggaaaacctcaagcttttattcagatctatgtaaaccactagattgcctatctggtatttccttttgcagaaaatcactagaaaactaaataagacgaggcaaagtttagacaagaatctgatggcttgtttctccgagatgcaaccttggagagaggcttccccagattctagtctggattcactttactgcatgctcttccccgctctctagctcaatactccggagagaaatgaaacttttatttgctcgagcagaaaaagaaattaagaaggccacgaacatgcagcggacttggagcccctttctagcaacaaacaggctcgtgctcctccgcccgcgttggtctccagcttcccagagccccggcgggttgcgaggaccgccctgctcgccactgctccccaccgctccggtaccgacacgtgttcttactgccaagttcggccgcaggatgctgagccgagccccgccccgctccacatttcccaggctccgcctctcctgccccgcccccggcaccgattgccaatagcgccccgaggcgtagccaggtcccgcactccccgtgcccggcccgccgcctttgttctcccccgctctccctcttggcctgtgcgctcccggcaaaccgagtggcagccgctgattggtggttgtggcgcagccaatcagaagggggcacctcacgttagggctcggagttttaaacgcgcagccgagggccgcgcgcagragtagggagggcctagggcggcggagccgactcgtmgcggccgaggcgcrcgcggtccgygccggcgtcagtctgggattggccggcccgcgacttcctccgccccctgccaatcgccggggacgacttccgtgggtttttccggctcycccgcgtcgctaaggagcgacgggctgtcggccagaccccgagttctcggtgcgctcagcggccgccgacgctaggaggccgcgctccgcccccgctaccatgaggccccggaaagccttcctgctcctgctgctcttggggctggtgcagctgctggccgtggcgggtgccgagggcccggacgagggtgagcggcaagcgcgccgcgggtcgggctgtgcttgcgggggctgcagagctgtgcgggggcctgggccctgcgaccccggcgggcgggcttccgcgcggtcagctccagaactagtgatgggcgccgagcccggggtaaacttggcggagttgaaggggcgggggcggtggctgtggcagtggcaggatcgatttggggttcccgggagaggaaggtggccggggtctcttgggctccgacgccctggaagacccctgtcacccgaggctgggagagggctgcagagcgccttttttgcagctgggtccttcgccttaatttacagattttcgtcaggtccaggctaactccaggcgaacgcgcccaggcagtgggaagggagagggagagccactggagagaaggggcgagggcgtgaagaaacaagtgcgagttctttggaacagcaagcattccttttcaaartgtggtctgtagatttggaaatgattaatccatagattctggagaaagggatggcttggtttgcacctttgagaaactagagataccattccttctgcatttagcatttactgtgtgccagtccctgtactgggttctgggaggaaaagattgtgagtgtggtccctgcccatgaagcgcgtactccagtaggaatagtaacaactacttcatggtccctgcatttttcttcgaagtgagctagctgcagacataagaactctgaagattaggaagtgctaattaaggaaaagttgttattcctagagaataaggcatccaggtactggtctttaccttcttcctctctgcccttacttttaatcactagctttttaaccttctgagtttgttctaatataaatatacactctttgataatgttagtgtgtagggaaatcgtgaactttatactctttcaaacagattgagtaacttctgcgtgggtcactgattcaaaaagagtctttgcccaaatagaaaaggaagtaaaaacccacactcggcgagaaaaacacctgccgaaaggaatccgatagcgggactgcttacaaattgtgtcttgagacctttacccaaatcatgtttgtttaaatagtgtttatttaaatacagatacccaaaatacactgaagcagaatgcaggggtgggccccggaatctgcgttttaagtcagttttcccttgagacatagaattaacttcgggaggcacagtgaaagttgaggaccagtgtgggtggaagatgctttttggaacatagcggaaaagcatatagcactgtcttggttttgatccagtgattctgtttttggggggattcttgagaggcctgggagagtggctttaggagctgttaggaycagcaagtttatccttccggtcagaggtctttaacacagaagagtccctgggaagcagttgctcctggggtgagcctaggaatcccaggggtcatcatggccaagggcaggcctcctgggacttctagctccgtttttttttttttttttcctagataaggttacgcaytgttgcccaggcttgagtgcactgtcctgatcatggcttacttaagcctcaaactcctgggctcatgggatcctcctgcctcagcctcccgaggagctgggactgtaggtgcttgccaacacgcctggctgttttttttttctggctctgtcgcccaggctggagtgcagtgacgcgatctcagctcaccacaacctctgcttcccgagttcaagtgattctcctttctccacctccctagtagctgggaccacaggcacgtgccaccacacccagctaattttttgtatttttcagtagagacggggtttcaccgtgttaaccgggatggtctcgatctcctgaccccgtgatccgcctgacttggcctcccaaagtgctgagattacaggagtgagccaccgtgcccagcctggctattttttttctttttttggtagagatggggtctcactatgttgcccaggctggcctcaagcaatcctccatccttaaactcccagtgtttgggattactggcgtgagccacggtgtgggcttaccttgaccctttctcatccctgagggcatccctcggccattcactgtcaaaacctgtcatagaytcactgataacttgtccaacagatttatttcaagtctgcactacctcacccctcaagtgtttcaagtctcgaggcttttttttttctttttgcttctgttacattttagatttagacagcacagtggtgtctaggtacttaaatgccctccttcccccaacatggttactaaatacaccctaagctctgatggtttaagcctccggttgcagggctttccgtgtctcagaaggtgcctgcactctacacatccttcatgctaaaacaggaaaggaaaatattctgatcctgtttgttgcctgcttttatgtggtattggtttgtttagatttaaaagtaagtagaaattcacctatttttcgtgctaaggaactgttaaactctcctcctcttttcattcctgagacataattattttcggagccataaaaatgtggaaactctaaatgattccaccaaaaactttgggcgtattgggaagaaaatctaatgtgacaatacagcatagcagttaagtggtcaggaccctccgctaagtagctttgtgatctttggacaggtgactcaagttcctgcatctcagtttcttcatctgtaagatacaatataacgtgtaatacagtctcccttaaggggtgaagtggtgtgtttaagagcccagcacagtgcctggtacatacaataaataccagctatcatggttaccgtagctgataacagttcttgtttctgtgtttaatacaaactcttcagtattggctgaatggtagagtttatgcagctgtttcaggcacttctctgggggagatgagagtgatcagctgaggacggagagtgaggacatcctaaaaggagctgcctgtgtctgagcaggacccagtgttgtcatcaggtgtgccccgtgggagtggacagggattgaggcaacctgctcaggtgagggtcccccacttcaggagaggccttagcatgtgggctgagcaatgtggagatgaacttgggaattcatttgtctcatgctgaggaaggttgcatcttttcagagggtgctgaaaggctctggacatatatatatatatatatttttttttttttttttttttgagatggagtttcactcttgttgtccaggctggagtgcaatggcgtcatctctcgagtagctgggattacaggcatgtgtcaccacgcccagctaattttgtatttttagtagagatggggtttctccatgttggtcaggctggtctcgaactcccgacctcaggagatccgcttgcctcggcctcccagagtgttggggttacaggcgtgagccatcacacctggccttttttttttttttttttttaaatgacagtcttgctcggtcgccaggctggagtgcagtggtgcgatctcagctcactgcaacctccacctcctgggttcaagcaattcccctgcctcagcctcccgagtggctgggattacaggtgtgtgccaccatgcctggctaacttttttctgtattttagtagagacagggtttcacgatgttggccaggagggtcttaatctcctgacctcgtgatctgcccgtctcagcctcccagaggagcacgtggattacaggcatgagccaccatgcccggccctggatgtattttctatcctagaatgtccacctttaaaaatgaagcccagtgaaaagtgttcccccactaaaatgtggactgttttgcttgcagggatgtgtgggtttctggtagatagaaggctagagctagcaccttcccaaattgcagaggaatcaatcctggcttgtctgtgagctggggaggaatggaaaggtaggggccttgagagtccttaattacatagggaatgtcctatcattttgtttattctttaaaaagataatgggattcttttttgttgttgttagtctcgctttgtcacgcaggctggggtgcaatggtgtgatctcggctcactgcatcctctgcttcctgggttcaagcaattctcctgcctcagcctctcaagtagctaagattacaggcatgcaccaacatgcccagctaatttttgtacttttagtaaagacggggttttgccatgttggccaggctggtctcaaactcctgacctcagatgatccaccctctttggcctcccaaagtgctgggattataggcgtgatccaccatgtctcgccaaaattcatttttttaaaagggtcaagaaagaagttgcctcttaggaatgctgtgtcccatggtgactagtcagctcccacttaatcatgagagctctgtcacattgtaatgttgagagcccacttgaggccgaccataggtaagaagacgtctttgttttttgtaaaattcaccctgtaaaggagttgtctatgtggtcatgttttaggcctcttcgctgcaaacgtcagtcttatgctgtgcaccgagccaattagtttcccttcctctcctagctgtgattcctacctggaagagttgattaagttccccagtgcattatttccgaccttcctccaatcttcccatccrtctgcttgcaagtaactttgactcctactgggcagagcagctaggtagtgagagtggatatggatggtcccaaagcactacttaactgccagccggggcccctggtggtctccctcagggaccacccaggatttaaaaaaaaatgtcaaaaatctcgattacttttgcaccaaccctaatacttgggcttagtcttaatgacatcagcacaagatgtgtatttcagcctcacacgattcattcaaagacacaggtaaatacagtgggcaagattttctaaatagcacagagcagaggatcttttcttttttctccctcttgggggtctagaatgatctgaaaagggagaccagaaaaccttgggaacactgggtttccctctgctccacagggagatgtcagcctggcccctgcctgtactgtcagacacacgcagtcccgagaccccaggggaggtgggcctgcgcccaggctgtctttctctgtgttctgccctccatgaacttctgacagtgcctagggagttcctggtgtggagggaggggtggcaggcaggaggctcatctcagatgggtgggtttgcttttggcattttagagctctttctccctcctccgacaaaagaggatcctaagccttaagttgaaacaggaatgtgcaagtcaggaaaagctgtgggatgtttaaaaggaagaggactgagtgcgggtgactagtgtgtgccagtgggctttcttgttggcttttttgtaaagtttgcagattggtacatgttgacagtgatgaacaaagctgcccccttctccctgcccggcacagacccaaggagtaggctggaggagcagagggcaggcacagccatgtggggtgggtgcaggctgcctccgtggctaggcagccacagagtccacgyggggttccttcatcagggttggtgagccccaggagttctgggatcccaggggcaggttttcagaccctgacctcatccacagcccaaaacagtaactagcagcgttcatttacctcctggaaaacacatctccagraaagaataattggccccggaaacattctggcttcagcgttaatgaaattgccgtgcttgctgtgcccagttcrgtttactggtgtgacagtagccagagaacctggttaataaaaatggcaattccatgttctttgtatctgtggtttggcaaaaaaaataaaataaaataagttgaaccttgaaaataaaatatacacaatttctcacattctaggaagaaaacttagcttccaagcaaaggtgtgatttttgatacatgttgaccccatcaatttctatatttgttatcctggaaattactcaggggtgcctttataagtaaaatgagatttcccgccctcttccccttcacacttgagccttttcctcaaggattataaaacctgaagggctattttttatgggtatgaggtaaaatgccaccccctttcagaaatggaattagtattccatcctctgcagtgaaaagattgagtacttgtttcctgttggtactcttttggggccaggcagataatttgttgatgggaggtgttactgaaggccctgcctgtggaaagcatacagggtgaggaggaggcggcacatcagtgagcaataacgttgaacacagacaagctagggcgagatcacgaaatgcggtgccctgaaatgcagagtgtgggatgtgggtaggggagcccgagctacaggagcgaggcccgggaagaccgcagagggtggtacaaggaagtagggaggaggtggccaatgcggaggctgtctgggctcagggcagggtttgcagagcaaggcagggggccgcgactctggaagggtagggtagtctgtgctgccctccaacttcccctgggacatttggactttatattctagagctgtggttttcaaatattatttagccatgacctccctctgaatgaaattttaagtagcaaacttagaacagctggcatgagggaggcctgatgtcaccagccaatgacgtggtgggcccccagggaccacccgggacttgacacattctgaagtgtatgaattttaggaaagtttttttttttttttttttttttgagatgaagtgtcactctgtcacccaggctggaatgcaatggcgcgatctcggctcactgtaacctccgcctcccaggttcaagcgattcttctgcctcagcctcccgagtagctgggactacaggcgcgtgccaccatgcccggctaatttttgtatttttagtagagattgggtttcaccatattggccaggctggtcttgaactcctgacctcgtgatccgcccacctcagcctcccaaagtgctgggattacaagtgtgagccaccgcgcccggccaggaaagttttaaggagagtcaccaccagctttgtaaccagtctgggtgttttccactcagattcttctaacagagaaaatgccattgaggatgaagaggaggaggaggaggaagatgatgatgaggaagaagacgacttggaagttaaggaagaaaatggagtcttggtcctaaatgatgcaaactttgataattttgtggctgacaaagacacagtgctgctggagttttatgctccatggtaaggwccgcgttctaatttctgcaggtggacaagcgctgtgctccattcgctcagcccttcacccggtcatccagaccttggggggtggggtaggagtgtctgggtgcaggaacttgcactctagctttaagaacgctgggagctcactcgttctaccactgtgcgttgaacggccagtgagccagccctcatggaaggcgatgtcttcttgtctcagtccagtgggttaaagatgaatacgtcctctgatggtcacagctgggggacgggcatttaacaagcggcaatgacacagagccctgtgttggtaacagacacgtccttgttatagattctgctccgacctgtctcaggccaccctgccttcctcttccctcaaaggctgttgctcaggcagctgccccaagtgcaggctgttggcctgtgtggtggattttttactacacacataggccctgcggggggaccagtcaggcatccccacttcttttcctgtctttactcctcctagtgcagaccgttagagctcttgtgtccctctcatcccttctcctctactgttttgaatctcatgacccctgctttgctcttctgtctcatgccctttctgtttcacttctgagaccaaataggatatactcacttttgtccagtgcctgagggtcaagcgtagcacaagtgttttatttaaaacatggaaataggccgggcatggtggctcacacctataatcccagcactttgggaggccaaggcgggcagatcacttgagaccaggagtttgagaccagcctggccaacatggtgaacccccatctctactaaaaatacaaaaattaggcatggtggttggcacgcacctgtagtcccggctattcgggaggctgaggcaggagaattgcttcaacctaggagggggaggctgcaactagctgaaattgtgccactgcactccagcctgggcgacagagcaagactctatgaggttatattattcctctttcataaattatcagatttcatactttttagttcaaagagaccttaacattcttaagaagtgaggacctcagagggctttttatatgggtcatgtttatcaatatttaccatatttgaagttaaaactgagaaattaaaaaaaattttttttgagacagattttcactcttttgcccaggttggaatgcaatggcatgatctctgatcactgcaacctccaccttctgggttcaagcaattcttgtgcctcagcctcctgagtagctgggattacaggcgcctgccaccaagcccagctaatttttgcattttcagtacagacagcgtttcactatgttggccaggctggtcttgaactcctgatctcaagtgatccgcccaccttggcctcccaaagtattttttgtaaagatggagtttcgccatactgcccaggctggtctcaaactcctgacctcaggtgatacacctgcctcagcctgccaaagtgctgggattacaggtgtgagccactgcacccggccatgtcaagctcttttaaactacattcgtgaaagtgcatttgcctattcatgagggatccacccttaagacctaaacccttcccactaggtcccatctcccaacactgccacactggggatcagatttcaacattttggtgtggacaaaccacatccaaaccaaagtggtatgtattattgttggatttaaatcccataggtacagttaacgttttttgcccttcctaatctaattgttaggtgtggacattgcaagcagtttgctccggaatatgaaaaaattgccaacatattaaaggataaagatcctcccattcctgttgccaagatcgatgcaacctcagcgtctgtgctggccagcaggtttgatgtgagtggctaccccaccatcaagatccttaagaaggggcaggctgtagactacgagggctccagaacccaggaaggtgagctggtacctgagctcgtagaggaagaactccttcccgcagggaatgggaatttggctaatagaggaagaaaagctgagggtaccagggactgactttctcaggaaccttagccctctggaatgtttatttgctcttggggtgggggtgggggggtaggaggggggagtagtggggtgggcagggtgggttggggcgtggcatctttacatttcagactctgaaactcaaaacatgggcaggagtgttaggaaatgggccagacatggtggctcacacctgtaaccccagcactttgggaggccaaggcagctggatcactttaggtcaggagttcaagaccagcctgaccaacatggtgaaaccccatctctactaaaaatacaacaattagctgggtgtagtggctcatgagtgtaatcccagctacttgggaggctgaggcaggataatcgcttgaacctacgaagcggaggttgcggtgagctgagattgtgccacttcactccagcctgggtgacagaatgagactctgtttcaaaaaataaataaacaggagtgtaaggaaatgacatcagaggtcacgggtcttggtggtggtctagagcactggttcttaatgtttagcaagcgtcagtcatctggagggcttgttcagcttgctgggccccagcgccagagtttctgattcagcacatttcaggccagatacagtacaagtcaggccagataatttgcatttcttttttattttttttttgagacttagtctcactctgttgcccaggctggagtgcagtggcatgatctcagctcactgcaacctccgcctcctgggttcaagcgattcttctgcctcaggctcctgagtagctgggactacaggcgcctgccaccacgtccagctaattttttgtatttttagtagagacggggtttcaccatgttagccaggatggtctcgatctcctgacctcgtgatccgcccgctttggcctcctaaagtgctgggattacaggcgtgaaccaccacgcccgcccaataatttgcatttcttacaagcatgcagggctgctgcatgctcaaaattgctgctggctcaaagccatgtgctgagaaccacaggtgcagagagccacatccagggattctctgaggatgtctgcaatctggcctgatggatccctgcctggctcacattagacactacatgcattttattaaatgaatgaacaaataaattatttgatttttatttaattttatttygataaaatgtatttaattttattttgataaaatgtattttattttgataaaatgtattttattttgataaaatgtatttaattttattttgataaaatgtatttaattttattttgataaaatgtatttaatttttgagacggagttttgcttctgtggcccaggctgcagtacgatggcgcaatctcagctcaccgcaacctccrcctcccggattcaagtgattctcctgcctcagcctccagagtagctgtgattacagggacacaccaccacgcccggctaatttttgtattttcagtagagacgrggtttctccatgttggtcaggctggtctcaaactcccaacctcaggtsatccgcccacctcggcctcccaaagtgctggaattataggcgtgagccactgtgcccggcctcttattttaataaaattatttaattttattgaatgaacatggtatcctttagcaagggcaaatctctctgaatcactggcagaaaaaaaaaaaaagatgcggctgcattttccattcccagtgtggagtagaggaaagagcgttgaataggcttccggtcctcatagacataagataggcctgtgttctggacgagtcccttgcccttgccaggccttggcatctcatctgtggagcatggtgtcagttggatgtaatctgagatcacatctctgaggtggtgtgagaggctctcctctgctcctttaagcaatggcactcactgtggcgtatacaaagagaatggatttgcttccgttgatatttagtgtcacagtttgttgactaggtaatacatttataaacttggtaattcagagaggtagattaatgaatagtctttcttccctgaacctgggtgatccagctcccctctaagaaggtactagtaggctgggcacggtggttcacgcctgtaatcccagcactttgggaggccaaggtcggtggatcacgaggtcaggagatcgagaccatcctggctaacatggttaaaccccatctctactaaaaatataaaaaattagctggatgtggtggcaggtggctggtgtgtggaggaggctgaggcaggagaatggcatgaacccgggaggcagaggttgcagtgagccgagatcgcgccactgcactccagcctgggcgacagcgagactctgtctcaaaaaaaaaaaaggtactagtgtaacaggtttcttctgtgtttggagatattttgtatgcataaaagcaggtgtgtgtgtgtatctgtctgagagagattttctcatttttacagttattagtatatgtcaaatactatcctgtaccttcatgtttttatttaacagatatgtcttagccatatccatacataaagaacttaatctaaaacaaattgaaagttgagtacttctttattttagatggagtcttcctctgtctcccaggctggagtgtgcagtggtgcaatcttggctcaccgaacagcctccacctccggggttcaagtgggttctcctgcctcagcctcccgagtagctggggttacaagcatgtgccaccacgcccggctaatttttgtatttttagtagagacagggtttcaccatgttggccaggctggtcttgaactcctgaccacccatgatccacccacctcggcctcccaaagttctgggattacaggcaagccaccacccctggcctaaaagttgagtacttctattgttgtgaagtaaacaggcatatgcgtttggaggtctgtggccaacatttgactgcaagagacttggctgttttgcaaactttagagcagtgtatgctatgttttgataaagaggcctcctatgtgttaagtgcctcaggacccctgggtgtggtctggggggcagggcacagacacttcatgctgcgaatgcgcagaggaggtgcttgtgcacgtttcagtttgaagactgcagctttgcaggagtggctgtagatttggctccttggtagattctgcagtggggaaaaagagtgacagtttgcaaccactcgtcctaagaactgcttggcacattttttgtacgaatttattgttccactccagccctggagtccatttctggagaatgaggccacagatgggcattttttaaaagccttctcaggtaatgccactgcaccttgagcaatgggagctactgctcctcttttaaatttttcctttttttttttttttttttgcatacatcttatgacgtatgtaatatagtaacattagatgtgaatgactaaatatgtatatattttgtatgtgttcaggagatgccccacaatgctatccataggcatatgtaatcaaaaccattgggagttggtgagggtttgcgtggagttagtaccatagcctgatggtaaaggaagtctcaaccatcagtaagtcttaggccctctggagaagtctgcaggctgtggaaatgcgatggacaattgttgggaaatagcgaaccttctgactcttggctgtgtccccaaaactgcagagatgcagccaggtttcaggaaatcagacacctcctgttcttgtgggccccgacacttgctttcttccccctcctcatctgcttctggagggaggtgaagtgcctgccagtttgggccttgtgtgctcagtcttgcttggtttctttcagaaattgttgccaaggtcagagaagtctcccagcccgactggaygcctccaccagaagtcacgcttgtgttgaccaaagagaactttgatgaagttgtgaatgatgcagatatcattctggtggagttttatgccccatggtaaggtggtgtcaggccctttccatattcagtaccctggtgggcactaggtgcggggtggcaggcccctgcccgtgaggcaggaacagcagaggagcaaggtgggcacgagttgtaggccaggattgaggctccaggtcttctggaagaagcgtggatgtaagagagctgttgggggagtgaatgtggaaggaactgccaagtagtccattcttgggtgggagaagggacccaaaggaaagaagatggcagaaagagaggtggtcggagtgggagcaagtacagtggctggtctgagctgcccagcttggggaactgaggtggctgcttcatggggaggggaggggagggacgcacaaccagttgcgtggataagctggcagcagtcagagtagagagcagagcggaagaagacggctctcaagggagaggggagcctggcttcaggagagaccatctgccttcccaggagacggcccagggtaccatctgtcttggtgattttgtggtgggtcagctgtggttctggttcttgagcagtcctggtatgtctgaccatcaggccaccaagaaccgcctcagatgggtgtgttctgtagggagtctgggagagtcagtaagcagaggaagcttttgggcctagaaccagcaggtggaggccatggctgatgcacaggccggggggtgggtggcaccttctgcactgtggggtcaggtttgggaccaggacacccttgttccaggcaatgcctggataagcccaaacctgaggccacagattctgcagcagaaacctgggagttgctggatgtgcagatgaaaagtgaagtcaggtgggtggttagagaaggaaatgatctgggagagaaggaaggaagcgtctgggacacgtggggcacccttctaacccccttgcgatgctggagagacacagacccttgtttcgctatgcatggggccctggcctgatgggtgggaggtgtgagagggagagtggcagctgcacatctaactggtgggttgctttgtggctcgctcaggagccaggttgagccgactgctgcacagtgcacgctcagcgagtgtagtgcgatttccctgaagtggttgatgatgcctcagaagataattatccatttattcacaaacagttttttggtcttttgatgtgtttttgtgtgtgtggtgggaggttgtttgttttttttgttttgttttcttaggtttcttttgagataaggccttgctttgtcacctgggctggagtacagtggcaccatcatagttcactacgccttgaactcctgggctcaattgtgctgcctcagcctccctagtagctgggaccacaggtgtgtgccaccacgcccagctaatataaaaaatatttttagagatgaggtcttgctatgttgccccrgttggtcttgaactcctggcctcaagcgaccctcccgcctcagcttctggaagcactgatattacaggaatgaactactgtgccagccaacaaatggttttgaagttgcaagatgcaccctttaattcatttgggtgtcctaaggactttgacaggatggtgttttatcttaactcaggactgagagcctcctgtgtgccaggccccagctgggtgtgggatgttggttcttttttgagacggagtcctgctctgttgcccaggctggagtgcagtggtgcgatcttggctcactgcaacctccgccccctgggttcaagcgatactcctgtctcagcctcccgagtagctgggattacaggcgcccaccaccatgcccagctagtttctgtatttttagtagagacggggtattgccatgttggccaggctggtctcaaactcctggcctcaggtgatccacctgcctcggcctcccaaagtgctgsgattacaggagtgagccactgcgcccggccagttcttgtgggcaatgggctgtgtgacgcaatactgactccaagggactctccctcatctcctccctgggtggtctgtgtcagtgagggtttgtgacgctcttctgttctccatgcctctgttcttgttacctggacctgccgaccctctcttcgccccacctcccgtgggctcctggctaattcctcgctgtcccttggatcctagctccactgctactcctcctctgaagccatctatgacttayatccttgctggcccccaactctccaaccaagaaagtcctcttgctcaggacagtgtctctcttggcctctccatgttttcccctgtgccgcagttactaatgtcctgtctgtgtcctgtacatgtgtgtacgcatgctccacccccagtgtgtgaatgctgtgggatgaagtttgtgtctgtccagcggtagcgccctcaacagcacctgagggcctgagggtctaggaggcrttcggaggcttactgggtgtggccaggttactagggagcacargatgggtttctgcagctcatttagctrgaaagtgagtccacactagaatgagcccctgacaaaccagtttcctcttggcaggtgtggacactgcaagaaacttgcccccgagtatgagaaggccgccaaggagctcagcaagcgttctcctccaattcccctggcaaaggtcgacgccacygcagaaacagacctggccaagaggtttgatgtctctggctatcccaccctgaaaattttccgcaaaggaaggccttatgactacaacggcccacgagaaaaatatggtatggccactcccttctctcccactacagtggggaagggaaactccctaacaggaagctgccattgaaggtgctgggggctggcaggcatgggccatgggaagtgggcagttcttagtgcccctgctyaggcgtgtgccctgctcccaggaatcgttgattacatgatygagcagtccgggcctccctccaaggagattctgaccctgaagcaggtccaggagttcctgaaggatggagacgatgtcatcatcatcggggtctttaagggggagagtgacccagcctaccagcaataccaggatgccggtgagttgtggccctctgggctgaacaaaatgtgcgtgccttgggccgtctgcggttgcctggtttttcagaaagctcctgggacatccattagggggtggtttgatgagccatctctgggaataagctttccattctggggttggagttggggctggggctggagatgggtcccctgtggccctcctggcctcggtgcaggggaggggcacagtcagaccggtcccagctccatgtctgccttccagagcccgaggagggcaggtcttcaggccataaggtgccggcctctgaatcaaaccagctttcaaggcctggctcttccagttattatcactgtgaccacaggtggtgactcagttagcctagtggtctcttgcccaaggtggtggtcttttctgagaggttattacactgagataatgtagatgaagagcttagcaatgtacttgataatgctaagtgtattataaatgctagtcttgctagcctgaggagtgaaatgactgtgaacagctgtcagcaatagtgttctgttggggtaggggcaggcagcagttgccccatcctgaaatccatcgtctgccttggtctggctcctgatgcctggggacaggtgtactcagggtcctggccatcctcattgatgtcttctgagtgctaccctctcccactacaccaaaaccagcttggctaagtgctaactgattataatttttcaaatgcacagcttgctacttagtgctaattctgtgctttacaataacaattgtgcataagtcaaatgcagattaatgtataaaaccagtagagctaaattcccttcatctgttaattaggtggccttgttattcacgcctaactagtcaggaagaaacttgcagaaggaaaccccaacccacccagggttatgggcagcaggggattccgtagccccaagtctgactgcaagttacgtgcattgatgtgcatgcaaatccccagggaatttgttaaaatgcaggttccagtgctgtgggtcccaggcaggcctggcaccacattcctaggagtcagtctgtgatttggcttgggcagggttagggctgcagatggggcaagagtcactgggcctgcttatgagagaggggttagccccagggacacaagatgttctacagataggttggcagggccggagcagagagggcggctgggggatgaaagggtctgtggtcctggggtgggcaggaggtgaagttcttgatgcgggtctgtctctgcctgaagccaactgactacaaatccccaggacacctggaggcttaaaacaggcgccatctagatagctgtagccttatttatttattttgagaccggatctcactctgcccaggctggactgcagtggtgtgatctcgactcactgcagccttgacctccccaggctcaggtgatttttccacctcagcctcccaagtagctgggactacaggtgagcgccaccacatccagctaattttttttgtggagacaagattttgccatgttgcccagctggtcttgaactcctgggctcaagtgatcctcctgcctcggcctcccacagtgctgggattacagacatgaaccacagcacccagcccgtgtggccttatttagtggattttaatgccyctgttttacagagaagggcctgtggctcggaaggttaataactaacaagtctaaagctacrcagttagtaggtcacaaacctatcatatgaatctaagtccatctgactctgaaagccacaggcttatccaggctgcccccscatcccctgccctcccaaaaacatggtttaccatctcagccacatgtgtcctataacccagctgagagtcacaaacctctagaccaagagcccttcaagggtagggtgacacccaatgtttaaatctcaaaatcagcccaggatgagtttggatgccttgaggaggagaatggagagggactgaaggtgcatttacctgtagaatctagggtaggggttgacactgtggcccacacacccattctggccatagcctgtctttgcatgtgacatctcattggaacacagctttgtccacaccctgtccagctgctttcacactgcagcagcagagttaagcagctgggacagaccacatggtccttagagccttaactactcactctctagtccttctcagaaagtttgcccagccctgtggtagggtgccctcagaccgtggggtttcatcatgcattttcacggatttaagtaaaagtatctttagccaaagaacttcattcggagctccagcccacaaacaggcagcccaccaacttgaggaagggagatttaaacctccacgaagggtgctgggtgtgaaaactccacatagggatataggactgtgtgctgctcatgtgggctccagaacattccccctgccaaagaatcagtgctgcttatagacatcagttgacagcagcttctggcaaattagctgtttttctgtgaacttttccgggttttttttgttgttgttgttatttattttatctttatagaaatggggtctcaccatgttgcccaggctggtcttaaactcttggggttggctgagcacagtggctcatgcctgtaatcccagcacttggggaggccaagacaggcgggtcacttgatgtcaggagttcgagaccagcctggccaacatggtgaaaccctgtctctactaaaattacataacatagccaggcatgatggcatatgcctrtagtcccagctacttgggaggctgaggcaggaaggagaattggcttgaacttggaaaacagagactgcagtgagccgaaatcacgccacttcactccagcctgggggacagagcaagaccccgtctcaaataaataataaatgaactaactcctgggcttaagcagtcctcctgcctcagcctcacaaagtgctgagattacaggcgtgagccactgtggccggccaggatttagacgttataccttgtaccaagtttttaaaaacgaacctcctttcaagtgtttaagttataggaattgtccacacaatttttggtggtgactttttttcttttctttttcttttttttttttctttttaaagacagtctcactctgtcgcccaggctgaaagtacacagtggcgtgatctcggctcactacaacgtccacctcacctccccagttcaagcaattcttgcgcctcagcctcccaagtagttgggactacaggcttgcatcaccacacccggctaatgtttgtgtttttagtagagacagggattcaccatgttggccaggctggtctcaaactcctaacctcaagtgatccacctgcctgggcttcccaaagtgtgctgggattacaggcgtgagccaccgcgcccagcctacagtggtcattttcagaacatttgctttggctgatgtgggtaacgaattaaatctcagacatttaggcaattttcaaaattacatcttattctgttaacgtttcagctaacaacctgagagaagattacaaatttcaccacactttcagcacagaaatagcaaagttcttgaaagtctcccaggggcagttggttgtaatgcagcctgagaaattccagtccaagtatgagccccggagccacatgatggacgtccaggtaagcgggcccctctgccatgccagcccyggacaccccgcaggcatgaggactctgctttgagccacctctgaggtttcaaacgtggaggtttcgctcttgtctgcagggtctggaactccttttccagcccgttctccccaccccacaggttttctgcaggcggcctgtggtctctctttgccggagggacagggctggggctcccgcacacctggcaggtcctggggctgggcagagctccacttggttttgccagaacagttgctgccaccctttgtccctcctggcaggcaatcaccagtctccctccagygcctgttccactgtgggtttggcctgggccagcacatggtgctccgttgaggccaagtcgtgtttrttcgggcagctccagctgggggctacagagggacagcatccctgtctgttcaccagagggagctgttgaccttggtgggtggattttgcctttctttccattactgcacccctgcacttcatcctcctagagtgtgacacactcagccctagaggggcagtgggagttcccagcccaaggggaacctggggccagttcagccttctgagtgctttagaaggggccctgcacttcggtgagtagatctcagatttggaaggatcttagatgtcgagtttgaagctttggtttaacagagattgggctgcagagaagtgagctctaccccccaccccagaccccacagctcctggtgggaagcagagctgagattggggtgaaggggcctttccaggtcctactggcccatagtgtcaggaccctggctgtttgggctgtgggctctcatgggacctggagcagggggtgtgacaggacaggaatcccgggggcctgcaccagaacatggcagtaccttggagagaaccaccctgaatctttctggtccccatgtcctctgtttccttcctcagtttttagtcctgtccctctttctcaaggtctgtgtgtccatcccatctgtttctctgccaacttgaagctcagggcaactctcctcttccctggactcatagtggctgctgcgacccctccccccagcttcacttcyttccatccagagataagatcctgggcccaaagaggggtcctgatgagcttggggggccattgatcccgagaatcggacacagctctgtgtgtgagtgcatattccaggaaaggggtctgtagctttcagtagacgcttcaagatctatgcagtcttgtctgttgggcacattgctgctgctcccagttcttctggcgtttccctgctgagtgaagtgcacgcagcgccatgtcatggttaaagactccacggcctcctgccacctgggagatagttggattatctgtgccttagcatggcctcccaggccctccttacccaccttttcagcacatcccaccctccagtgctgtcacgccagatcctgtttgtgcctcgtgccctgcctcagtctctgctgcctccctgagtgccttctgctcccttctcaccagcggggccctcttgtccttcagtgccacacaaggacccctccctgagtatcccatccccacggaaacccttgggctcacaggcccacccaccacttgctggctgcgcagccttgggcaggtggctgaccttgctctgcccacccctggagggcgatgtctgtgagggactccagtcgttgtgaagtgtgagccctcaggacctcctgcgtgaagaccgcacaagctgaaggtggaaagttccacacagcccagcccgtgataacccttcctgtctgccaagagccaggcctaccttgagtggtctctttgtggggttagtgagcctacacccccaaggaaagggccaaggtgtttgccttttcccaagaagccacctacggttcactggagggaaaggagccccaaaagacggtagggaatgactgggctgtgcttgagtggggtcgagccctggggtgttttgcctcctaagactgatccccttcaaagtcgccactcccccaaagtccctcaaacattgtactcaagaacaatggtggggagatggtgggccccctcacctgttccctctttgaagcagggctccacccaggactcggccatcaaggacttcgtgctgaagtacgccctgcccctggttggccaccgcaaggtgtcaaacgatgctaagcgctacaccaggcgccccctggtggtcgtctactacagtgtggacttcagctttgattacagagctggtgagggacccccaccaagacctgcgggggtggggggtggggggactcgttctttcaggcaaggtggagtgttgaggggaggtgtggctgtatgtacatggctcactcagaaatcccagcctggggcccttgcacgttggtggctcaggtatattttttaattgatggcttccctttttagcaggatgggagcttagattcaggtgcagaaccctcttagagttgacgtagctgagacttggaggagttcagaggctgcagagctgggactagaccagccctggccccaggcaggcgtggccgtgccacctgggcacaggtcttaagggcctgttgggcttgcagctgtggcccccgtgacaagtggggcttttccagaaacatgtttccctccaattgaggtaaatccagggtttgagcattgtcagaatattagcgacaggacctgaagcctgacctcagagtctgagctgggacttgctctgtgtggccgcctggcttatggcccttggtccctttcagcaactcagttttggcggagcaaagtcctagaggtggccaaggacttccctgagtacacctttgccattgcggacgaagaggactatgctggggaggtgaaggacytggggctcagcgagagtggggaggatgtcaatgccgccatcctggacgagagtgggaagaagttcgccatggagccagaggagtttgactctgacaccctccgcgagtttgtcactgctttcaaaaaaggtgagcccgtggctggggctggggtctcccatcagctgctgtgctcctcgtgcggaatccagacaggccaggggcgtctggtgctctggccacgggcacgacacccccttaagtcagccagcagtcctctctcacccccgagggactctgacttctcgtccagagaaatgtcgggtgtgaccccaaactccaaggcaccagaatagcttagaagaaggatttgcaagtgttactattttcttcttggcagttctcccagtgtttactttgaaagcaaaagcaagattcggagtccatctcagggcttacctagcatcactcagcggccttagcacatttccagcgctgatgtgctaaaattccagactagggccggggtgtgcagagggggcatctgaagatggagcccagacagggcaaagtctgggtgtgctgaacaccccttgtggcttcagagcctgactcagagcctcttcaccctcggccaccttgctgtacagctttaaacagagcctgttgatcttggctgagcacatggccccaggcccccagcgctggccacattttgtgggcaggccatgctgttccgatgtctgtgggttgtcctggcacctcccccccatggctcccgggccctcagtgccagtgcttacgggaactcctctgcctgggcagtgactcttgtgatggcctctctgacaggacccgatggcccattaggtctgggctggagccacctgcaacctctctggcctttgcaaggacagagagtagagagtagcagctactactttctacagtagtgggctcttcytgtgtgactggcccgtctggtggccacaccaacctcactgcctggtccagagagagcccccagaatctttggcctttgcagcactgacgccccctcccgccttgctttccttggcaggaaaactgaagccagtcatcaaatcccagccagtgcccaagaacaacaagggacccrtcaaggtcgtggtgggaaagacctttgactccattgtgatggaccccaagaaggacgtcctcatcgagttctacgcgccatggtgcgggcactgcaagcagctagagcccgtgtacaacagcctggccaagaagtacaagggccaaaagggcctggtcatcgccaagatggacgccactgccaacgacgtccccagcgaccgctataaggtggagggcttccccaccatctacttcgccmccagtggggacaaaaagaacccagttaaatttgagggtggagacagagatctggagcatttgagcaagtttatagaagaacatgccacaaaactgagcaggaccaaggaagagctttgaaggcctgaggtctgcggaaggtgggaggaggcagacrccctgcgtggcccatggtcggggcgtccacgccgaggccggcaacaaacgacagtatctcggattcctttttttttttttttaattttttatactttggtgtttcacttcatgctctgaatactgaataaccatgaatgactgaatagtttagtccagatttttacagaggatacatctatttttatcattatttggggtttgaaaaatttttttttacaccttctaatttctttatttctcaaagcagataattcttctgtgtgaaaatgttttctttttttaatttaaggtttaaaattcctttkccaaatcatgttgattttgctctttgctttttcgttgtctgagaaattgttggcgtagatttggcttctggtatgtgtttctgattgcttcctgttgagcacaaagtgagagctgccactgagcagccctgccaggggtgctgtttcaggctgggcatcsccaggcggcctccctgcaaaccaagggctgggggcaaaggggcatgatccagggtcccccagggtgggctcagctccagggagaggccacccacgtggcagccccacctcttgagagcccccagtgccggagcagaaaggaccctggacccagaggcagatactgcggggtggtagaaaaggtagagtaggctgtggcaatggaataaaacacgattaaaaacgttaagaactgcgttagaaaacatctgatctgtgctgctgggagcctcggggtggggcaggagctggatgtagctaagccctgcagaggcctggcagtagcccccacctccttccagacacaggtgggtggagatcatcctgacctaggctgaggagcttcagaggtctcccctcagcgcttctcctggggtggcggctccgctggaccggcgcttgtgtagaggtggttctgtgccataagggttccagggcatttgagtaagacctgggcttcatttcatcacaggcttgttcgagatgagccatcaccgtcctcaccccgcgcctcccccgtcactcagctgctcccaattgtggctgaagagtggcaagggtgaaaccttgcgctgacggcagctcctgcagcagtgacacgtgtgtgttgggggtggtgggggcaggaggcattgggtctcccaggaaggggcagccttggtggacttacccaattatccgctgtaaagttaagcctggccagggcaggctgggagatgatccgctgtagagttaagcctggccagggcaggctgggagttgtgggtgggccgtgctctgtaagttccctgtgtgatgagaagtctctgcacccacccccatccccacccccaaccatcgtgccctccctcacatcaggagagcaggtggccctcagtcctgggatgggccctttcttcaaggcccttcccctcaacactggcgaaaagcttggagttgtgacctggggtagggcagcggttaaggctgtttccggaagcagaagtccattcgttcagcgctctaccatgagaacaaagtgattcctgtcctggtagggctcccatgggttcaaagggccctgaggaagacagcccctctctggggaggagcagcagtgtgacctcacttcgtgtaggtgtcagggaagccctgctctgaagtgacatctaagccaagaccctcgggagaagttggcttgagctgatggcaaaaaaggagtgtccagggacctgcagctttggtatcactgggatgtctgtcagaactgtagagtctcaggctgggccccggtcctactgaattattctgcgtataagaagatcccaggagggtcacaggcatattgaagtctgggaaataccaggagtaaatgttccaggcttggggccagcatgtgcaaaggccctgaggcaaaaatcaaaatgtttcctctttggaaatagtctggaagtcaggtagcccaagagtgtcttaactgagtcagctccctctacattgcctgcaaaaggcgggaccactgaaggaatttaccctggacctgtgagggacctcagaaaggagacgggcaagtaggttgatgacagcccagcgtgatcggtgccacgatgaaggtatgtacggggccatgggaacccaagaggggactgtcccagctgcaggcctggagaggccgactcaggagctgggaggaggaggaggaggaagcaaacttccctccttccccttcaccagccacggagcactgtgcaaggaggctgggttgctgagggtaggagaggcagggccaggttggggggcctgcattcaggagcttgacctttatgttagtttgcagggaaccattgatggtttccagcagggaggtgatgtgatgagattgagattgatgacgagtaacagttaacatttatctcgccttaagcaaaagccagaacccatgttgagcattgccagattgtctcattaagtgacctgtgaggtaggttcttgcgttcattttacagctagaaaggagggggatgtggggctgagtagcaaacagagtggggatgtgagcgcaggccactctcaatgctgtggcacctccctcaggagcaagggagcgagggtgggctgcattgtgggtggccagtgggtctcagggataagggggcaggatctccagggctctgagactgatcagatgctgagggtgggtgagtggacccaagaagacggataagatgcccaggtttctgaatgaagggttttgtcacttatgaaacttttcagcatatgcaaaagtaaagagactaggataatacacaccctttactcatcacccacctaaaacaaaatgttgctccatgtttaaacctgtgcctatcccaccctgcccgccccttttttttttttgaggatatgatggaggaaggacaggtcttgcctgtctaggtcatatcacctctgcctcatagaaaaggaagcagaggtcagatagtaaagaatttcccccagagccacagggtgggtaaactgggaagctggagcggaactcagaacaggtgtccttcagtgcatcagcagctcctagaacgtgttgaagccttctgaaggaggttagtatgcactccactagagtagaatctgtgagttacttggcttgggaaataatggagctcaaacaaataaaacttccgtggggttcttgggtgaagagcctctcagagcctgtagccccggcaggccaggcctccctccaggagatggataggacctttgacttcaaggtccctggctttgactacacatcccacagatccacgagttcccgaatgatcagctctcctaacacgtaagtctcgtcagctgagtctgtcttctgagcacacacctgcccttggaaggaccaaggcatcccctgtcaaggtgggccagccctagggtaagggctgtgagctaggaagggctccaggagccccatggacaaatctgaccctccaggccaccaggtgcacaacctcagaccctacccggtgcagcaaagggattaaactcgagtggacatgattgattatttgattcctactataatgaattaaagaggtacactcatgcactgagtaatgacatttctgtcaatgatggaccacatttatgacagtggtcccataaaattatagcggagctgaaaaatttctttcacttagtgatgatgtagccttcataacgtcatagcaaaattaccgtattttttttatttatttttctttgagacggagtctcgctctgtcgcctaggctggagtgcagtgatgcattctcagctcactgcaagctccgcctcccgggttcaagcaattattctgcctcagcctctcgagtagctgggactacaggtgcgtgctaccatgcccggctaatttttgtgtttttatcagagatggggtttcaccatattggccaggctggtcttgaactcctgacctcaggtgatcctcctgcctcagcctcccaaagtgctgggattacaggcatgaaccaccacggctggccgctaccgtattttaaaaataaatgtagcgtggcctaagcttgcggtgcttataaagtctacagtcgtggacggtaaactctgaggccttcacattcactcaccactcactgactcacccagaacaacttccagtccgacaagctccattcatagaaagtactctttataggcatactgttttaatcttttacaccatattcttactgtacattttctatgcatagatacacaaatgcttacaatagcacaagtgcatgctgtacaggtttgtagcctaggagcgatacactataccgtacagccagggtgtatagtgggctgtaccatcagggtctgtggaaatgcactctgatattcacacaatgccagaatcgcctaacaatgcatttctcagtacatgttcctgttactaagtgacatgactgtatttaatgtttattcagtattcagtatagtttttagtacttagtgtttttaaatcttgcagaaagcttgggaagcaaaagtgagaggtagggccgggcgcggtggttcatgcctgtaatcccagcactgtgggaggctaaggttaggcagatcacctcaggtcagtagttcgagaccagcctggccaacatggtgaaaccctgtctctactacaaatacaaaaattagcccggtgaggtgacgggcgcctgtaatctcagctacccaggaggctgaggcaggagaatcgctggaacctgggaggtagaggctgcagtaagccgagattgacccactgcactccagtctgggtgatagagtgaggctccgtctcaaaaaaaaaaaaaatagaggtggaacggggaggccgcccagggccagctcatagtaactgcacaccttttgaatgagtaaatggagaactgtagattcttgggaagcccaggcttgaggggccagatatggaaggggctctcttacctaagccagagcctcccgtcagccacaccactcgctccacactcttttcactcggctcagcacaaggcaagatgagcacagctcttgaattcaacgtgttctcatcttagattacagagagactgtggaagagggaggaggacaaaggacctctagttcaaaagtaaaaactgagaagtttttcttttctttcttttttttttttttcaagacagtctcgctctgtcatccaaggctggagtgtagtggcacaatctcaggtcactgcaacttccatttcccaggttcaagcaattctcgtgcctcagcgtagctgggattactggcatgccccaccatgcctggctaattttttttgtatttttagtagacagtttcaccatgttgaccaggctggtctcgaactcctgacctcaaatgatccgcctgccttggcctcccaaagtgctggggttacagacgtgagccagaaggggattttttagaaaacagcttggagaaggagtcgtgggaaaggagtcaatttttttttttttttttaattttttgagacagggtctcactctgtccccctggctggagtgcagtggcacaatcatggctcactgcagccttggcctcccaggctcaggtaatcctcccacttcagcctcccaagtaaactgggactacaggtgtgcactaccacacccagctaagtttttgtgtgtgtgtttttttttttttttgtagagatgagatctcactatgttgcctagactggtctcaaacacctgggctcaagtgatccgcctgccttggcctcccaaagtgctgagattacaaatgtgagccaccattcccattcccttctatctattctttctggcttttctcatctattaacagcaagtgtaggctcagatcaggttgaattgaaaacatgcctttgaatcctccctcctcaatctgctacaaaagtctcctacttggaactcatggacagttgggttcgctggaggccagaggttgaaacctccagtgttcaagggacctggcaggcaaggttaagtgcggcaaggggtgatggggagtggtggcgacccgggtgcacttgaggtcctctgtcctgcctgaagtgggtgctgctgcttggccccaggcacttgttgcaggtgggaatctgagcctgctgttactctttggtttttcaagaaaagccaggcatttttatgtgaaatcacccaatttttaagtgtcagatctaactcaaatggtcttatcaacactggataggccaaagaaaggcacttaagggctgtatttagttagagacatctgatctaagtcaacatcaccctttttttttcctcatagtattaaaaccccaagaaacaaaccagcacacaggatcccccgattgtaacaaaggtttaaaaatggaggagttcccttagaaaagctgaagattccaatctggagctgcagttgaggctgcagtcagggttgtttggctggattactgagtgcacggcataaatgcttcaaccgcattggaacacaagaatggtcccttccttgcccagggatcagcgctcatgccatgggtcgtcttgacacagtgcctggaggagctgtcctgctcagaagcctccccattctctgacctcttagtagcataccccatagagaccatagagacctgctacacctcgtgcttggcagccacttctttttttttctagacagagtctcactctg

SEQ ID NO: 93240 - DNA, 32182 bp, Homo sapiens
agtcatggtggcattttatgaagcatttaggaggcctaatcaccttaaattgtacaacatgtctggcatgaattccttttcataaattttttcacaacttacacagactatgtgtgacatgtttagactttctgacttgccctaaacatccctctttttaaacaaccagtcattttactttaggacaagaatttaccatacaacatcctttcttaatgaaatctattttctttatagcctttgtatagctagggggcatggctaattccatatatccccaggccttatttagaatttaatgtctccaaaataaattgaacaattttcaaaagtcaaagcagtttatgaccttgaagcatatagcaaagctaatatctgacctgcataatttagacaaaatgtctttatcaataatatttaaagttgtttttatttcccaaagattactaaagttacatgaaccaagaggcattacagtttttattttgctttcaaaatatttaagtgcttatttttgtttaagccaattaatttgagctcttttatataaacattacacacaatacatatataattagacagacaggcagaagaagattactatagtagttgtaagatttttcttttgccagtttttaagtttcttaattggttattggctttatggtggagtccttggaggaacagggccaggaaaagggtttctggtgcctcctgtttttcccatggattccaggccattagagcctgaatattcattttttaattaacctgacttttaagcatagcactctttaataaagtccttttaaatttcttattactgattttacccaggccaaatggctgatatttctggcttttgaactttaccaaaggtaacttcctaggtgctcgaggaaggaaaatttaagatagtctgtggaggagaagagactagagaaggttatgcagatattaaatcagaaatgacttacttcctaagcagggaatggaactggaaccgccagtgtgaaaggccagtgagccacagcacagagcagtctactgcccttcccagaaggagtctagagtagttaattttgagcttgcagaggcttttaatgactcaggataatttttagagctaactatggcataaaccctaaaatccctgttccctagaaggtggagaccaagagaaagtactgccacgtggttacgaggtcaagttcccaaggacataaaacaagatggagaccccatccagttttttttttgtgtttcagggacctgcaggaaagtttgttattgaccagcgagcttgtggggtcctaagcccgtgttttatcctaaggtaccccttgacccagaaaaacgaattcatagcacaaatacatcagtttaagactaacctcagaattttttttgcattaatcaaaaccttagagaagagataaataaacagtgatttttaccattcattcaaccatttgcacagagagagagaagccaaaaatctgactggtaagaaattcttactcttttgctggcatgccagccttctgggttccctttccctcagcggccccagtgacccagcttgccacaccatcacactgggggccaagccgcatcataaaggaaaaattttttgttgttgttccggccagagcaaaatacatgtgataaaacacagacattagccactctgcttagcactcaatatcaaactggcaaggtttatatttgccctcagatgggccccgttatctttaatccaatgtctgactaggggtttcaacacgtgatctctgggcaagctggttgccctgagtaatagaaaagataaaaaagggaaaggaaagagagatccgagagggagcttacctgtgatccccagctgctgtgagagatcaatagacacaagtggatcctgcaggtaccttgcatgttcactcagtgctcctgggggtcgctagaagctccactttagatcccattcctgacaccatctgataaaagaaaaactttggctgaattaagtttgaaggagtttaattgagcaatgaatgattcgcaaatcgggcaactcccagaatcacagcagattcacagagactccaggggtgactcgtgatcagaacaaatttatagacaaaaaggtaaactaacgtacagcaataggaagtgaggtacagaaacagcgagattggttaaagctcagtgtttgccttatttgaatgcaatttgaacattcggcagtctatgagttgttgaagtatggccgctgggattggccaacattcagctattgttacaggtatatactattaagttaagttttcaaatttgtctgactataaagctaggttatagttcatccacaaggactcaaatatagaagtacaaagcccttctcaggccatatttagtttgctttaacactgtgacagactgtactaagcactttcaattcatggagccacttcatcaaccctatggcataaatagccccataacatcctcatacaaacaaaactgaagtttatggagaggttaacttgctcaagattttacagataaggaatggaaggatcagcatttgaacccagactccttaacctgccctgtgtgtagcgccaaatctcttaactgctttctacaagaaatctgcaaacaaaatactactgggttcagactaatgctatagctacagaggtagtgtgacagtgacataaatgtatgaaaccaatgaaacagaatagagagaccaaaaccagaaaacacatatatggacacttgatttatgacaaagaggtgaaacagaggagtgaggaaaagataatgctttcaatcaatggtgctgggtcaattgtatatccatatagaaaaaaatgaaacttggctcctacctcataccatacaccaagataagttctagatgcattgcagatctatatgataaaaacaaaacagaattatagagctgcaatattgagatgtccaataatgtctgtccaacactgacatgttctgtaagagagaaaatgcatatgttggactacattaaaattagaaactttccagtgttatattctgtccaggatatataaggaactttacaaataagaaaacatagccaaatagaaaaataggtagaagatttgaacacaaaaaggtatcacaaagaggatatctaaatggcacacatatggaaaaagaattcaacttcattagtcattagttgttagtgaaattactactgagatattgttatagaggcttcaggattccttaaatgaaaaagactagcaatactaagagttggcttggaagcagagcaacagcaattctcacaggctgctggtgcatacataaattgctacagccactggccaggcgtggtggctcatgcctgtaatcccagcactttgggaggccaaggtgggcagatcacaaggtcaagagattgagaccatcctggccaacatggtgaaaccctgtctctattaaaaatacaaaaattagctgggtgtggtggcatgcgcctgtagtcccagctactcgggaggctgaggcaggagaatcgcttgaacccacgaggtggaggttacagtgagctgagattgtgccactgcactccagcctggcgacagagtgagattgtgtctcaaaaaaaaacaaaaaattgctacagccactttgcaacagtctagtgttaactactaaattatacatgttacctatgacacagcaattctgcttctaggtatatactcccaaaaattcatgcacaagtgcactaagatacatacacaaaatatccatcgcagcaccattatacattgtggtatgtttgtacaacagaatactacacagcaaggaaaaatgaaaaatggccactacatacaacatgaatacatctcacaaacatattgttaaggaaaggaagccaggcacaaaaaaatacgtactttataactccatttatataaaattcaaaaacagggaaaaccaatctatgatattagaaggcagaaagtggtctaccctttgggaggaaggaatgggtaatgattagtaggggggcttctgaggaattggagacattttatttcttgatttgatttgacccctcatggcttctggctaactccaatttattttctggatctcaacccaggctgtcactccaggggaaatttttgactgtccaaacctactctggagtaaccagagctcagggaaaactgtgtttcttcttcttcttcttcttcttctttttttttttttttttgagatggagtttcacttttgttgtgcagggtggagtgcaaaggcaaaatctctkctcactgcagcctccaccttccgtgttcaagtgattctcctgcctcagcctccgaagtagcagggattacaggcatgcaccactatgcccagcttattttgtatttttagtagagacagggtttcaccatgttggtcaggttggtcttgaactcctgacctcagatgatctgcccgcctcggcctccgaaagtgccagattacaggtgtcagccactgcacccaacctactgtgtgcttcttattacagtcctcattccacgctcctacagctacgtatttagttgcccatctctcctagaatgtgagtttctttagggcagggcactgtgtgtgtgagactcatctctgtctcctcagtgccaagtgactggtaggagctgcagtaaaagatttaggaagaaagtgatcatgatcttgggggtggcttttcaatattcagacattggagcctgggaatggcacatgactcccgagatacacagtaaagaactacataaagtccagagaaaggcaacttaacaacagactaaacagaccaaggattaagactttttcatccagctcaagggccacaaggtgggcatgaacttgaaactgcaggaggtgtaaaaattatactttagcatttatcagtttaaaatgtagtgttccgttcattattcattcagcaaagctgagcaccctgtgctctgtactgtgcaagaagagcacaaagatgaaggaggcccagctcctctctcaaggagctgtctagtttatctttacaaccttgtacatccttattccttgttgacaattagggacattacagttgaactgtcgttaagagcacaagtgcaccagctgtagtactttaagcaagttatttaatctgtaaggctcagcttcctcaaagtaaaatgggaatagtaatatctaccttgtgggattttgaagattaagcgtgaaaatacgcaataaaatgcttagcttgatgcctggcacatggtaaacattcaaccatcattattaagtggtgtgcaaagcatttacagcgttaagtttaggtactctatttcatttttgtcctccctccaaacattatagctcctctaatttgcttctgttcctcgcgccctgcgcaaaccctcctaacaactttcaggtaccatctatcccagccaatgttaagccttgttcttgctctgatccgtttgtcctgttttctcctgtctcttcctttctttatctcctattttcttcctgccccttccctctcttttctcctcagactcctcgtctttggattctgcaggctcagatttgctttatgactatggaaaaacaagtattaactgccgagtctattttcagatctgaaaaatggtaataatactatctacttatagaattgttttgtggagtagatgagataagaaagtgcaagcactgtgtacatcgtacagcgccttacaaaaattctttactggcatctctaaactaccctctttcattctctgcctccccttcccgtccctgcccaattgtgagactaagaaattcttcgaatttaatattaggacataactccaaccagagcgcagcttttctggttgttcccgccttccatgcctaaacgaaccaatcagatcgcccagagtggcgcggtatcgccacttggagaccaccgcgaatgaagtttgcattttcctctgttcttgagcccagcttcttctcgtctcccaccccagcttcccggcattggaagaagggaccgtcctcttccttgtcttggccacccaaatcctggtatcgaaagggttgaacggaccggaagtgtgcagcagcgacgggtccccagctaatcgacgccggaagtagcaattactagacaagcattccgccgccggcttcgctatggcggcaattcccccagattcctggcagccacccaacgtttacttggagaccaggtgagggggttcgggcgtctggggctggcagaggagacgcggagcccgggcctcaccacgggtctscgttcctggcgcgttcctccgggaggccggcctccacgtggaggggcgtggagcagcggccgagacggcccccagagggttgagaggggaccgccatcgcccgcgtccaagctccgcggggtcttgtgctgaggtctcagcaatagctgcctgattgtcctccttcccccagtccgctcattcattcattcattcattcaacaaacgtgtaatgagtccgcaagccaggcatatggaatatgarttctgaggatacagaggtagataaaacacagacagccctgcctttaggagcttacggtataatgaaagagacagacatgtaaacattacgtgataagtaatacagttgtagaaacaaattccagtaaaatacaggaagaagcacattttccccactatcaaagagtgatgtggtaaccaacctgctggcgccatgccccgctgtatgtcatctcatttagtttaatcttagcaactcaaatcatgaaggtattatttaactttctccctttcaatattagcaggaggaaacgccggaatttacagcttaaagccttgaccaaagccacacagctagtaactggaagaacctcktttggagcctggtgtgctcgtctcaccttgctagatcctttagctctattcattccattgcctctttggaaaamgctcaaagtgatctttacaaagtaggacaaggaagggatcctgctcaaaaaacctttaataacgtcwtgctgctataacagtataaagtaaaaacgtattaatcctgacattcaaggtgatttttttcatctggcccttgtctacctgccattctcccctcaacagccagggaccagccaaggtcctctgcctttctgttcttgcccattgctgctttcagctaaagcagagttctgtcagtcctctctctatttgctcatgctgttcatttcatgctccctggccatcttccccaccttatatggcaaaattctacatcttcaggctccaacctgtaatttctgaattctcctgttggtattttttaaagttacaaaataaattgttaaatccaagcaatgtagacatacagagtaagaagtgaaagtcacctccttcctgaaaacaccatcaacagtttgttggatgattgtccagacttttttctatgtacatataaacctctctcatgtttttttaacaaaaaaatgggatcatatgatcatactgtatgtatgttttttctgtaacttggttttctttcactcagtaattcaggtagctgcccatagtatggatagttgatattttaggcatttcctatttcaaggacatttaagttgcttcctttttttttggctatgacaaatactgagatgaacatccttgcacatattgtatccttaggcacttttgtatattttcctagaggatacttggaagttgaaattactgaggtatgcacatttcagaattgtatacgtacttcctgattgtctttccaaaaggctactttctgtattttgaaaatatcctccagaatgtaagcttcatgagggaaagagtaccacacacagagtaactgtcaatctgtgttgaatgggagcagtgtgaaagatgaattggatgaatttcaggyagaaaggctgttagctattttctagcacaytcctcatatacttatagagtgtttacactgtgcaaggcactgggtatccagactatacagagttgactcaattctcacatctggccaggtgccatagctcacatctgtaatccagcactttgggaggccaaggcaggtagattgcttgagcccaggagttcaagacaagcccgggcaacatggtgaaaccccatctctacaaaaaaatacaacaaattagctgagcttggtgatgcatgcctgtagtcccagctactcaggaggctgaggtgagaggatcacttgagcccgggaggtggaggttgcgataagctgagattgtgccactgcactgtaacctgggtgacagaggagaccctttctcaaaaaaaaaaaaattgtcacatccttggagcttaaagtctaggtatgtgctggagtagaggggaaggcactcgtcctttctcttgcctcttccttatcttttagtagtactggtgaggaaaaagcactcatcctattgggtaggtgcaaagattcaaagttaccaggttttgcctttgttatactccctcccaaacaaacacaaactgtaccttttattgaaattttttgaataggtaatgtatttacatggatcaaaaatacaaaagtttttaaaaggtattcattaaacatcttcctattttccatctacccagtccctacccccacccagaaacttctaaataaatatgaactcctgatattttaatgtctctttttttaaaaaattaaaaattaagtgtaagaatttttttcctaatttaggggttggttatattggtttcagataatcagatatagctatatatatatacatatgtatatatgtatagtattagaattttgagttctccatgcttgttattttgctgaaaagaagtacccagaacacctgcgtgttttactcaaaaaagataatgggtgtttatgttacttgcattgtggtgttttcctttgctgagcatgaaatccagtggttatcacaatttcatgacttacaagcttgaaaatcaagagtcctggagcagttccataatactcctgtctgccctgacctttttgtttactggagctgttgtcctctccctctgcagcatgggaatcattgtgctggagctgtactggaagcatgctccaaagacctstaagaactttgctgagttggctcgtcgaggttactacaatggcacaaaattccacagaattatcaaagacttcatgatccaaggaggtgacccaacagggacaggtacagttaagccaacattagtttatgttttcttttttttttctccttttcgtctttttttctaaagccagcattagtttctgaagtctctgtcgtaaataggtgataaggcagccagagctctcttttccacttactaaggtctgtgttggttgattctggtgacaacgcctgccttcctcraacacacatgtgtggaattgaccagaaaccaacctttactcctaggcttggtagagtttttcataacttacatgtactgctcactaagaacaaataatatttgtctgaattatagtgatgcaagtagtctgatcaataagaaggaaagactttataatattttgagaataataaaatcctgggttcttttatcgattcattcatttaacaaatactgagtacctgttttgtgtcagatacttttttaagctctagggagatacctataaacaaagagacagaattattgctctcaataaagcaggaaaagggtgtggggatggaattttagtagaaaagtcagggaactcctctctgacattattggagaagagatctgaatgaagtaagaaagtgaaccttgcaactgtggggagaacattttggatggagggaagagcaaacacagaggccctgaggcaggaacctgtgctggaaatcataagatatgataccttatagggcatggtagagactgggttttattctgagtaagatgtgatgtgagtcattggagagttttgagcaaaggaaagacatgatctgatctatgctttaaaaggatcactctaggctgggcacggtggctcacgcctgtaatcccagcactttgggagcccgaggcagttggatcatttgaggtcaggagttcaagaccagcctgaccaacatggtgaaacgctctgtctactaaaatacaaaaattagccgggcgggttggtgggcacctgtaatctcaggttcttagtcgggaggctgaggcagaagaattgcttgaacccaggagatggaggttgcagtgagccaagatcgcaccactgcagtccagcctgggtaacagattgagactccctctcaaataaataaataaataaaaggatcactctagctgctgtttagagaatagatgtaggggcaagatgtaaacactatgtaaatagttgttgtactgtattgtttggggagtaatgacaagaaaaatagttctatacatgttcagtacagatgcttccccccaagatgttttcagtcgcggttagttgaacccatgaatgtagaacccacatgtagggagggccgactatgctcatgagtaagtagttggataggaatatggggttcagggaaagacctggtatggaggtattaatttgggagttactggcatttagatggggtttrttagtgaactggtggaacccttactcatttcaagggcccttgcttctcagtctgcttcttctctgctaatttctgctcgtttgcctttaaacaagtttggttttctctatagcagagtcttttctcagtcttgttcttttttgtcattcttaatcgtctcatgatttatcatctatggtcagaagcattcaggtttttgggtttttttttttttaatgtatatggatgcatttcaaaatacagaatatataagaaagcagagaaaaggggaaaaatcattcataagcatagctcctaaagatttctaaccatcattaactaatccctaaatatcccatctttcagaaaggaacagtgttaacttttggtgcccatcatgtctggtttaagggatgacaggataaatggaagtagtttcaaaaaaataggatatataagctattgtttttaaaacagaacatattacatttaatttcatatatatagaacagaatatttgacttcctacagtgaaagatgaggcaattagtacttaaatttctacccattcttatttttccccgaccttaatttttgttgttagttttattattatctgttctgcactcatcattccttcagctacagtgtgggtcctacgtttcagtgtatttagtgttcacaacttgcttcgcttttaccttcgcaagtgctggagggcaggatttcttgtctagtggttttttrgtgtttttttttcagaatgctcaagaatcacaattgtccagtggttttttgttacaagagctggaatgtgttgtatttttaagttcattcatgtttcagaatttctgcctgttacttttatacttgaaaagagatagcatgttggcatgctcagccccctcactgtgtgatgcactgtgccactttgggacttcacagagtccccaccagcaagaaggctctcaccaaatgtggccacttgaccttggacttctcagcctccacaactgtaagagataaattacttttttaaaataaattttttaggccaggcatggtggctcacacctgtaagcctagcactttggaggctgaggcgggagggtcacttgagttcaggagttcaagaccagcctgggcgacatagtgagaccccgtctctacaaaaaataaaaaattagctgggcatggtcgcatatgcctgtaatcccagctactgggaggctgaggtaggaggatcacttgaacctgggaggttgagactgcagtgagccatgattgtgcccactgcactccagcctgagcgacacagtgagacactatctctaaataaataaattaaaataaaataaaaatatttaaaaggaagaaaaaaagaccataactgggtatagcattctgagatctttttagacatttctgatcaattgccttctggtttggttttttgttgttgtttgtttttgttgttgttgttgttgtttttggagacaggatcttgctctgtcacctaggcccaggctcgagtacagtgatacaatcatggctcactgcaatctccatcccctgggctcaagcatttctcctacctcagcctcccgagtagctgagactacaggcattcaccagcatgcctcactaatttttaaattttttatagagttgaggtctcactgttgctgaggccggtctcaaactcctgggcctaagtgatcctcctgcctcggccttccaaaatgttgggattacaggcatgagccatcatgcctggctgccttctcatttttgaatatggttttggagaatactgaggccagatttactccttcctttacatcagggttaattttttgatttctatttctgaatattttctctgttatacttactggattttctatttcaggaaatatagttatttgtttcatcacctttgccttccatatctatcatatttcttttgattgtgtgataggatttttttttcttttttccctgcattcactaaaataatctcagacctttactctgtgccttactcaattttcagtcatttttattctgttctttactgctctaatttatctactagctcattactgatgccatttgaatctaaatttgtttccttcactctgcaatcttttcatcttattctgtggtgtattatcttgtctttgagcttttgttatattatatttttacttctcttgaatcatccatagcttgagatagccatggagaagccactttctcccaggytgagttcctgggttttcttttcctttctcccctcctcctttctgtccttctgttggttgtggtatgtttgcctagtttccatgccatttgttttcatcttatccatgcttgatgtcaacacctacattatccccaccttttacttgctcagatacagtgtaagtggagtctccttgtcattctccccacttatgtggaactggttgtcttccccacttcaaatgttaggttgctttctctctattctattctagcctgaagaggtgtgggagagaactggagctcagctcatgytgagcgagccccttgtgggagggctagcctctgttctrtcttcccagactcccttaaagtcttgtcccagagccccctccaccagccagtggtgtccctctgtcaccactccaggctctgggtagtccccaagtatggcccagcaccctggaaggtggccagccctgcgtgcctgccctgccactcccgagcccctgtgatatgtgtgggcttctgccctcaagsgctttgttttcagagctgctcacccactcccctgttggctgttcagaatcggagggtatttgtgagaatctcagcatgacatttctttcctggttactggtttcagggaatacagatggaagaattttctattttttcctcttggctgactctttttacaattttagcatgtttggttcccttttcttatttggttgatgctggtgaacttttgactttttaatttttaatttttgtatgttcactttattgggtgttgggagcatgtggtaaacgtgcctgatagcaataactgaaacatacccttagaatgaccctgtatggcagacgcatctgaatgtgtgttctgagctagggaatccaggagtagccaacctggaggttccttccttgtctataaagggacatctgagcccctggctcgtcctgtgaaacatgggccgcacacgggttgaggccccgagttttgagttgaatgaagattgccaggtggagattgttagggagaaggtgctaagtggaaatgctatataaactgcatgctttttgcaagccattgtggttctccgccaccattggactctctgccctgtatgtaagtccccaataaaaccccatgtctcatttgctggcattaggtctcttcggtctattgaacctgatgccatccccattggagtcaatagaggttcggcacaacagggaggcagagtctagtcctgcttcattctactttctttgtctgaaagggttccgtcggtacttcgatgtacttctttcctgtcttcttcctctctccccctcatgttgttatgaaataaattttaattcttaataccagtgaactgagagtccatgattagggtacaagtattggaagtgactcaggtgtgagttgctcatgccacagcttttctgtatttctgtagttggttcatgatccttcataatgtcacatttccatggtgtaattttaatgaaattgaatcactcaaaagatcttcaaataactgcacccagcctcaagtataatgaatgactgagcagcccactggcaggtctatggtggaaggcaagcaggagttaggctctcctgggtcactagttcatattttctagctgattaggtgacacgttttttgttaaacatctcagatgggcagcaaatgacatcctgggctcttcagcaagttgatgtaccacttccattcccagctgtccctcagtctgactactgtggaaccattctttccacatgctttcttgtaatacatctttgccagatgccttgtcaattcaaataccctttgacttcctgcttcatttcattttaaaccatttttctaccttcaactttcccatattataataactatagaggctctttccttagccctctgagtgtcttttatttgtttctactaacctttctgtcctctctgtaagacataacatcctgtcaagttcttcctttagctcttcctgctctgcacttggcctcacagtgctcaccagctgctgtgattaattatatgctgattatcctgtgcgtcactctcactttgatttcatctctcctcttggtagccccaggaacacctgaaatgtaacgtgttgaacagcaagctctgttaattttattcatttgatgagtatttgccaagagtctgctgggtatcctgtgctattctaaggcctgggagaagcacttaagcattaaaagccaaggcattttctttttccttgcagttccctgccctgccaggaaacaaactattcattataagaaacaactagaatgggataatataaatatgcaaatgtatgatagtacggtgtggattatgtatataatataggttggagtaattcacaataagggaaaaagcacaatggaatgagattaggatgggaaggaggcatatgcgagatgggtcttgggaagtagagggaagggcattttgaatttaggaagaagggtgggtacagggcaggagtgacagaggcatgcaggggtagggagggagcccgccacccccggtgtcacatcttccactctagactggctcttgtgacatcacccagccacctctccacacccagaacaaatgcatcaaatgtgattcaaaggcccctgtaaaatttacagatctcggaactgcctgtttaggggacagtaaggagcagtttggggccagttaatggasactcctagacagaggagttcagatttgattgagcatgactcagggaccatttgggactcttgagtctgggataagacaaatctgaggaaatttcatccagctgtggactatggcaagacagtttggttcagggtagagcaggactgtggagcttgggcttgccttgtgcttcacatgaatacttactaaatgtagaggagttgccttaccctgctgagccagctcacctgtcgggagtgtggttacgtgcacctcctaggctggttgtgagtagtaaatgagctgatgttggtacagtggttagcatgggcttgacacaaagtgggagctcaaacaaatgtgactggttttttttttttattgttaattcatttaacaaatacctattagactccttctgtaggccaggcactcttctaaaagctggagatacaacagtgaataagaaagccctcgcggtgctctcattctggtgagagacggagaatgaaaaagtacataatatactctcagggatggcagatgatatggaaaaaagaatgtactgctgggatggaacaggatttctcaacctaggcactattgacatttagagctggatgattctttgttggagggggtgctgtcctgtgcattgaaggatggttagcttcgtgatggcttctaactgcttgatactgatagaaccactcagtgtgacaacccaaattgtctccagacattgcccactgtcgccaggggtcaaaatcactccccgttgagaaccactaggctagagggtgagggaagtgctggtttggagagtgtgattagggaaacctctctgagagcatttgaccatagttctgaatgaaatgaagtggtgatccatgagaccatccaggccaagggcactctgaagagaacagcagccagaggccttagaccagagtgtgcctggcaggaaacagcacaggggccagtgtagctggaacacctgagagagtggcaggagatagctcagagagtagcagrgtgcccaatcgtggggggtgttgtaagctgtggtgaggattgtggattttgttctcagagtgatacagtgttgayggagggtttcaagcaggggagtgctgcgattaggcttgtttgaaaaggatccctgtggctaccatgtgaagaatagagggtggggaaagagggaggcaaggctggaagcaaggagaccagtgggaagcttttattcctattcaagctggagatggttgttgtttgaactagggtgatagcagctgtgttagttctggtcctctgggaagcaaacaccaagatagaggtttattgggtaacacctgtgaaagataaagggtcagggaaccaggtttggaagggaaggtcttcacacagcagcgcaggcctgagtaacacctgtgaaagcagaggggcggaggaggagcagctgccagtgagcagcgaggaacaccaggagaatgtggagtcgtggaagccaaaggaagacagcaactcaagcagaagggtgacatcgagtgtggatcaagtaaagtgagtgctgaggattgaccactgggtataaccacgtggaggtcactggcgaccttgacaagagcagtttcagcggagcggtgaggggcgaaagtctgaatggagcatgttcaagcaagaatggggagaagtagagacacttggtgttgacagctttttcaaggagtttttctgtgaagggatgtagagaaataggaggatacttggaaatagagttttgctttttaaaataggaaatatcaataacatgtttaaatgctgacaggaatgatccattagaaagagaaaaattggtctactagagggggaggttgtagttgctgagttctttaaaggtgagcgggattgggtacgtggtggtaggatagtcatggacagcttattcacacagtgtcttagggaagggaggtgggtagaggtgtaggaagggaaggggctttggtggtgagagcatgtgaaagttctcttctgataattccttcttctcagtgaaataagaagcaaggttctcctcaaagagtgagcagcagcgagggagtggtggaaatttgaggacagaggaactgaataaacccaggcaggctgcctcccgaggtggcactttgaatcatgaccagcagcttctcagagaaaatgctcgggttacctcagttaaaggggctcttcatcactgacactactgtgtgtttgcctcatgttacacaccagatagcttccatatgctgtctcatttaattctcataacaagcctgtgagacataggtgttactgctactcccattttgcagacaggggaactgaggcttggagagaaagtgtcttgattaaggttaaacagtaattggtggggtcagaactggaatccagacgtctctgaccccaaaggcaagtgagaaagagaagacagcatcttcagaaccacaaagccccttggaggactgtggcattgttcccgtctggtatattaacaaagtgtttgtgtcaggtagcactgcttttggctacaagtaacagaaaacytaatcccacgggctgttttttcttacacaacagaacgtctggaagtgagcagttattgtcatctcttcaccagcccagaagagttgtcagggatctaggcttgccatatctttccccacttcattcgtaatgtgttggcctttggtcttgaacttgttagtcttatggttgcaagatggctgctgctgttctggcatcaccctactttcaaagaaggaagatgggaaagagctgtagatgaaggacaaaagagtatgtctgtttttatcaggaawgctgtagctttctcagaagcttgaytcagcgacttctgtttgtatcagtaagtcacaactgggtcatctggccacgcctgtctgcaaaatggacttgtcagcacctgccttttttgtctctgaggttgaggcaggctgtggaggaggaggctggggatgctcaggagactactgacggacagtgtctgttagaggcactcttgccagaagagaggctttgattggtcagttgccctctggtgtcaggtgccccactggctctccttataggccactgcccatctgtggggctggatattaatctattgtcccatcaactgtggggtgggaggggcggggacaagtagcaccaagtgtggtcatcttggtgtaagacactgcatgtcccatgccttagacatcattttgacaggtttccacagtgactaagaggaggaggaagggacatcacaggagtcacagggatgagaaaagggttttttgtgttttgtttttaagaaacaacacaggccaggcrcrgtggctcacacctgtaatcccagcactttgggaagccgaggtaggcagatcacctgaggtcaggagtttgaggccagcctgaccgacatggagaaatcccgtctctactaaaaatacaaaattagccaggcatggtggcgcatgcctgtaatcccagctactcgggaggctgaggcaggagaattgcttaaacctgggaggcggaggttgcggtgagccaagatggcaccattgcactccagcctgggccacaagagcgaaactctgtctcagaaaaaaaaaaggaattaaaaaaaaaaaaaaacacagatcataaagaagaaggttaagaaatgttaactgcaaaggttctgttcattggaagatcccattacaagagtgaaaaaagttaactgggagaaggtatttgcaaaacattcactgacagaggattagtatctatagtatatagttgagcctttaccaacatgggtttgaaccatggaggtccatacagttttctcagagcccacagcgggacttsagcgagcagggattttggtgtcacagggatcctggaaccaatcccctgagtataccaagggatgactgtatgtatcaattccaaaatgtcataccactgagtggccgttcacagaggggacaagctaaataagccagtaaacatgaaattatgccaaacttcagagaaatgcagtttaaaacaccacaagaggtctcacacttctcagactgacagaaggacctagagcagtaagagtgagagtgctgcggggtggggtgcatgttggttcatccttttcaataaggcacttagaaaaatctagcaatgatgaaatactcaaactatgaccctgtgtatcccctgtgaggtattggcccccgagagctcttgcacttggatttcggagacagtataagaatagtttttatagcatggtcgataataaccaaaacattggaaagatcctcagtatcaacaccagaaaagataagacagagcattatggtcatacagtgaggtgaacactacagagacctgcctggaacaaagtagatgagtctctcaaacagtgttgagaatatataaagtgtaataccacttatgtaagcttaaaaacatgcaaaacaacaatactttttttttttaggggtacatagatgtgtagtaaaaaagcttaaaaacatgcaaaacagcaatacttttttttttttttttttagggatacatatatgtgtagtaaaaaagaaaatgcatggaaatgccaaattcttgtcagaatagtggttacctgagaggaaaatgtgattctttgaatcagctgttagctctcaggagaatgagtggtggggagagatgcagtggggtgtatgcatggggtcttagctggatttgcaatagtttatttcttgggggcggaggtggtcatagatattggtcatattattctttgtatgtttgcgtgtctgaaataaatacattgaataaatgatcccaagagaggacagaggacagaagaggaaaagaatctctttttttttggagacagacaggagtgcaatggcgcaatcacagctcactctagcctcgacctactgggcttgagtgatcctctcacctcagccacctgagtagctgtagctgggactgcaggcacgcacaaccacgcctggctaatttttgtagagacgagtttcaccatgttgcttaggctggtctcaactcctgggcttaagagatccgcccccttcagcctcccaaagtgttgggattayaggtgtgagccacttgtacctggccagaaaagaatcttgaaggttcttttctaacctgtaatcaaaggttagaaaacaggtcttggccgggtgtggtggctcacacctgtaatcccagcactttgggaggccgagcctggcagatcatgaggtcaagattgagaccatcctgggcaacatggtgaaaccccatctytactaaaaatacaaaaattagctgggcatggtggcgggcgcctgtagtcccagctactcaggaggctgaggcaggaaaatcacttgaacccgggaggcagaagttgcagtgagccgagatcgcaccactgcactccagcctggtgatagagtgagattctgtctcaaaacacacacacacacacacacacacacacacacacacaatagaaaacaggtctgcctatcttcattgtgtctgtgctagaccaggcacagaacctgcaaagcttccaaattgttggctttctaactgataattgacatctgagtagcatgctctgcactggagaactctttaatcattctctgtccctctgccacctctcacttattccacgtgcccagaggaatgtttgaattagaatgatttgtctttctgaaattttgccgcaaaccctactgagttgaattgggttatgaaaagataacatattatgagtaagatattatgaaaactctgcctattgagtaaaggtgatctccatgctctttcctcctgtatcctctgattcccacttcatctgtgactttttttttttttttttttttttgagacagggtctcactctgttgcctgggctgcagtgcagtggtgcgatctcagctcactgcaacctctgcctcccaggttcaagcgattctcctgcctcagcctcccaagtagctgggattacaggcacgtgccaccacgcctggctaatttttgtatttttattagtgatggggtttcaccatgttggtcaggctggtctcaaactcctgacctcatgatctgcctgcctcggcctcccaaagtgctggaattacaggtrtgagccaccatgcccagcccatctgtgactcttgactgacctrttccttaatgcacttcttgtttgtggtgatgtttgtgtgatagtttaccattcctagagggcagggtcctggggggtttgttctggtagccctcaggttgcagggatcacactttgaagctcaggccacagactgacagcgtactactgaactgaatccttagcttgctcactcaagtcctgcacgcagagcctggcctctgtggcgtctggccccacagccctctccctagtctctggtaaccccagccaggaaccttgactctctagtggttgccaaaggaccaagcaaaggggaggattgagtcagagggaacatattggttatataattgctgtttggaagtatactgacaggttggaatttttggaatgagttttacacagtttagtgtggttcagtatttttccagaagcataggtagcctgggccaagtgggaggtttcccctastctgttaggattcacccccatccctctttgcatgagaacagtgttttcttccggaaaaraaacgggggctgtgacaggctccctgtggtgaagccractaaaaggtaaagcaaaggatttttgccatggaaacaccttagccatgcccaggggccttgggggtggacttggtgctacttttatagcaggcagtagaggaagtgagctgccagcactgggctgcagggcaagcagagtaccaatccagtgtttactttgttctaggctgttttgtcgtgaccgttcaacttggagaaaccaatgtagttcagtaaggcatatgattgactacataattgattagtattggttaggaaagttgcctcctgttttgacatgttttcctgtgagaaaaccatgtttaacttacatcttttttttttttttttttttttttgagacagtcttgctctgtcgcccaggctggagtgcaatggcatgatctcggctcactgcaacctccacctactgggttcaagcaattctcctgcctcagcctcccaagtagctgggactacaggtgtgtgccaccatgcctggctaattttttttttgtatttttagtagagatgggggtttcactatgttggccaggctggtctcgaactcatgacctcgtgatccacctgccttggccttccaacgtgctgggattataggcatgagccaccgcgcctggtctaacttacatccttttgytcttagagcaaaacctgcctgagcttagggtatccagcccagcaccctgctcttgtgggcataatataaataacatttggtggtgatgctgctagcaaataattcccaatcccatgtttcttcattttccctktattcatttatttagagtcaaggttttgcctcttgcctagactggagtatactgacatgatcatagctcaccgtaaactcaaactcctgggctcaaagcagtcctcctgcctcagcctcctaaggagctgggactacaggcaygtgctaccacatctggctgaattttaaaatttttttgtgagccaggtgcagtggttcacgcctataatcccagcacttgggaagccaaggagggaggattgcttgacgccaggagtttgagaccagcctgggcaacgtagcaagaccccatctctaaaaaaaaaaaatttatggagtcagggtctcgctctgtkgcccagctcaaactcctggcctccagcagtcctccygcctcagcttcccaaagtgctgagattttagatgtgagccaccacacctggccctgttttctcttaatgatgtactgcctcacctctcagtggactctgccgacygtaatgtccctttctgccacattgccacttaccagctatttctccttcagctggatagctttaacttaaatgaattttattttccatcacctaggttaagggtggcaaataggtttcaactctkgggctattactgattaattaataacggctgcctragttctgggttgataacattcagaggcaaatctagctcagcagggaagaatactgattgattggcaatgtctgtgatgggcacagggataggacttggggcactcatgtctaaaatactcaaaaaaaggttaaaaatcaagaaacctcttaacacatcagattatgaatggtggttatctctagatggtcaggttacagaggattttaatgttcttttgataatgttctatgttttctacctttttgatagtgaacatgtattattttaatgtgcaggaaaaaatagcgttattttgaaaaggaaagtcttatcggaatgaaaccaatgatttgaatgtgctattagtgctagattctgtagttgcaatatacctagcagtggggtaggtgtcactgccttttcctttcctctactctgagaaatcctttgaccctgggccatcattcttgctgtgagatagaatgtgtgactggctgattcatgtgtcatcttccaatcgggcaggtcgaggtggtgcatctatctatggcaaacartttgaagatgaacttcatccagacttgaaattcacgggtaagtgtataatttggctggactgggtaggaayggggattttaaaagctcactcttttggccatgattcaaggtgaatgcctgacacygtggcatggtgccagatagctgcccagccatggcgccatgaagtgccctggtggattagagaaagcagcgcctctcacaaagttctgagcaattcagagcactggtcggtgtgttctagactctaactacttgttaaaggtcacaggatatcaaaagtgtcctcaaagaaayaggaaaccttgctgggtttttgagggcagtcaggaacatggtccacagttagtgaggagcatcaggggtcaaggctggggaataggtgaggacaaggaagatgaagtcgccagaatagtgtagtgatggcctttgtacagggcagagagactgccctgaggggttgtctgggtctggacagasgccagaacaaagtcctggctgctttttcatccctaggatggggcagcagctctacactggacctgtggggttatttatactctttcctttcttcctttttccyaccaggggctggaattctcgcaatggccaatgcggggccagataccaatggcagccagttctttgtgaccctcgcccccacccagtggcttgacggcaaacacaccatttttggccgagtgtgtcagggcataggaatggtgaatcgcgtgggaatggtagaaacaaactcccaggaccgccctgtggacgacgtgaagatcattaaggcatacccttctgggtagacttgctaccctcttgagcagctcttctgagatggccccagtgaaccagcttctagatgacatagaatgacatgtaatgctaaatttcattttggctttgcaagtcatgaagcttaggaggcctggcatcttgggtgagttagagatggaagtacattttaataggatgcttcttttctcttcccccagtgcctaggttgccagagcatttgcacaaatgcccctgtttatcaataggtgactacttactacacatgaaccataatgctgcttcttgtgcatgtctgctctgatatacgtcgaacaatgtagcagccactgtcatttctcagtggttttgcctaaccaaacttcttcctaaggagatttatattctggcctacacagcagtccttgatggctgacagccacagaattccaaaccaagtagtgtctgtcagccctcttaactctgtgcacgccctatttcagtcttttacatttgttcttctagggaatgtatgcatctctatatatattttccctctcaaaaccagaacatcaacagtgctgtttctgacacttcagacatcccacgcaaagccacattgaatttttgccaaatgaaaaacacatccaacaatcaagtttctaagaaggtgtcaagtggggaataataataatgtataataatcaagaaattagtttattaaaaggaagcagaagcattgaccattttttcccagagaagaggagaaatctgtagtgagcaaaggacagaccatgaatcctccttgagaagtagtactctcagaaaggagaagcgccactcaagttcttttaacccaagactttagagaaattaggtccaagatttttatatgttcagttgtttatgtataaaaataactttctggattttgtggggaggagcaggagaggaaggaagttaatacctatgtaatacatagaaacttccmcaataaaatgccattgatggttgaaattgctgctgtggtctgattctaaatattgtatgaggttccaatggtcattttaatcccagtcatcttaagtagtagtacagagattgaatgttcaagatttcacatcattttaggcttgtggatctccagtagacttctccctctttaagagcaattctaactttaaaagggcagaaccagagaaagaattaagtgacagaaattgacatttctgaataagaggtgtattcatctgttttcacattgctataaagacactacctgagactaggtaatttataaacaagagaggtttaattgactcacagttccacatggctagggagacctcaggaaacttacaataatggtggaaggcaaaggagaagcaagcaccttctttacaaggtggcaggagagagagcgagcacgggggaaaccaccatatttaaaccatcagatctcatgagatctccctcactatcgtgagaacagcatgcagggggaaaatgccccatgatcagtcacctcccaccagatccctccctcgacacagaggattacaattcgagatgagatttgggtggggacacagagccaaaccatgttggggggattacctgtaagtgaaccaggtgtatgtgctaagagacctgcaccatccctggaatttgcagagagcccacctgcacattattatgggaccagaggcagtatatgttgtggtgtttggttccttaagctggtagctccttgaagaggggattataactttaatgtttcttactactctatcaattttggaaatggtgatttactttatggaatggccaaacaaggttctgttccccaagccttccctaccttcaacctctttctctacctttctcttttctctcaatagcaaaaaagcaaaacccaacaacaaaccatataaatgactttgtaacttcccagagatggtttttgtatgcaaagtagtgttctacactctggaaaaaatagaaatgtatttctttcagcctgaactgggtggacataattggatctgcctctgagagcaaggaatagcacctgttcactaacctcccagaatcgtaatcctgaaaatctccactttcatccaaggcacaggcgtggtggaaacgtatcatggctactctgaagcaaagaaggttctgcatgccttgggaggagagccacacaggcacagttccttgtttttggaaagggacaccaaatccatgctaaggcagtcacgtgggcacataccagttttcatagaggatatgacctcagagagtgaagcttgaattgtttcacaatttgtggttctgccagttagccagagttgtagaagttcccgtttccttataagggaagctcatctaaaaggaatcctgcttaattctttggtcatatgagtgtctacatcctgtcaggattagtaccattgagacaggtctcataaaagtggggtgtactagagatagttcatttttgttacatctcatcacggtgagggtggtgagctttctcctggcttatcaggagaaaacaaggataagtttaaaacttggatggggattattgaagataggtgtggaggaccatggggggctcatcaaggcacaggagagagacagctctctgctgcttctcgtgggggaagggaaagagattctagacatttggagaaggcttaaagttggaagtagatacaccagtggaaaaggctttcaaacaggtgcccctgggatgatggataagagaagcttggcacacagactataaagaatatggcccaagggccctagcccagggcttctcacatgactacatgcaggaatcactgagggagcctgttaggaagcagcttctgactcagcactcagccagagagtctgcagttctcgccagctcccaggagatggtgactgccggtccagacaccaccctttgagtagtgaggtcctagaggtcacatttgtccaacatgaaactggggagggggggtttccctaagagcaagggcagtcaggaccatgaaccaatcttatgcctcctggagcagagctctccacctcatcctggtggtcttggaagagtgaagagattcaaagcacacgatgagctttaacataagctgctggctttggctactgggattgagctttatgaaagtgttctgttcccacagcagtacaacatggacttcagaccctggtatgtggcactgagataccttgtgtggacaccagggtgggtgagattgggtgatcagtagacatcacagaaaatgcagggaaaagagcatcaacaaagatgacattgggggaaagagctctggaacctgactgtcggggttcagatcccagctccaccacttagcagcagcatgaacttaagtttcttaatttctctgtgctttagtttcttccactataaaatgagaataatgggccaaacttcaagggctattgtgaagattaaatgagctagaacaggtatttagaacaggaactggcatttagaaaacacccccaaaatgctagttgttgttactaccagtggcccttgaagccaccacacacctgtcctacctcttcatctcgacatatacacagcctgacctgtctcagcctctcacctcacagcttctccctcccactgggctaacctctgagaacaaggaccttgtcttactcccctctgtaagtcttcccagcaccttgtgtagtaatttgaggttattgctgaatgtatcaaataaaatgttctccatcagaaaaagattgagatcctcttgtagaaattgctgtaccccaactctccaaacccaggcttcagctggtatggcagccaagcctttccactgagctctctggaagtcctcagcctgatgtatttttggattgtgtctccagaatatgtcaaaatagctttccccacacaaacacgattgctgcccccagatcctcaagccagtcagagccatcactggggccccttttggcaccatattcttgcaacatgtggaggaggaagcattgaaaagcacgttaaagcggtggagtttaccgcttacaaagaagcactttgtggtctcagagtcctgttgcctaaagagtgagttactactttttaggtaaataccaagataggggatcttccagcaacactcttacagatgagagagaagcaaagtgggaagaaaacatgttagggtctcactctaaggttggcttggcctgatttgggaattgggttcccgattgtttttccaaatggataactcaagatccttaattgcatctgaaaccacagatggccagttgtgggcaaggtttatggactgagggatgtgaggcctttttgtgacctttgatgaatcactttacttctggaacttggagcgctcattcattaagggaagatttgaactagcccccagtttgggaatctaggtcattctgagaagattcctccagctgccaagtttccatttagcatgctattttggaaatttgccactagaggccgctgtgaatacagtttagccttgcagctttttcaaaggcagaagcctgcagaaacctttcatgagttactaagacttgcctgctatttcttggttgtggaaagccagcaactgctcagattgtgagagggtagagttgagatgtccacctggcacagaatgagcctgtaaacgtgctccgttgacacgggctggccggccttcttttttgtctacgggactagatggaggagccctccgtgcatggtaaggttggctgagtcctgtgaccaggtcctggttctgtagcgtaccttctaaagggctagttccctcttggctgtttaatattctgctttacagttgaattcattcattcaacaagtaattttggagctcctcttrtacatccaccaccagcaaatattttaaaagaatcagagaaagtcaacgaaaaggaaccttagaggaaagcaaaaagttattgtcccttctgtgtttcatggtctgtggatgctcctcgtacgtatttttctcttaatcccccaaaccagcctctgaagttggtattattatgcccattcctggatgagcaaactgaagaccaaaggcaagtagcacaaagccttgtacagactgaatggatggaataaagggccggaccttgcatggctaataaaaggcagggctggggcttgaatatggggaatttggatcccaagttctgctcttttcctatgatctccacctttgacatacagaggagaaagatgaggtgcaggaaaggaataatctggtggcagggcagaggttagaacctgaatctcctgccttactggctggggttgttcaactgacttctccatcctagcgtgtccccaggccaaactgactggctggccctagcctcagctgtctctacgctccttccaatcagagcctgaaccaggcctgtggaggcgcagcaggaggaagggcacacaaatgaccctcatcaggatgtttattggatcataactgtattatcctcaccactcagctaatctcatagaaatcgctttcctctccgtgaggatctggccacagctccattaagagctgctgccctgcatacctgtgaggaagctcttatacagcagaaatagtggagaggagagagaagtcatatttctacttcctcattacactgacgggggcaagtggcaatttcactgtataagaaaggccctcaaaggaaagggagttcgaagttcgtgattttgggggcaacattcggctccgaaggaaatgtttcctttgtgcttccctttttgaaagcatttgtgatgctgtttaagatcaaataagaaaagggaaggaatttgtgtttggggagctcacgacgtgccaggtactttatacatattattccattaatcctctctgaagagctgtggacagggcatcacaatgcccctctcatagatgagtctgtttcatagatgaaggcaccgccttagttgtctgggccttggcggggctgagctaggagtctgttctttccctctgttgcactcttaattcacacagggatggtttccctgccgttctttttcccctcctccctccagctgaaaaaatatggaaactagttttcaagccaggactagtcactgtctgactttgactttggtaacttcctttcccaagccttagtttttccatctgtagaatgagaggcccagactctcattctaactgcatctagtttaaacctctatgattttataatagtatttttctcccagggagctcccagtacatcctcatctaattggaatctcataccaactctggaaggaatggtagtatggttatattattaaccccatttttaagctggaggaagagaccagagaacccggcactctgttgcaaactcccccgccggccccctccgcaggccagctgcctccaaggggctgtcagcagcagctcctgcagcctgacacytgagccttacgcaggctcctgacagaattatcagagaactggggaacaaatacttcccgtaatcggggcgacggttcttagccagaggtggaggaggcaagatgtgaagtgtgtctgatgagttcctctcccagtgtagggtcagagctaataaaacccaaggaaatctcggcgggctgctggagatgcgagcgagcaggcgagccctgggggcagggccaccgggacttaagcttccgcacaaagccaggcttgtggcattttgtgcacatttcagttaccttcggcagccaggcaggcaaatacaagcagcttggcatgaaaatgaatttagagcttaaaagaaaagaagtgtttcaccctcggtggcttctcaggctgccccggtacaggtacagccaggggaggcaggtgccaaggagcagtggtgacaaagaatctaagggctggagtgaaatgtcagttcccttcccctcccacacacatggcctgagggagggaggggcggagt

SEQ ID NO: 93241 - DNA, 61664 bp, Homo sapiens
ttttctagccaattataaaatcatcttttaaagaggaccaaagtgagacaacagttgtctgtggatgacaaaaacattttagggcagccactgttaaaggcacaattgacaaagacatttacctctgtggcacacagtcatttaacataataattataattattactgataacatatcctaagtcatattagaattatagcagttttacataattttggaacatataccaataacacatttacacaaatatagaccaaagaaagctgaacaccattttatatttgacaatgcttcctgtatgatttttgtaccaaataagccaaatgtcatttttggactttagaggacttaatatctaaaatactaagttagaaagagacataatttataatttgattttggaaagtctgtcaaatatcaaaggtttaaaacactggatatcacaaaatagaatcccaggtcaccataagtcattcatttggccaaaatgataactccaaaacaatttaaagaaaaagaaaaacctttactgtgatacagatgacttacctttccaaagaagatccaatgaagatagcatgaggccaactgaatctgtctcttctctctctcctcctttttttcccctgccatttatccaaaggaaaaaacaaaaccctttcattatcttttaacattacataaaaatcatcttcaaaagagaaaaccaaatttcatgtgcatctttaatgctaaagctagttttttaaataaagttttatatatccagttttaattactttgaccataaggtaagattttcataaactttatagaaccctttacaattttccatcaaacagcagatcagttttctaagaaaaccctgtgatttggacacaggggcccagattttggacacaggggcccagattctggccccacatcagtacgattttaatgttttaacctacagaaaaaagctaaataatttctttcagctcttagccaactggtttatacccacagaattttttttagattcaccctttacaaacctttttcactttgcttaaaccttcagttttgttccgttactgttttagggtaagacaatctttaaaagcctctgaactagacaaaattacattccctttaacaaaagccatattcctatgccttcttacaatcttttaccaaaaaacaccttccttacacaccttgtatgtaaaactgtttctccagtaatctcaatttcatgttacagtgttaattcttagcaactttcattttagtgaaaaaccggataagtaagtgagttaatactagggatggagcctaggacaccagacagaagtgaagataaggcctgactgttttcagcataactaggggcatggctgtccatgtgtccccaggccttatctatagcctaatgctccaaagtaggtaaatcaaatgattttcaaaagtcaaaggaacagtttgactttaaagcatttagcaaatctgatatctgatcttaatttagaccaaatgtctgtattttcatgacattttattttaccaaaaatctttaaaactgtctttatttccaaaagattactaaagtcatgtgaataaaaaggcattaaaatttctatttttctgacaaaatatgtgatgtaagcgctcatttttctaaggcaattaatcagagctcttttatatataaacatcacacaccagagagaagattcagcacctgtaagattttttgtttgccagtttcttaattggattactggcttcagggtggagcccctggaggaacagggctaggaaagcttgtgtttctagggccaaacaagcagctgaaggcaaagacggattcttaaaattaagggtgccgctttacactggatcctggatcccaagaggacggaaatacttcgagagaagacagtgcagtgcttttaccaactatgcatttcactgcaacgcaacccaaagccaatcagtccatttgtaattagaccatcccccatgggattctcatctctctgttggggggcgggggggtgtttccatgtcttccaggtggccaaagcatgcttctctgatccaagtgtgcgaagagccaagtatgcctccgtaactactattagccaactcctaaagtatatttcctacctagttgttatacaccaaagctctctcagaatgagaagtaatttctgatgcccctaaaactcaaaaccgtcagataacacaatgcaaaacagaatagagccttggattttgagagggatctgtctgcttttaattcttggggtttcatgaggaaaacagagcttttttccaaaacggggtctgtggtgcctcctgtttttcccaaggagtcccaggctaccagaagctatctcagggcctctcatgtgtacattaagataggcaaaacaaaaaagtggaggaaaataattcagttgactgagaaggaaaaaaagacctttttccagaaaaataatctttttccagaaaaacaagatccaagaagagagaaacataaaggccttttaaatatacctacagcttgtttatccacttttaattaagctgacttttaaccatagcgctctttaaaaaaaaaaaaaaacccttaaaaattttatacccaactttagccacgccaagcggccaatatttttggcttttgaattctaccacaggtaacttcccacctgaaattaagttttaactaagtttataaccatggacacacaggtgtctcaaagagatggtaagcagtttttttttctacaagatgtagaatctcccccagggtagtttagagaaaggaaaattcaagacaggaaatcagaagctattcatgggagcggggggacgcgggaacctcaataaatggcaaagttacataaataaaaaaccagaagggaatcattccagaagccaggaatagaacccagaccccccactgtcaagaggcaaaaccttagctactgagttacacagtattgagcagtttctattgtgcttcccagaaggagcctacagaagccagtttcaagcttgcaaaggcttttaactgctcaagaaaattcttagggctaacctaaaaatccccaaattcctgtcttctagatggtggaaaccaagagaaagtatctccacatggtcacaaagttaagctcttcaggacacaaaacaagacagagaaatttcatacagtattggcttcagggacctgtagcaaagtttgtaactgaccagcctgccaagccggcttgaaaagcaggcttataggggtcctaaacccacgttctatcctgtgacacccatctatccactacagaacacagaaagacaaattcttagcacaaaactacaccagatttgctacagcctaagactagtctcacaaatccttttttccattcatcaaacccttgcagaggaggcaaacagtttactatttactgagaaagagagagagagaccacaaaccggtccggtaagaatttcataccctctgtgccggcataccagatttccgggttccctttctctgcagtttccagaagaatggagtggcttttgatgaccctgcttgcttgtgctatagctgtggggttcaagccactttacaagagaaaatcaccctttactgttttatggaaacatagacgagattcttaatttgcaagatgctgcccagcgggctgcatggggaaccgaattaacattttccatcccagcaaaacacacataacaaaacacacattagccacctcgttcagctcccaatatcagcctggcaaagctcaaaaactttttctctttggtccctgttgtctttgatccactccaggtggggagggatgacctccgaacggtaattcacaatggggtctctgggcaagacgaagagcagatagtcaccccgagacaggcctgttgagccttctgtagggctcatcaaatgtgaccagacaaataaggagggttttgagttaggtctgctggacttccatcagcaacctcttctgagatcccttccacatatacaaacgcacacaaagacgagaggacagaaggcgttcccaatcagatccctaaccaagaactccgggagtatcccttccaaactatcctcctattctccttctgagaaacctccttgaaatcttcctgattcaggagaagtctcccaaacctggactcttcctactagttagaaagagccaaatgagacccccccaggagccgaacagacaccctgcaatggggctacagacacctcaccatagggctacagaaccagttgggagaaaggaggcgttggcagcacctaggatactcaccaatccagacaccctgccctgcaatggggctacagacagacaccctgtgatagggttacagttaagggacgtctccccggggctatttctccattgcaattaaatccatgcacactgggttggcagcaccccaccagtagagagagtaccagagtcagcccccagtccaagagaactgggtggccgcttgggcaggcttctggatccattgctggaggggggccactgaaccacgagtaggtagccacaaaggcaatgccagacaagcccccaaatttgtaaccgcccaaggggttcaccttgtccactgcctagacagagccaattcatcaagacaggcaaatggcaatagagaaagagtaattcatgtagagctggctgtgcaggaaaccagagttttattattactcaaatcagtctcccataaatgattttaaaaaattgaatggaaatgactagtaaggtgtgcttattcagtatctactatctgcccaacactacctcgggcatttgactagaaagaaatagatggcattcttgtttccaaaatgtttgtgatcttgtaataaggccaagatagacaacaattatcacatagtattataattgtttactaatcaatagaccaaataatttgaatccttgagggctgaattgtatctttatttctcctatgttatcagtgcccaggacacttagttagttaatagcaggttctcaatgttcctgacttaactcattgactagaaataaaatactaaagtgtactctagggaccattagtgaacatacagtatgtacaggcgatttgggagacggtacatataatgtgattccattcccactttttttcgaagcaccttttatcagaattaaacatcatagttaatttgtgttggtgtcgaaagggcattagatgaacagtaggtatacaccagaatctagttacaaatgtaactgagagacagtggaatctacaggaaggacatgggctctggacttagattatcgaagtaccaattcaagcctcactagggcaagttacccagcttttaaatcctgtaaaataaggataatagaggatcacctaccttatatggttgtggggattaaaaaataaagaagtgcatgacggtatctgcatatatgtactatatgcgacataggtaatccactcctcctctctgagcctttgttactactatgtaaaatgaggattaggactttatttgatctattgatttcaggtctcatgtcctttatcttattgccttacttttgaattttgtcttttttgatccctgtccccatctctgttacttccggacttttaatttccaattctacacttacacgttccgattttatgctgtttgtactgcgaaattccacagtttgtattttgtacacattcattccttaataaagacaaatccagacaaacctgcagatggcagacacagtggccccagaatacaccgccgcagcccagagcgttgcatgctgggatttgtagtccgacgctccacacgcgcttccgcgcctctccagtttgaaagcgagaggtagagcgggtaggcggggtgctgaaggagaagcgctctcgaagccccgcccctgaccttttccgctcgcgaggtttgcacgggagtggcgcgccaggccgcggaaggggcgtggcctcggtccggggtggcggccgttgccgccaccagggcctcttcctgcgggcggtgctgccgaggccggcctgcgcggggcagtcatggtacccccttgagcgggctgtggcggagagcggggcggggactggctggagggtggcggcccggcggggcgggggcggggccggcctctggctccttcttcctctgcatgtggctggcggccgcagagcagttcagttcgctcactcctcgccggccgcctctccttcgggctctcctcgcgtcactggagccatggcgttcgccgagacctacccggcggcatcctccctgcccaacggcgattgcggccgccccagggcgcggccsggaggaaaccgggtgacggtggtgctcggtgcgcagtggggcgacgaaggcaaagggaaggtggtggacctgctggcgcaggacgccgacatcgtgtgccgctgccaggtgaggcgacggggcctctcatgggaagccgggcccgggagctcgggctgcctggctcctggtgcccgggaactcggacccagaacccggatccactggccaaaatgaggtgtcaccttgaggctctctcctcctgtcctgagctgcggctacgtggagaaatggcgggaggtcggggacccctgacctggagcgtcgggtgaaacttggggtggccctggaggaagaggtgggctggcggggagcctttgagagatgcgcgatgcctggcagttgcagttttgcgtctggcgagtggtgctcagcgccgggactgaggccggggtggaggtgggatgcggtccgagtttgaggagctaccgcccgaggcctgctcccaactcttccgactgcgggcggagacccggcgcgacggcagaaccccccatcaccgcccccccgccccgcccagggcggcggagtgggagtggattgtttcgaaacgtcctgaaatcagactcaccgatcccccatctgcaggaccgtggcatgcagtgctttgcttcctctggtccactttgttgacatccaaacccacccacctctgggctttggactgttgttttagggccctgagtttcttgtttttgtttttgtttttacagtgtgctccatacatgaaagttaaggagaaattacttttactagttggtcccagaggaaggaatcccttctctgttcaaaaaaagtgagggaagtaaatacatggatgtcaaattgagtatttggaaataaatatttgcattgttaaggtgacatcgaaagtgaactttcggaaaacgaggtggtaatgtacttctaacgggagacacgtggttttcagtgtaacctttcttcctatttgtcgtttcctttgacgcagcatacagggtaaggcctttgtaaaggctctcagataactctctccagtttcaaaattctaagcagatgagcaataaccactttcaaaacaaagcataatgtaatatttgaagttaactgctatctgtttaggttgcaagaatatttgtttttgaacatgcatggcatgatatgatggtgccatgctgtatatgttctagtaagttataggcccccttgaataccattttgagcatgcagaaacaatgaaatcacaggtatgttaaaaagctaaatgcaaatactgcaaatattctctgatttaccttgtttcgttttgttttgttttcatttagaaatccaccctgcccattctgaaatagctgttgcactaattgcctcttaggaaactgtcactaccacctctccctccttcccttccagcctattatttctccacccctctggcaacacactttgtaccttagcaatcttcagggtgttgccattaaattcctgccccgcactttcttaggaaatactccagaaatccagcctttacctaccttttgtcttacattcagatctggtcatgctgtggggaagacgtatccgaataccgagctttcttgctgtcgacagcgggagagaggctgaggcctgtgtgtctccttcactgacatcttgacatctcgttaatatggaaatagctcaggttgagctacactatgggttgtaagaaggtttggagaacacaaccattatggtatttattctaaaggatcctcaattttaatattctatggagaaatattagaagtagtttgtagcttggagaaggtgttactaatgttaccgagaaagtagtcttgaagtcatggaccaacctgatctgatgcccttggaaaggctagagaagtgattgagaaggaactaagtttggctttaaaatgttagctgaagatagtggagaaacaaatgaggggccttgttgggcagacttccctcacctgtgtatttttgacttaactaccttccttatagaatccttatgttcttttagtgctttttaaragtgtatcattaggattctttattagtcttgttagcaaaaaatagatgagtaatgaatagatttaagcattatctcttttgtgatttaccttggtaactttgtattatttggttagccctagtaagctggcatctacttaatgaagttcccctaggttataaaattggaatgttgaagttcttagtgagtgtgtatagagagctggaaaaaatcaacagtaagacattgtgagcttggattgccttgtttgatgtcttaagttttgtgtgttagtgaaaatatgtcctttgttagagtttaatatattctgccatatttatgtcatgagttcaaattttattcagtactgtttctccagaagtgatgtacacataatgtatccgtatttcaccagtagactcataaggactttctcccaacataaaatatagttttaaaaagaaaaactggcattgcatttaatgataaattttaatgtataaaatgcctttttggaaacaatagatgcaaacctagtggcgttttcactcttaacagcgcttaaggcctgtgttgttcagattcaggatttatggggagttatttataacttggtaggttccccagatccataaatatgtaggacttgcatcaaaggacaaccactactgctgccttaattttaaatcaatatttattttaagaagaagagagaagaattaaatagaggcccaaccctgggtacaggtcaytcatctagtaaacattgagtatctgcaggggatcacttagcctgggagtcaaaaatctgaaaaaggcagggattgtgcccacaaggagctcacaatctgggggacaactgctgtgtaagcaaaagtgttgagaaggtcgggatggagaaaggtactagtctaatacgtttctcaagaggttaaagtatgggaccaagaaagtccctttctggcatcacaaaaggaagcctaatactgttttttccccagttctctcaaagtaaaatactgtgctttgttttctgtattttgctgagtagaagctacagaaacttcttaactatagtagtttataccaggctttaagcaaaggcttacttatttattgttcttgaggaaagtaacttcggtggtcttggttataatgacacacatgaagttgcctgtgatcgggaaaggctagagcagtgttccgtgtgtattctctccaaggcttcaaagtcaataaaaagagaaaatactaaagttagtcataagggaaagcacaccccatcacttgatatatgtttataaaagcttgctataaaaataaacatactgaaaaaatattactattttctagctagatacaagtatctgctgaagatctgaaaccactattagtgttaaagaagcataaaagacatatcagcagcaaactaaaactttctccttgaaatagaaaaggtgaaagataatttaaaagaaaataacgttagtattatttaatgccttgaccttgtacagctaaaatgatctgccagactacttcccataattttaaggatagtaggtaattagcatttaaggtaagccattcttccaggtttataacaattgctatttccatttttctgattctttttatatcatttatagcatttccctagtatataagtatttaccaatgtctgttatactatacttggttaaatcttgttctgtttggttactgtgctttctctactataatgtaaattttctcaaaagggagacttcttccttttcttattctgtagcacctaatactatatgaagcagaagggaaatactcaaccaatgtattctgggtggcaagatcacccctggaaatttatttgaaataaataatagtaaccctttcttgtaattgttttaacatctctctggacaatttaattgactggtggcatacatttaaggcggaattcctagcattccttggattaacatttgttatttagtttttcagctggaattttttacattgtaccattcaaagtctttgtttatattaaaatcttatctcttgtttttaggagaaaataggtaactgatatttatatctttttcatgtatctcctcaacatatttcgactgaataccatgtggggttctagtaactagttattccccgctgaggacagtaaatctcaatgttcggtcaatgaggatgtcctattgcagttagtaaatatagtatcctgtcagctctacttttgaggcatgagtttttaaacgtgtatgagaccatctcagtggtgtctgatcaaaattattctgtttctttaactttggtgggaatggatgggtttgttggatgtttacaagtatctctaagaaaaactgttgcctagagcaaatctagaatgaaccaataaattgatatttacttaatagctttctttctgtaactggatacgaatccagctatcttatctctcagggactgtgtcagatgttgacaccaaagattagtgtggatgagctacatattgataaattaaaattggtgactattgtaatacttttagcaacagaaacatcaacattcagtattgcctgctgaaagcaatgaaaagaacaataaatgaaggggagttcctgtggctaatctggctctgggatgggatagttctttacattgaaccaaaatttatatttgattcatataacaaaattcttttttgaaaagaggctccatgagatttctaaaaatgagatttttgtctatattaagttttaacatcttttttaaaggaagaattttattattgagaaaacttttttgacttgaaatctgtagtttaatttcaatgtgtttttaagaaaatattttcatgaatttaattaggtgaatttttatcaaacatttacaaagagctgtgtgacatcgttggtttatacatttttggttggatgtcttatggcctcatctatgaccctggtttggtgagtgtgaaagaatattagagtttggtacccagagtctaaagcttcttaattaggaacctaagattctctcaggcaaggcccctttccactttcattgtgagaagttatttcataatagtaatgttaggtctaaaatataaggtatctgaggttttcatcatttgtgacatttatgtgtgtatgaaactagaaggtaactataatcatgcaaagtaaagtggatacctttaaacctttaatggataactgagctgggatatctttgctagaaagaaattcagataccctgtgtatttttttctcttgctgtctagtgtgtctggttactgctacatagttaaatttgatcaacttgctggtagtaacttaacctgctctactttggaatcataagctaattgcagttatgtgaatgctttcatgaaagaacaatcatcatttataactgctttattgctgtggattgataagtgctttagttttggtgaatggtaacatgtttcatctggaaaggaggagacacagatcttacaatctttaccctgaaagcagcatagataataagcattgactccaaagatttttaggctcttaagaagtttgaagattagacaaaaaaatagcaacccttttttggttgctgaaatagttcaggggcatgggatctgagacactgctgctctctcctgtaatccatagtggccactgacttcctgatgttcattttgagctctgtgattacagtaggttgttcatatattcaaagcaaaaggacaaagataagacacagaggcctaactagcctgaaaaatgcctctgggctttgtgcatgaaattggtagcccttgacacttgggcctgtattctggaaaagagaccattgtttcaggtttacaacactgaggatcattcactgccttcatctctctacyacagcagaaatgcacttgggggagcgaagaaaggagtgatttagggaaggagaaggcccagtagtgaaaccaagttaagaatcaagagtcacttttgtaaactaatatcatttaattcctttccaaactttttttttttttaacctcccctggacctttggagcttcttagctagaagcttacacatattagcatttcctgatccaaaattttattctataattggatttgacagcctctggttctgaggagtcatggaaagaaaattcaaaacacttgtcttccgacttccttaaactaaacatcaaattaggaagaaaaggaatgcatggaaaaactgagaacagttacagaataactaaatactattatatcattcctctatcctgcagtaatgctttaaagtattgtccttgacagcataaaatgttattaatatctagcaatcattttaatattcagtttcactagtacaagatgtaaattcagcaaggtgtatattatgttgtagtaagttttttttgtgaatcatttgtgttctttgtttgcaagcaatggaaagaaactatctcaagcaaaatggggatttgtttaaaggaagagcaggatggtggcctgagatgaagcctgctcctggaatttcagcagctagaactggcaacctttttctttaggatgcttcccgtaggtgacaggcatctcagactgctattgctttccttctcagtactcaaattcagattcccaagggagaggagctgactggctcaggttggaacatgtttccctgcctggatcagtttgctgtggctggggggatgattcctatgatttgcaaagtaggggaaaaggagggggactgagcatacaaaagctataactaacctggagttaattttgtataggaaaakaaggtatgaggaagcatttgttctggattgttctcatttataaattgttttccaaaactctaatgtgctattgacctgtagtgcttttctggaacaaaaaatagagttaaattggtttttattattttaaccttaattaaaataatgaaaattagctatgtattgatggtaaaaactaaaagcatacatcagaaactttgcttttcagctttgagaacatagaattttagtcctgctttttgtttctatcatgatgttccagtttatttcatagctctgtgatgagatacattttttcctggtaattaagaagcttatttaatattttctttgtatttcatcttttttttttttttttttttttgagatggagtctcgctctgtcgcccaggctggagtgcagtggcgggatctcggctcactgcaagctccgcctcccgggttcacgccattctcctgcctcagcctcccaagtagctgggactacaggcgcccgccactacgcccggctaattttttgtatttttagtagagacggggtttcaccgttttagccgggatggtctcgatctcctgacctcgtgatccgcccgcctcggcctcccaaagtgctgggattacaggcgtgagccaccgcgcccggcctgtatttcatcttaatgtaagaataacagtcaaagaaaattggtaaaatatatactatattaggggatgttttgtgactgcaattgaattttctttcatatattgttcactttaataaaattaacctgcatttattcttggtatttaatataagaagaacatcatataaggcattataagcttatgcttttcctcaaagaaacctgccacgtagctacttgtggactcatgctgttttttgtttcttggggtgttggtggggggtagggtatatttcagaagtaaaatggtttaaaaattggcctcaacctgaaagcctgccatgcagtgttgtggcactgatggaagtgtgaatgagaaggcggtgtcagcacgtggctggagagccgctccgccactctgccactccgcctccctgccacgtggcttgtgaggagccactaaacctttccgtgcctaggcctccccatctgtggaatagtcagtaccacctacttcataggggtgttgtgcggactgaaaaaaacaatgtcaaatgtttttaatattcagatgcaaggatgatgtctgaaatctgtactgtataaaggctacacaaaaatggacagacatttggttgactgtgccagataccaaaaatgtacgttcagaaaagcattttaccaactcagaaatatgacttatttctaggaaaaacaaagttcaaaaaattatctctgagatttattactaaatgttttccctgttggatataattgatccagaaacaacgttgagattccacagccctttgtttatataactattaattgaacatattctatttttttgttaagtaatatagaatatacagctatgataatgaaaagtatttgttaaatgctacaagagtgactgggatcataagtgttacgggagtttggcaaagaagcaggaggtagttagtgtaactgttaatgtgattataagactaatacatttgtgggagataacttaccaagtttggtttgtggaaaatttggattgagaaggaaattgtatgtttccgttagaagtagaacaacaacaacaaaatatctcccatcatttgtttggtactatctggcctccccagtgctgcttgggagaatcatgaaacatgatgaatcaaacacatccttgctgttgctcatcctggcacatattacacagagttgcccatgggcccatgtaggagcagctccatctgcccttctaatacataggtgggagactgagggggtgctcgtatttgaaactgtttttggttatggtgctcatatttgaaatgctttgttttactgtctgctaatatgtgacctctccttgaaccagtataatctctgtttgaggacaattgcctgagctcccaaggtgaattttgcctatttacataatctgaatattttaggttaacatccaaatgggcacttcaaatttctttatctgttgcattttataaaatacagtatactaaaacttgcttcctatatagattacctcatcaagaaactccttatgagcagctctttctcagttctcctgaagacccttctgtgtagtgtgcgtttcaagattaaaagttataccccaactgcctcacagagcactagtgaccaaatataaataagcacttagatatttccccctaaatcccacgtaggataatctcgggtgtttctgggtatatttaacaatgtttccatacggaaacaacttaaatgatatttaaaccatataataatcaatgtaatactggttattgaaaaatgttgctatttttcaataactaatatttgaatgagcaaactttataccaccatgtgactttgtcttttactgctgaactttccagcctgagctgcctataaacttggacaaacttagggagttaagccaatttttccccctaaagtcatccatcacaaccatctgcctaaaaaatttgtgtgtgtgtgtgtgtgtgtgtgtgtagagcaaccatcatctctttattatggttaattccatcattactatctgtcttggtaaaatattagctaagagagtaagcttttgttacacaataagaacattgtcattcactaccagtaataattgtcaaataataattcatcaaatgattatattggtatakctataaaagtaattttgtgtaaattaggagacctactttaagggtctactccaaaaattagagtagtttatttttaaccttgagcaaatgatgaattttttaaaactttttgtttgtttgtttgagacagagtcttgttctgtggcccaggctggagtgcagtggcgtgatctcggctcactgcaagctccgcctcctgggttcacgccattctcctgcctcagcctcccgagtagctgggactacaggcacgtgccaccacgcctggctaattttttgtatttttagtagagacggggtttcattatgttggttaggatggtctcagtctcctgaccttgtgacctacccgcctcagcctcccaaagtgctgggattacaggtgtgagccaccgtgcccagcctaaaaactggttttaaaaaaataaactggttgtagttaggcagggtgacatgcacatgcggtctcagggactcaggaggctgagacaggaggatcgcttgagcccaggaattcaaggcctgcttgggctatagtgagaccccatctctaaaaaaaaacctggtttgactttgataataataccttatttgttgtctcaaaattaccaaatactttataacaacttagtaaaaattcattaaacttagtaatttttaacaagaggaactgaaatacaggtaagaattatcctgtgagttatttttaaaagactaagttggccgggcgcagtggctcacgcctgtaatcccagcactttggaaggccgaggcgggcggatcacaaagtcaggagatcgagaccatcctggctaacatggtgaaaccccgtctctactaaaaatacaaaaaattagccgggcatggcggcaggcgcctgtagtcccagctacttgggggactgaggcaggagaatggcatgaacccgagaggcggagtttgcagtgggccgagatcgcgccattgcactccagcctgggagacagagcaagactctgtctaaaaaaaaaaaaaaaaagactaagttaagataattaatgttcttttggtgtataatatatgtcctaggattctatcagaattgatgataaaattacacaagtgtgaagtaataatatataccaggaagtttattgcaagattgtttataatagcaaaagatgggaaacaatctgagtgcctctcattatgggaccagtatgataagttatgatatatatacatttacaaaagggtaaaatacaactgttaaaagaatgagatgattctgtttgcaaggttatggaagtacgcaagctgcccacatgtatatagtttgctaccattgtatatgtaaaataaaacagtatatatgttttatatgcataaatcacctcaggaaggaccaaaaacttgtgctaactggttgtcttacagcaagggtatgagaaaggcttcacattttactgtgcatagttctgtgccacttggtgtctgtatcatatgcgggaatttcttattaaaaaaataaatagtaaaaaataatgcctctgttccctttttggtatcacttgaaggtgttgcccatcatccctgtttccgtctgcctgtgcctttccaaagtgtgtcttacagattttagcccaacactgccaagttkttttttaaaatatatgccatacattagtcttcaaagagttctttgctttatacggtgcaaaacaccgtgtaaataggtatttgctttttgaagattttttttagcagggcctatttttctagcatttttgtgacctcataattgggatgatttggtaaaagttgtaacattcaatttgttaaaaataaccttgtgaatcgggcagaatggggcaagatggtcagacagaaccctttaccaattgttctcctacaggaacaccagatttaataactatccacacaaaaaagcaccttcataaaaaccgaaaatcaggtgagcaatcacagtacctggctttaacttcctatcactgaaagaggcatggaagagggtaggaaagacaatcttgaattgctgataccaccccttccccacccccagcagccatggggcgctgagagagaatctgtgtgcttcgaggcaggagaatgcagtgatcataggactttgcattggaactcagtgctgcccttgtcacagtagaaagcaacactgggcagaactcagccagtgcccacggaaggagcgtttagatcagccctagccagaggggaattgcccatcctagcattgagaacctgagttccagcaagcctagccagcacaggctaaagtgctctggggtcctaaataaatttggaagatagtctgggccacaaagactacagttcttgggcaagtcctggtgttgtgctggacttggagccagtggacttggggggcatgtgacctagtgagacaccrgccaaggtagctaagggagtgcttgtgcccctcttcccccaaccgcaggcagcacagcatgcagctccaggagaggctccttccctccacttgaggagaaggaagagtcaggaggatttggtcttgcagtttggatcccagccacagtaggggcagggcactgggcggagtcctgagttccccgtcacaggccctagttccagggcaaatttstagacataccctggkccagaaaggaagttgctaccttgaagggaaggacccagttctggcaggattcgttacctactagctaaaaagcccatgagccttgaataattagcagcgttacccaggcagataaggaactctttgaagactaatgtatggcatatattaaactccacataaacaaagtggagtactattcaaccaaaaaaagaatgaaatcctgtcatttgcaacaacgtggatggaactggaggtcattatgttacgtgaagtaagccaagcacagaaagacaaacttcacatgttcccacttaacttgtgggagctaaaaattaaaacagtggaactcatggagatagagagtagaaggatggttaccaaacgctgggaaaggtagtggtaagagtggggtatggggtggggagatggttaatgggtatacaaatatagttagataaaaatacatctagtatttgacagcacaacaggggactacagtcaacagtaattatacatttttaaataactcagtataattagattgtaacacaatgaaaggataaatgcttgaggtgatagataccatatttacctggatataattattactcatatgcttgtatcaaaatatctcatgcaacacataaatgtatgtaatactacgtggcaacaaaaatgaaaaatgaaaaaaatagcctcacgatcagcctagtgattctgaggcaatatagttttgattagtattttttaatgttatagaaggatgttgttaaagtttttatttgttgcaaatacatcccgagtatacttttaaaagtgtgttaatattgtatagaagtttaaacgtgtaatcagctgacataaatgtaaaaacttgtgttttcttccatgttttttaaacttagaaaagttatctggttacttaatatttagtctcctttgtacctactttttgtaatttgactttttccattttgttatttctgcataagcttcatagaatggaaatttaatcatgggtttatagtatgattctcagtgttagcagttccttgagccaggatattactttatccagagatgagcaggttctagggatctgtcactaaccaaacctacaagactggtttataaatcagaggccaaggataaccagtatttgggggagatacttgttaagtccatgtaagaatacaaatttcaggtcacagagttgcttgacacactcttaggatgatgggaattctatgaatatttrcatcaagttagggtaactggatagattactctatcttaagagattttttgtgtgtgtgtagatggaatatcatggttagattgccataatcctccatagccaaagacagactaattgctctatgtatttttttcactttttttcccctcttttaagaaggaatatgattttctgtctttcagaaacctgaattccccaatttctatattctttcaggataatcactcaagtattctacagtggggaaaggagacagccaaactattttaaagccttttacaaatgagtagaggtggtaaatatttgggctctcttaagttgaccttttggcaggargtcattaattcactttggagggagataggttatttgtagtatttatcatcaggctcaattttcccctatcttacattttagggaggaaataatgctggccatacagttgttgtggattctgtggaatatgattttcatctcttacccagtggaataattaatccaaatgtcactgcattcattggtaagtatataaactgaactgcatggagattcccccccaccagttgataatggcgtttattttttattgtcaaaactgttttcatctctcactgaccagatggttcattgatctcttattaattttgaccttgataccttctggaatatacatgactttggctatttgtcactgtaagatcttttaacagtaatactttttggaatgattactttgcattcatctgtgctcactgacaatcttaattctgtaaagaagtattagatcattgaatcagttttccaaatacttttttttccacaaatactttcaaccatgactcatagtaagaaatatgagaggttcatgaatttattttgaacccttacaataaatgatgcaatctgatcttttctactctccttttaatttttaaaaatccttatcacaacctactaaattgatttatgaccactaatagggtgtgattccccaacttgaaagatactgatttagcatgtactgtgaccatgttccatttgcttaaaattacataattagtttccttcaaaatcatatttcactttgttttcaagaaattttcagcttcattgagtataattctagtgttttatattcactatattatgttccattatgtatttaaattatactcctgtgtaaaacttggaatcatttctgtggtaacaccgtggtaaatcagaatgtcctttaagttacatatgtctgagttatagatgtttaccgttgggatttgttggttttcctttaggaaatggtgtggtaattcatctacctggattgtttgaagaagcagagaaaaatgttcaaaaaggaaaaggtatgaaagaatgagtctacttggtaaccagttgttctttgtaaagttttattaggatcttatgccagacgaacaacatgtttgtcttatgctttaaaatttcgggctattatagacgaatttttaatgtcagttattaagttttattcattataaacagtgttttaaacagaagaccaacatcttatgtcattgtattaagtcctgatttttttacacattagtcatctacaaactttatcttaagatagctagaattacaatatgtrggtgacaaaactaggaaattcctgagtttgcacactgtcagtcttgttttctagaggatctggagctctcctttcgttgctacaactcagggataaaagggaatttttgttttttcccatgctacacagatgtaaggggaatcgtttaggtccctccttctaaatgaagtaaatgctgcttttatacaatatatccatgcccatcttcttaaaataaatagtcctggattcttgcctttcctgatctcttggatttttagagatgtgtttacattaaccttggccatctcattagggtgtgaggggaatttgataatacaaatacaggttaaacatccgtaatacaaaaatctgaaatccaaaatgctcccaaaatctgaaactttttgaacacagacatgacaccacaagtggaaagttccatacccgacctcatgcagcgagtcacagtccaaacataggcacgcacacagtttattcagtgtttccaggggaaaaaaggccttctcccctttcagctttcatatatcttttccatgcacgcccagattcccccacaccagcgttcccacagagggcaataaagtggcatgtgtactagctggatgtgccaactgtggtaataaatgaaatatagaatacaggtggagactggaagcctgcttcgttgttgctgctgtttgccagctgatacagatactctggtgctgctgctgtactgcttacttaccctgaacacatttttcccactgtattggtggtatgtcatatttttgactgttaagtacttgtgtgtgaataagtgtaaggaaatgattactcatcagtagcatataaattcagagtcaagaatgttggtgttggtaaacaaccacagatggaggaggaagaggaggatggaggaggaagagaaggatggaggtagaggaggaggatgaaggaggaagaagagaaggacagaggtggaggaggatgaaggaggaagaagagaaggacagaggtagaggdggaggatgaaggaggaagagaaggaggaggaagargaaacaaacttcgtttcatgcacaaaattatttaaaatattgtataaaattgcctcaattgatatgtaaggtgtatatgaaacataaatgaatttcatgtatatatttgagccccaccccccagagatctcattatttatatgcagatattccaaagtccaaaaaaaatctgaaatctgaaatattctggtatttggaataaaggagactcaacctgtaatacataattgaggaaaatcattagtatagttagtttccccttgaattagctcacatttaaaacactcaattactgttatagtatgttcaggtttgtttttttttttttttttttttttttttttggagacggagtctctctctgtcacccaggctgcagtgcagtggcgtgatcttggctcactgcaccttctgcttcgtgggtccaagtgattctcctgcctcagctttctgagtagctgggacgataggcacgtgccaccatgcccagctaattttttgtatttttagtagagaaggggtttcaccgtgttagccaggatggtctcaaactcctgacttcgtgatccacctgcctcggcctcccaaggtgctgggattacagatgtgagccaccgcrccccgccctgttcaggtttaaaagtagcaatctgtcttcaggtgttcttaaccactacagaaccctgtctttgctaccatctcttttctcctttctgcgtttttacctgtgacctagtctgtgatttttatattgatgctgctctctgctctcatctcctttaataagtttgtcctactccctttttccttctagcctatccaaccctgctctttatctactttactgaatttcttggtcctattttctttattatatctcctaaactaacttcagaatacatgtttgtatgtcaaaacaaccrtagaaggggaggcttaatattccaggtttaccttttagcacattaccgaggaggttctcttccttaatctataaggaatatattttaaaaataaatcttcagggaaaaacaaatttttcattgttaaagattagttttgaaatgtttgcagcttagcaatttgtctttagtattgtctttaaagaaaaacatcgatttgggttcatttgttcattcaagcgtctttttttttttttggagacatggtcttgctctgtcgtctatgctggagtgcagtggtgtgaacacagtagtgagcctctaccttctgggctcaagcagtcctcctgcttcggcctcccgagtagctgggactgtaggcacatgccaccatgcctgactaggttttttaattttttttttttttttttgtagagatggggtctttctgtgtcacccaggctggtctcaaactccaggcctcaagcaatcctcctgccttggtcacccaaagtgctaggattataggccactgctctcagccaaaagtaatttttaaaaccacttactggataacaggccctgtgctatgaaagctcacagcccctcctctaggtcttccacagttaaatggggggacagatatacctcacaattcactgtagtaagtacagtaattgacagtagtactttagaagaattaatgaaaaagtttattttctttaccttttttttttttttttttttttttaaagatggagtcttgctctgttgccaggctggagtgcagtggcacaatctyggctcactgcagtctccgcctcccgggttcaagtgattctcctgcctcagcctcccgagtagctgggattacaggcgcccgccatcacgtacccagctaatttttgtatttttagtaaagacggggtttcaccatgttggtcaggatggtctcgatctcctgacctcaggtgatccgcccgccttggcctcccaaagtgctgggattacaggcgtaagccaccgcacccagcccatatttgttataactatcttttgggaaaggatgccattcctaaaattaactcccttctggcaaatttctccctgccaggtacctaacctccccagcatgatgtttttctaccatttgccttttggattcctagaagtattttatttggatgtgactggtttgaatttggagcttttagagcaagacatttggaaagatagcatgtgagtgaatttatgtatggaatgaatgacatgtgagaaaactcttgttagacatgatgtttcctatacagaagaaaagatacaaacttgattgcttcagtaaaaacacttttagagattgtgtttccttttttgtgagacagcatctcgctccgccacatacactggagtgtagtggcacaatcttggcttactgcaacctctgcctcctgggttcaagtgattctcgtgccacagctacccgagtagctgggattagatgcacccaccaccacacccagctaatttcgtatttttagtagagacggggttttaccatgttgaccaggctggtctcgaacccctggcctcaagtgatccacctgccttggcctcccacagtgttgggattacaggtgttagccaccacgcctggcctagacatatttctaaagaaattaagatcttaggctgaggtgggtggatcacaaggtcaggagatcgagaccatcctggctaacacggtgaaacccagtctctactaaaattacaaaaaaaaaattagccaggtgtggtggcgggtgcctgtagtcccaactacttgggaggctgaggcaggagaatggcagtgaacccgggaggtggagcttgcagtgagccgagatcacaccactgcactccagcctgggtgacagagcgagactctgtctcaaaaaaaaaaaaaaaaaagaaattaagattttaaaactgctatacaaaatattcaattaaatatatctttttcccctttctaggactagaaggctgggaaaaaaggcttattatatctgacagagctcatattggtaaggtggatatattgcatttatttgtaactatctttttatctgaaatttatcaaatgaaagtatttagtaactaattttgtcttttatttttatttagcgtaagtaggatggattgtagtaattgagttctaaatacaaaaaatacttactaatttttttcttttttaacagtctaggctgaaatttacctgtttgaaaaaaaggttagcgaagcaaatttataatacaagcagtatttcataagacatctctaattctatttaaaaataagccatatcaaaatgcaaagaacatttatttgtatacgtaatattcttgtaaaagtaagtgtaccgttttgcagatagagtgactctttgtgcctaaaatgtagtagttattgctttttaagtgattcagattttattcagactaacctaaatttcaaccactaccaataaatttgggattttcttctctgttatttttctctttcagaaccaatggagttgttaattagcagtgacatgatttaagagacaataaccagaaaagaaataagtaaaaaccacrtaggaaacttctctgtgattgatctgcactcttaaattgtatttaagtatgcgtgtgtcctgtggcagtagctgctctagttttaacactggcctctatttaaaaggcagcctcatcaagatacttacagtatttctcagccaagcacagaaatcaaataacggtccctccagataacagccacagacttgaatcctatgtataatcttagtaacccaataaaataacttatttgaagtaaactctattggattaacatacagtttctatatgaaactggcctcttcattacattgtttgccacaggcttcttaatctgtaaagtctgaaaagaacaattttttgtttttactgaaaaacagttttatgttaatatttgttgtcctgtatgttgtctattagtagactggttatccttgaaaacaaagactttgatagctgtttgttagtgtaagtggataaaatgtggaatacttctgtatttaacataaagtaagcttgtgagtagtttatatttcacctgattatacttaaactatgaaaatattatcagtaaaacttttatttaaaagacaccttatttccagaattattaatggcatagatgcataaccaagacaaaaaacaaaggaaacaaagaagctttgcagtcccaaatgataacatgcaatttggataaggacaaaagggttttgttttggttttcagaagaaggaggttgtcatttttgttgcctattttaagcttctgattttaaaaatatttatattttgtttgttagcttatcttagaacttgaattttaaacttatrtatcactattgtgctataatataggaagcaatagagtattactaatattcttttttttttagacagagtctcactttgtcacccaggctggagtgcagtggggtgatctcagctcactgcaacctctgcctcccgggttcaagtgattcttctgcctcagcctcctgagtatctgggattacaggtgtgctaccatgcccagctaatttttgtatttttagtggagacagggtttcacttgttggtcaggctggtcttgaactcctgaccttaggtgacctgcctaccttggccgcccaaagtgctgggattacaggcgtgagccactgcatccggcccaactaatattctttcttactggcagtctcctagttatataaggaaaaatatgtttttgtgaagtacttttgtagcatttttgtttgcttacacttactactcattagctttatttattctgttaccaatagtcatctttatcttcttttaccttcatgattttatgtgtagctttttggtatccattgttcctgttgtggataaagcaaggcgctgcattagataatgaaaaccactgcttatcttcagaactttccaatggctttttgttatgttgtctgctctgtgaaattcagtatcttaatcagcataccgcaatttaggattgcaaaacagaataatccctaacacctgccgtttgaataacgtatagcatcagtgtatataatcagataattgggctatgtgcagatataaatatacgctgatgatatcagcctgttggaaagaggttagtgttaagagacatatccctgttcctgtctggattctccatcttccttcttcattgcaattgctttgggtctgtcacttaacagttccatccttggtacaacatagaggttaagcaagttacttaattactttagaccaccaaaacaaaacaacaaagtagtaatgggaaggggtcaaaaggcctagagtaaaaggaaagtaatgtggtttaaccataataaatgtaaatgaatattattattttatttatagttatatttctttaattattttttcccataagtgtatgaccttaaaggaaagtatttctgacagaggactgagcctgtagaagataagcgcagactgaaatgtaggtgttagtggtcatatgtgtcataatgggtgtgttaatgctttaaaacrtatatcactaaaagcctgtaaggttcacttcccagggcccttaaaaagtcttataagaaacatattttttattttattttattttattatttttttgagacagggtctcattctgtcacccaggcgggagtgcaatggcatgatcttggttcactacaacctccacctcctgggttcaagcgattctcgtgcctcagcctcctgagtagctgggattacaggcatgtcccaccatgcccggcttatttttttgtgtttttagtagagacagggttttaccatgttggccaggctggtcttgaactcctgacctcaaatgatccacctgacctggcctcccaattacaggcgtgagccacggcccggccagaaacatgtattttagtatagtcaattctataatagtgaaaaggaataaatagtatcattaaaaaatcaaataactaattggaaaattgtctgagaatcgttgctgtgaaaccacttcgatctttgctttagagactcccgctgtcaccatggcactgaacggacagttctgtaagctccattgtaatttaaggcattagaattctcatttcagaactgaatacaggatctggcatatagatgcttcaraatgttcatttatttccaaggatttaaaaaattttccataatatgagattctgtataaaagtgtgctgggtgatatggagcgtagtacaatggaaaaaactataggctttgaaatggagggatctggatcgaaatcttgattatggatcctctggcaagtgatttcctttccggtcattagttccccaatcagtaaaacaccttacacaggttgtgtccacaaaggraagaattttatttattttattcatatatgtatacacccaacagctaatttaagtgctgtacttggtcaagatgtactgttttttatcctgacaaatactgctctgtagttttctttagttttgttgtctgtttcagttttagtgccttctatttttctgaaagttatgtgtgaggttggtaatatttcttctttaaatgttttatagaaaatctttgtgaggaagtttttatgaattccatgaatgttatgaattttatttctttaatagatatcgggatattcagatttttctgtttcttgtgtcagttttagatatttatgttttctaaagaaatgtgttcatctaacttatgaaattattggtaacttttttagtcttcagtaatgtccctcttttattcctggtatccattttattgattttgtgggtttttgatttttttttccccaaaaaataaccattttctctattttctgtttcactgggttcagctctttctcttctttctactttctttggtttaaatttgctcgtttttgtagttcctttagaagcttggatcatgaactctcaaccaactgacctccctccctccctctctctctccctcccttccttccttccttccttctttgcttcctctttcttttctaatgtaagcatttaaaattacatgtgttcctctaacacatgtaattatgttagcgatattccgcaaatattatttttacaatcayttccattcagttcaaaataacataatttctattttaacttataagttgagtatgatgttcatgtttccaaatattggaagattttcatgatttctctctattatttataatttaattttattgtgaacagagaatatgtatgatcctaatctttgttgagacttcttttatggctcaggatgtggtctgttttggataatgtcttcatgcacttagaaagaatatgtgctctgctcttgttgagtagagtgttctttaaatgccaattaaatcaaattgtttgatagtgttgttcaaatcctatatcccaactgattttctatgtgtgtattctatcagttactcggaggagtgctgaacctccaacagtaattgtggatttgtctgtttctcttttcaagtcagtcagtttttgcttcatgcacattgaagctctgttaggtacatgtatgtttacaattctgattttgatgcattgaacctttcctcattatgaaatatcctctttggtattaacaaccatagctttttatgatcaacaggtttccctggtactgttagtaggaaagttttgatgctgtatatactaattagttacacttcagaagctaaatttgtattatgtgatttaaaagtatctaataagctatgattgttaataccacaatatcctttttatggtaatattccttattctgatatctactttgatattaatatagccactagagttgccttaagattactgtttgcatggtgtatcgctttccatcctctaataatccttagtgtatctgtgtctttagatttataatgtatttcttatagacaaaatgtaggtgggtcttgcattttattcattgtgacaatttcatcctttaattggaatgtttagactagttacttttactatagttaattatcactatggttggatttatgtctgcccttcgttttctttttatttgttcttttcctgctttcttttcgattgaacatttttaatattatctccactgttaacttactagctatacctcttgttttatgaatttatgaattttggtagttgctctaggggctgtaatatgcatcttttacgttacttgagttaccttcaaatatttcacttagaaggtttaaacagttgatttttttaaggaaacttaaaaattattaagttgctggccagttctttacattagtatactaatgcaaggacctattgcattaaccttttgccctgttcactgaatctcataattcagtttgtactataagagatgctttttcagggaaaatggcctgagaagtggttgagacacttaaaatttaaatatgaaatccagattwgttaggtggctgttcttttatttaatatctatgtattaaatgcctactgtgtcaggtatggtgctgagcactaaggattcagcagtagaaaaaaccaaaagcatcccttaatggagcatatcatgtattagtgaaaacaaatcatatcaatagaaatatgtaatcgatgtagcatggcatatagtgctcagttctgaggagaaatagtaactcagagaaaggagctaggcaatggcaggcagtttggaggaggaggtaggggcctacaattgtatataatgtggccagggaggtttcactgaaaagtgacagttgagtaaagacctcagggagatgtgagaaagcaagcaaagtggctattacatgtaccaagtctcacaccaagcatagtataacattaatcatattaataaaacttaactataatagtaaattaaaaatttaaaaatgctgttaataaacttagctaaaggtgcacagttatgatggttttttttgtttgcagtatctaggctgtagaaagtgaaacagatattccaaggctgttctttcaaaacagtaatagtggaggcattaatgctccatgccatggtgaagtcttatgaaagtaattattctgattacagtaattgcttcctggggcctagaaaaaccaaggaaagcattagttctatgacaaggtactaaattaatttctgaaaaatatggttcacctgctttccatcaaccatttatttgtgtgttgtcagttgcttttttactttctttgagcatagaaaacaaaacatttacattcaaatrtctttttattcaaaagaaatgagaatggcgtactctaagatctcagtcttgtcatgactgatttgyaaaatcagggtttaaaacagcccttcagaactattctggcctctcaagtaactgagaaagactattgcttgggcaataaaatgggaacatgatgataaactaacccttatagctcagaattattgtttacataaagagtatttattctttttcattgctatatagtatccccttatatgaccatttcacacttttaaaaatccattcattctaccattgatgaaaatttgagttgtttccaatattgggatattacaaatactattaccctgagcattcttgtagatagatatcttttggtgtgcagtatactgatatggctttaaagatgttacttttatctaactgtgtggcactaagacagatactgcttactagatatttttaaatcacacatatttagcttctgaaatataactaattagtatgtacagcatcaaaacttttctactaacacaccagggaaacctttgatcataaaaagatatgattgttaaccttgccaaacacagggggaggactgccttgatagttttagtagtgtctcaaaaggagggaattagagaagagtacatacatggttttaggggcagggttaatcagaggatgggtttagattgggttatcagacttttctagcttcaccatctataacttcagtatcagtcttctaatagttctaaatagttcttttacagatgctaccactaatcccaagaaccttatatcagtctttctgttaaacatctacacatttcaacttaattatttggaaacagtgacatcattagcaaaaagaagctatggttaaatatgctaaaaatcagtaaattgtacatcttaaatggatgaattttgtggtgtataaattatattcccataaagctgtttaaaaacaaaacagaaaacaagaagccttggttagaagttcagagaccaaaattctagttttgcctcttctataaaccatctatttattgagtcagtaaatatttgaggacatgtttgcaccggaaatcaactagtaggctgaactgacatgatcctaatactctcagagcattggcaggggagagagggagtacaagttatgtgtaggtgtagaaagaggcaatatttcatgcagaagtacatgccttgtagctgagggctgcaaagaatgccagtgtgaccagagggcagtgagggtggcagagcatggtataagatgaaagtgtagactgaattttgtctctttttttagagcagtggaaagccatggagttttaagggcagggraggtgtgaatgccatatttgtgtcttggaaagatggctttggctgcatgacagcatttggattagagatgtctaagaatggaaagaggtacacacattaggagactgcagttttggtgagaggtgatggaagctcgagactagtgaggaaaagggaggtgtcaacatgagccctagattcttggagtccagaacttgaagaaaaaagagtatttttgtaaattgacctttgttaaattttagggcaagatgtttcaaaattaccctcttaatgacttattttttaaaatagtatagactgcaataaataagaacgaaagatcagacattttcatattaatgtactagttggtgttataaacttctatcatcacttctaaaaatgtgtttaatttattatactgaaatgaggctgaagggatttataacttcagtaatttgaaatgcggtggattttgcttttgtgtattatctttgtttcaacaactgtggttttatttcccctcagtatttgattttcatcaagcagctgatggtatccaggaacaacagagacaagaacaagcaggaaaaaagtatgtgtgggtttttgtttttttggtacagtttaagcatatgcagacctttatattttagttctagaccagaagtttaagaaaaataagtattagaatatcctgttttagagaaaatcagtaggattatgaacatatacttagcaagaaataacataaacagaaaatagtcatatgtaactttattcactgcaatgatctgaccaggagacctacatctttcttgtctgacttaaagcttgtttggatttgtttttaagtttgggtacaacaaaaaagggcattggcccagtttattcgtccaaagctgctcggagtggactcaggatgtgcgaccttgtttctgactttgatggcttctctgagaggtaactaacttgtgtttcaaaatggaaggaatgaatgcattttttgattttttttaaaayctagggtgcaaaatgatacagtcggtattctagttaaatagtggtggttggcttttttaggtttgaaatattaaagttatttttattacattctaattcatccttggttacagattaacttyatgaaawataacatgacggtgatttaatagaatgtcctaagaagacaaagccagagttatatttaagaattgaaatatggaatggtttcctgagaaatagaatgattccaggggctgtggctgtccttgggtggttacattctaaggtcttgatccttgcattttcaggcctagagactccttatgtcctcccacccagaaatcattagctctcagatactggtgaattattgtataccaagctcaacttgaaatcaacagatgctacgttaacacatgctttctgtagccagatctccttgggaaacctagtagtcatcaaaaagctactcagtgactcaatgatagggagttggttgtgtataataacaagtggcatcaaagctataatgacattgtatcccctttcgatcaaccactcaacatttgtctgcactggcagtgcacctttactgaagaatattagattgctaatgtctgcctctctctcttttagaagtatcatgtaaactgcccccttttgttgttgtacagtataatacagttaattcagatttaagtcttttgtgtttacagattttagtcattccatttctcttccctccctacacacatatcaccttaattatattgttgctatgcctaaacttgagtaaaaaaataatttgaatgtcttacttattcatatggctgatctcctttattaaattttatttctcagaaggtgacttcagtttcaggattaatttgctgttaagatcrtttaccatctgcagaaaccatttgaatgaaatgatattatttgaaatatttttcacagagtggtaatgtcttgatttatctgtgtttctcaggtttaaagttctagctaaccaatacaaatctatataccccactttggaaatagacattgaaggtgaattacaaaaactcaaggtaatgctttctggcatctttaatgttctttttaatacttgtttgccaaattggcatctagatcttttcattcatgcaggctttgggtaagaactrgcaaaggaaattgtttgtcttggacatggtatgtttgagtgactttacatgatatggcttagacaaaatattgagtagggagcaggaggagtacctgaagtaaaggagacagagtccagatcatatgtctcatgtgcagtgacagggagtttagatcttaccctggagataatgaaaagctactaggaaattttgaacagaaaggagactagatttgcatcatatawaaatcacttctaacaattggaggacagatcagcaaaggctgagtgagaacttttgaggctaaccaacccatttaggaaggataaccccatagggccagattctttagcactgcactcttaagagacaaataaggtaattgaccaaagattagtcwtttcttggcaactagtaggtgtcagtggtgcttacattggccagtagttgaaattcctgtcctcttcattctttcaccttttacgatttttgatgaacttcaaactgtttcctgtgaatctgattattacttcttctcatctatagataagtatcaatatcagttccagaactaagtaggaatctacaaacctcatatgccattctagaataaatgcagaccttaggtctgcccatccactaagttctaaaaaaatatgacctacaaagaacattctaaatgttaggtatttgtatttcagtgcactgattattgtgtagaatagactgccattttctttttattcagctatgcaataaatattttattttattttattttttgagacagggtctcgctttgtcactcaggctggagtacagtggcatgaacacagctcactgcagccttgacttcctaggctcaagggatcctccctcctcagcctcccgagtagctgggactatgggcacaccaccacaccctgctaggtttttttttggtagagatgggttttcaccatgttgcccaggctggtcttgaacgcctgagctaaagcagtctgcctgccttggcctcccaaagtgctggggttacaggcatgagctaccatacccagtctgttatgcaacaaatattttaactttttgactagcaacttggaagtatttacttgccaaactatgagtatggcttttcaattccattttatatgtgttccatgtgaatgtaaagtaggtgaagaataataaatagaattaggtaagaagattcttataggtaatgtatgttgaaccagaattttaaggaacaaagaacgtgatgactagtgtggtcatttcaggcataaaaataggactaaaacaggaatcagtcagaaattgaagactatagcccatgagtgatcatacatttatcagtgggtattaacacactcaggtgggttcatgagtagattctggaatttccataatagtctacatatttaaacatagttgaacctaggtttcatgcagttatgctataggccttaggggaagctcttggttattttacatttttaattgagttctgaagttaagcagtaatactaacaattaaatgttttgagaaatttttataatgcccatgtgttacatagtattggacattatctactagtaatagtgtagagatagacatgttacagtaataggataaaatttaaaagaataacagtaatcaatcactaatagttgcatacttggcagtgtaactcgtggccctcaccacattttgagaatcactgatgcaagtttcraaattcatggttggccaaacacagtggcttacacctgtaattcagcactttggaggctgaggtgggaggatcacttgagaacagcctgggcaacctgggcaactcacctccaccaaaagaaaaagaaaaaaatttaggtggtcatggtggtagtgcagctacccaggaggctgtggtgggaggatcgcttgagcctgggaggtcgaggctgcaagtgagccatgttcccaccactgtacttcagcctgggtgacagagcaaggctctgtctcaaaaaatgaaataaaataaaaaatttatggttttgtggattatattataaatgcagcttttcaaatacctcacaaaatttaaaagcacattgtaatatagtcatttatttttattttcctgaaagctggtttatgaagtatgactactttgctgggagggttttatttgcagtgaggttaatatagaacctttgaatttcactgtatctctagtttttgttgagctaatgctcttttctgttcctggaaaatcagcatgagacatgaaagctaatccaaatgttacaatagagtgagcaccgtcaccagcccttttctactttgcgtttgtcagttttcatgtcataaagtcaggtaatttattcttgttctggttatgttaaacgtttattagtatacatggaaattggtttttgtctttgtgtatagggttatatggaaargattaaaccaatggtgagagatggagtttattttctatatgaggccctacatggaccaccaaagaaaatcttggtagaaggtgcaaatgcagcactattagatattgattttggtaagtgagatatgacttatagttaagggagcttaactgagccctaagtagttaaaatataaataattaatgttagcattaaggagttttaaaacaatgtttttagcttgtatattcaggaatgatgaaatttgtcatcttgtggcactctttttaaaggaatattgcagaacacacaatacatgtgttacgttccctattttattagaaaaataaaatcatcatttgagttcagtaggtctgaggttctgtaaattgtggttttcgttggtttatggttcaaaccctggaactataagataagataaattctatggaagaatctgcatctttaattcaaccttttaaaaatgtgtacattattattaagcaagatttataaaagcctatttatataaattaactccctgggcatgagactctgaattcagagcatttccttcatcttcaaaaggttaattaatgcttaacttcttttgtcaaactactgcctcattagtttgttgaccgtttcatttaaacatgatttctcatgattagtctgattgttctcagcttttactgacatttcattggcttttactgacatttcattggcttttgactccaagtaaactattaaagaaagtgtatttctgtatggtagatatgtatttttgataccatagtatgtctagccagtctggaaagaaaacagagtgtctacttggtagagtgaatagttaaatatgaaggagatctttgggggtgagaaagtatgccactctttaattagctcttataattggagggttattccctgagtagagattaaaagctggggaaatgttgaatcctacaaaattcttgtgttgccgtcactccaggttgctacaacactttaaatattcgtatgagggagtcatatttgttttacactaacaggaaactatgaaaataagtagatgagtttcagcattaaatttcttcataatccagtaagtgagtagctgctataaagagctgagtcagtaactgtacatgcattcaaggagcctctctgtataagcacttgcgttaaagctctgacctcgtttttatgtcattacagctaaaatgaataaaaagtaaaacactgagtctttgagagggcagttacagttcagatctgttagatacctataatatactcaaatgcagaattgtaayggtaattctgttttaaaatgtgttattcatgtgtctactatattttaatgtctgtttctgtttttagggacttacccttttgtaacctcttcaaattgtactgttggaggtgtttgtactggtttgggtatgccacctcaaaatgttggagaagtgtatggagttgtgaaagcttatacaactagagttggtattggtgcctttcctacagagcaagacaatgtaagcctattctaagtaaataatcaaaatgtattaaaaattcattcttcttttttttcttaatgaattattgtctcctgtgcctttcacttaatttgcaagattggtcagaacaacattttcttaaatacataattttggctggacgtggtggcccctgtctgtaatcccagtgctttgggaggcagaggcaggcagatcacttgagcccaggagttcaagatcagctggggcaacatgttgaaaccctgtcactacaaaaaatacaaacattagctgggtgtggtggcatgcacctgtagtcccagctactggggaagctgagtaggaggatcacttgagcccaggaagcagaggttgcagtgagctgagatggcaccatggcactccagccggcgcaacagagcgagactctgtctcaaaagataaaataaagtcaacaaaaataaacaaaaactatgtaattataatgatgccagaatataagagataatgaaatgatagctttaagcagaaaggggcaaatcaaggacttcggtagatcataggaaaaacaagttgtagggagtgaccttagcttagatatttgagcatgttttcgatcttagttttcttcagaagggcattatgatatcaatgacttattagatacatttgccttatggttttcaggaaaagcatcaaactacagctcttggaagaactggctggattcgtctatttaataaatacttttttttcttaatctgtcaatctaaattttaggaagttatctgtataacattgtaaaaaatattaacataaaaaaatgataataaatgaagcattccaaataatgcctccctcagataaaattcatcatctctgtggaattctatcttcaatttagttattacctgaaagatktttatctcaaagaggctttgctatgatctctagcatatattattccaccagatatatagcactgctattctaatcctaaagttcaattttctgttctgtaggaaattggagaattattacaaacaaggggtagagagtttggtgtaactactggaaggaaaagaagatgtggctggttggacctcgttttgctcaaatatgctcatatgatcaatggatttactgcgtgagtattcttcagaaacatttatttcaggaaatcatagatgattaatggccataggtttaattttgtggagtaccttaataggaaaatttcaststttagactccatattgaaattgtagtgccaggcagaagtagaccaagatatagggggaagggtacacaaggagagagatcccaagttatcctcctagacatccaaggttgttgaaaagaatcrtgatactctaagtatagaggcaggcagaatagggtatgtaggcagataggtrgacagatagacaggtgggtagcacagacaccatgagcatgtacagccgggaggcgatgtacctagtgatccgcgcatgggcttaatgtctgagttcctggattcagatctcagatctgtgcattatgcttgtgtagctgagcaagttaatcatcctctgcctctgttttatcctctctgaaatctatataacagcattacctacttcataggggtattttaaaaattaggtgagaaacgtagtgagagcctatagcacactgcctggctaactgaaagtgctcagggaaagttaagttgttattaatacrtatacatgaataggtaaataaatgtattcatatctgtattagactgaacttccagtaaataacaataaagttaaaaatacagtttttggacgagaatcccaaatttagtttgttatctaatttctgcagattttctctttaaaacctgttttccagtcagtttgtcgggaaattttgatgtatcatgaagaggtccttgatgtggtttttctcactctttgacaatttctgaccagaagggtagaggtgatggtaaccagagtgaagaattgagggatgctggcatgtgtgtaaatgtacatgtatcttaatcatccatgtagtgtagtgagttctgctgtgttccacggccacagtgcaaccttaactccaggcagccctcccacaaatacatgttgtttgttcatcaatcataagaaagctgatctgggcatggtggctcatgcgtataatcccagcactttgggaggccgagaggcaggaggatcacttgaggctgggagttcgagaccagcctgggcaacctggtgagaccctgtctctacaaaaaatacaaaacaattagctgggcctggtggcacacgcctgtagtcccaggtactcaggaggctgaggtgcaaggattgcttgagcccgggaggttgaggctgcagtgaaccgtgtttgtgccactacactccagcctgggtgacaaagcgagaccctgtctcaaaacgatcaaaaaagaaagctaagcaaaattcatcagtgaaaatctgttacaattactagcaaagtaactcagtgtatattgtcctctagcgtcttatgtgtggcacgctttaaaatrtaatcctaaccagttttcagaattgctttagaactttaagctttgcatgaatttttctttactcctgcattaatcaaattagatattagaggctttaagagtctgctcttttaacattgccttttcttccaaaattaggttggcacttaccaagttggatattttggacatgtttacggaaatcaaagttggagttgcttacaagttagatggtgaaatcatacctcatatcccaggtattttcttttaggcaatatctaaaggatattataaggtgaatgtattagagcagtttcataaagctcttccatataatttgtgatagatagcgacaggtttgatatgccctttatgattagtgcaaatttgctcacttattattagttatttggttcatagctaatacttatttaggtgttggtcacaacaagcatgtgctcaaactcaaaagaaaaaacatggacctctgascctagccatacagctcttgagtctcatcttccctcctttgaaagcaatttccatggaggtgtttcttccttccttggggaagtatgccactcttgagagtgaataagaagaggggtaagaagagcccttgttaagctggctctcagtacattagccctccctatccttcaggccccatgaatgactttctctrcyctttattctatagtagtcatttgataaggattaggaatatgccaaatgaaggaatattgactagcttaataaaacttgatgagctggtaggttttgtgactaccttatgacttctgtttcttaggaattaaggttagctctaagttcttagaaattaaatgcatattatctttccttgtcttacatgtatgtaagtatagagggagtctagatatcttataaaaaagtatctactgccattgtaggacaatattcacttggaaaactggctgttccagtatatgttatgtcctggttcttaattctatttacaaagctatttcaagagttataacttcaaacacsaaaaagaacagtctaaccaagtataatgacatgtggcaaggtctgtcatctatggtaatgtactctagaacattacagcaaattcttttaattaaactattaaaaactaacaraacacataaaacttktccatttcatgtgtttaattttaaagctgtttttggtcaagatcccccggaaccactcttgagatggagatttgtatccaagaagtgtagtagagaatgctttcagcagtagcacttatgaaagaagcagagggactagttgaaatacagtgcagccaatcccattgggagccacagagctagggtggccctttagagttatactaaattgaggctagtagccagagctttgtgcctcccaacaactagccacgaaataagagctgttcctcaagtgaggtagctccctttggccaagagcagttcctggagagggactgagctatgaatcagcaacatgcagtactccccaccagcagcagagagtgcttaaagagggtaaaataagttgacagccttctgggaatagctcctgtaggattctggttgttgtctttcctagggaaacttataagaggaaggttagtggagtaaattagcccctattgtggctatcacagcaggaaagtagaagcaaaagtcccattaagctttaagctaaggctccccctatcatgttggatttcatgtgccaaagccagcaggcaaggaatggagtcactggaagaggtaaatgattctgatcagcatctccaatatgcttttaaacccactggtgaatttttatttctagaatttccatttagctctcttctctacttcctatttctctactgagattccctatctgttcactcaataacaatgaaatttgcttaatttatattagctactttttttctgttagtctaacatttagaccatctcgagcttctcttgaytattcttttgcttggttgtggatcactgtttctatgcctaatgactattgattgatagtcattggttgactattagacattgtggatgatatattaaagagactcagattctgttatcttcctctgaatagtgttgatccttgttttaggggacgattgaattattcactgatcatcttgaacttgtatagtttggttttatgctttgtgtgtagttacgtggaaaacccaagatgtttttcaaactttaagctggtatgagtcagtttccargatctatagatcttggcagagcttggtttttggcttcattatgggaggtttgtaataggtttcactcaagggcgtggcttttattcttaaagagcagcctttctggtggctctgctggataccaggagagttaaggtataataatgagatctcttcaatccagcagtgctggagcaccagtgtaccctgtcccttccttttcagcagcactactgacttctagagtctttgttccacccccaactgtgtagcagctgaggtctggtaagcctctgatggtcctgctctttacctgtggcgtcctcctgtagccttgggactctcacatggacttctggggggcccttctctctacagctcctgtctgatgcctggcgctgctgattctagctgcttcagctttcctgaagtcaactctctacctccccaggtcagtggagctgccattctctgctgacaccagtgttctgaactgtggtcaggaaatggtccctaggcagaaagttgggtggcttctggacttgcttgtgagttttctctcccaggagccatggctttgtgcctgcctgtcrttcactgcctagaaagagttgtcattttgagagctggttgggaactgtgtattttatgatgactagaaatggaagccccactgattctcttaattcctcctaccatctacaacagcagttccggcatacctacttagtatggttcattactttttctaagcttccaagagcattcctagcagtatgttttcatcatctctgtgtcatgcatcatgagaggatagtcccataccaatatagtcttactcaactttgttctaccacctgctgccccccttgacccagcatcctcaggatccagttccatatacactctcttggtacctactggcaaatgttgtcttgttcctgcagatcttttagaatacagtccctttccttccttagtaggcccagtgcttccttagccaggttacactgggacctgaacctagttatttactggccaggagggggaaggtgaaggtggatgtgagatgggcacatgctgccttgcaagacagaggcctctgcatcatcttcaagcaacaggatgccacaacctttaataggaagtaatgggaccttttgcagacccagagagtttggaaaatctagggattcaggattttcaagtatgtcaactcagatgtcccattcagtctcagggccccactttttcccaaacaaagctctgactttgccatagcaaacttgctggattgcagaattcagctttttctggagctttgcagtctgtatgattgaattctcatcttaatcattgtctttttctgctctctgctgtaggagatggaattttgtctaagttctgccagacaggtttcattatctttctccagttcgtgaatagcgttcatcaaaagccatccagttctgttgttccaccgtgctcgaatctcagtgcctcagatagaggctatccatactctatgtaccccagtggcagtcctcattgccagccagccagctagccagtgattytgcctcttagttctcattttagagctatcttcctctaaccattcctggtgccagctatcttagattgagttccctaggaaacagactccaatgtagagatttgcacataggcgggttagctcataagtgcactgagcaacaacatctgtgagggagtgggagaagcaggattaggcagagggagaaattgcactgcaatatagttgcaaaaaagccttcactgatcccatagggagctctggagctaacatagcccttgaaagttgtcccaaattaaggttaagtgcccaggttgtttctattcctacattgacaagtcaatggatatgggctgctggggggcagcagctccctttggtggaggacgagtgctgcagaggctctgaactgtgagtggttcagtaggcagagctcccacagctctcagtcttgagagaaatctgggcagagtaccatagcatccactgtattgactcaagtcaaagaaacttttctttagtacatgttcagtttccattaggggatacagagaaaatacgtagaataatgaagaaaatttcaagtagaaccctagatttctcagaagacagcaggtatgcaggccttctttctgtgaagttgctgtcatgcagatctacaatccctaatcaatagaatggaaattcaataagctttaaaactggaaagttttaagtttggcacccagattcatttggcagcaaaaccagtcttgaactaatgttagtattacataatctttatcctcttatagcaaatgatcatatgcgttgctgcagaaatatgtttgattatagaatactactccagatggtatttgcgctgttttacctttctactacctgaagaattctaaatcccaaaacatatgtggctccaaagattttgaaaagacattttgaacctacaatatatcaaaaagttgtttgacagtaaacagtgtgtgccatgaataaatgtcctctttaacttttagcaaaccaagaagtcttaaataaagttgaagttcaatataagactctcccaggatggaacacagacatatcaaatgcaagggcgtttaaagaactacctgttaatgcacaaaactatgttcgatttattgaagatgagcttcaaattccaggtaaacataaacactttgtgaataagttttttcttttctctctctctcttttttctttttttttttttgagacggagtctcgctctgtcccaggctggagtgcagtggcgggatctcggctcactgcaacctctgcctcctgggttcaagctattctcctacctcagcctcccgagtagctgggattagaggtgcgygccaccacgcctggctaatttttgtatttttagtaagagacggggtttcaccatgttggccaggctggtctctcctgacctcttggtctgcccacctcagcctcccaaagtgctgggattacaggcatgagccagcatgcccggccaactgtcttttcttttaacttgcctatgtgcctttgaaatagaataaaggaaagatcattgttactttacagagtgcacatgatttgcataaatgcccaggaagatacaaagtaatatttttattccttaaagtaaatacgatgctcatctttaaatagaagataatagattacttctcaccctttctgaccctgtctttaattcttagtctgttttttttttatcctgtgacattgtctcattcacttctccctcttaataacaaatcctcatgtatctctaccaccacaaaaaatgttgtgtgtttttggggggttaaaaatggtttatggtttgtttgggttaaattacccttgagatttggagtttcctgaatatacactgggaaataattggtatagaaaatgggaaatctcactagaaaaaatgtaagaaaaaatttttaaaaataattaagcctatttattaaagaacaaatataagatggygagggagttaggcataacaacgtatggctgtatctagttatgtgaagtcattcttttaacagatggctttttccttgtatcgttttgttggcattgatggatatttgaaagataagaaaaagtgaagtgtgtgggatgtgtcctccgtgtaaaatctcttttgccttgtgcttcgtttccagcatgattcttgttttccaaattactagttgcccctcccagcatgatgtcaaatttagtaagcatatttgcttactgctcttggtcagcattttcttgaaatataaacagcagtgagtctaacaaaaatctgtaaaataccacgaaggttgatcctaacagtaccttatggaagctggcaattctgcaaataatctgaaaccatgtgatgcagatgattcgatttccatagactcctgtagtgggcagtttctgaggctgtgcaagttaaaatcatattctcatctagatgttgaagatgcttatcttggcctgttatcaggaacttgatcaccaactttctgtaggtctctgctggtgttggtcaatattttactatcctaagtcattaggaaagtgaaaatattgcacagttaaaaagggaacagtaaggcatactgtcctgtgctgggtcttatttgtacatcctgtttagaaatcggcacagtctgctaacagaatagagaacagcaaaaaggcacatagggaaaagttatggtgatactkagaaaagtaggggactacctgttttaatcccaacgagtgaacattagagatgaattgattcaattccttttctctttgtattctcctagttaagtggattggtgttggtaaatccagagaatctatgattcaactcttttaatgattgccagtaatgcaagaaacactccttgagagggaggggaaaagactttcttaaatatttcatttatgacctgcaaattcaagaataaagacactgaagtaagtttgaagccctacagttgtttccagtcttttcagatggatgcctactgtggagattaactttggcatattccagtgtcagctttctttagctggaattgccaaatcatttgttgctcctgctgctctcatggtgccacgtttttttttttcaatgtttagtaatagtataatccatgttgtttgatatcaaaagtagaattrcttttaatgtagtttttcttcattattgtcattgcgtgttcttaagttttacccctattagatggtaagaacaattaatgcagttttgcacaaatatttttacattctgatcattcagttctgtcattgtaatctttgttgttagaaacaaatgatgaaaacataggggttctgtaaacttttgtaatgctatgaattctgtttaaattttgggctgtctattttctgctgaaaccatgcaaaattgagctttggtggggctgggagggggttatgtattcatgggacctttaatttgtacagaacacagaacttatttctgtcagttatttaatacattgaaaatttagtgaaatgttcaaagagaatagatgtttcccaaaacaacaatctttatgttaaaaatagtcattaaaagatctgttgtaatatatggtggatatttttctttaatttcaaacattacctctgaaatgtgtatcttttcttttttatcttaccattaattttaaatctagtggattggttttcaacatcgtgcctgccgatatgcctacagaatcatctgtaagtgtcaaaatgaacccacgttgttagccataattttgattatgcctttatttctcctttcttgaaaaaaaaaaggtgttattttgacaattaggcataacattgttttgtagattatcttttaatgaactattttaaatgttaaattaggtgccacttaaatttattttattacaccatgaatagctgattaaaagaaccaaatatttctagtatgctttgcgtattgtgtttttgttctactaagagaggttagtaatagtatataggaaggagctttatctctgtagtgtaatacttagttcaagaaaaattctcaaataggagcagtatcgttagactcaataagtataaagaacaatacagattatcctacaagccaattactgatagtaatgacttacatgtaaaaataatttataatgaatatataatttctgtttaatagagaatgaatgggcttttaaagtctgcattcttatcttggttgcaagtattgcactgttaaaatgtatttttagtaatggttcagagacagatacaaagaactcattctccttttcaagtatatgtgttagactcttcctaggtattgggtatgcagtggtgacaggagcacagtcttcctgaaacttaatgtagtgggggacagcatggtaaccaaatagagatttataaacagtagttacatgctgcagtagaaaagtacaaggtctgatgaatgagaatctagtcttaatttagcaggggttggagaaggccattaatggaaataatgtctaaacagaccaagcagatgcgtacagagcagacagagggacatgtactgtacaaaggcccagaggctggaaagaatttggaaagttggagcaactaaacaaaatgagtgaggggctgatgagattgattagcttagcagtaaattcaaggagtaaaatcatggggggtttttttgtgttttcttctttttatttttttttttgaggcagagtctcgctctgtcacccaggctggagtgcagtggtgtgatctcagctcactgcaacctccgcctcccgggttcaatcgattctcctgcctcagactcctgagtagttgggattgcagtcatatgccaccatgcctttattttataggcatgagccaccatacctggccaaaacccatgttttacatgaaagaagaagactataatataatacaagacatacagtagttccccccttatccatgagagataygttcaaagacccccagtggatgcctaaaactgtgggtagtagtaccaaatcatatatatactgttttttccaatacatacctgtgataaagtgtaatttataaatgaggcatagtaagagattaataacataataaagtagaacaattataacaatatactgtaataaaaattatgtgaatgtgtctctctctcaaaatatcctctattgtactgtatttccccttcttgtgatcatgggagatgctacagtgcctccgygatgagatgcagtgaggtgatgtaggcattgtgatgtggcgatgggctactgttggccgtctgtgtaatggcttggtgtcactcatttcaagggattccttgctgaagtctttgcatgggctcagtgctttctggagtgacacattgccgttaatattaagatgttttctgttggtatcttccacccataaatggaatgccttttccatcttaactaagcacttgtcatgcaccgtggccacagcttttgcagtttgaggtgtgacagcaaaactagcgtgaatttcttcttcctccttcaaaatttcacagatttgttcttattgtaaatcttagcaacatcagcatatgatttgtctttatttccttcagtagaacttccaccttttcacttgaaatgagtactttacagcttccctttggcacacctgaattgccagcatcactattcttgtgctttggggccactctttagtaaaataagggttccttggacacaaccactgagataccaggcagtcggtctgataaccactcgatctgataactgagacagctactaagtgactaacaggcaggtattgcagacagtgtggagacacaggacaaagggatgattgacattctgggcaggacagagaaggatggcctgatgtctcattatggtactgagagctgcttgcaatttgaaactcataaattatttttggaattttcaatgtaatatttttggggcaggtttggcctccagtaactaaaaccamcgaaaatgaaaccacagatgggggagagactactgtattacgcttaagaaggccctaatgggagcacaggaaaattgctaaaactgtatgctctaaatttcaaaactcagtagatggaaactgcgtggcagaacaagacactgaaatgggaagagggcctatttagtacatatttttaatatactaattaatgaatatagttgaatagggatgcaagaatatctgaggcatttttgagaaagtaatatgttgagagaggagtctttgtcctgccagatgttagaacattacacagctactgtaataaaaatatatagcattgctatgagaaagaatacataagagaaatggaatagacattccagaaatagatgcaagcatatttgggaacttaacacaggcttatctaatcttagggaaagccgccttcataaaaacagcaaactcaggaacctaaggaaaaaatgttcggattgaactgagtttatgtatatataaatactatatgtatataaaatatatatatagtattatgagcaaagttttttttaaagcctgagaaaacaaacttgggaaaaaatatttcagcgcatatccctaatgtacaaagagcgaataaagtgacaagtaatagaaaaatggacaaaaaattaatatatatcaagcaatccacagaaaaagaagtatcaatggcccaaaacatggaaagtatccacctccacctttcgctatagataaaaaaatataacttaacaatgagaaaccacttctcatctcagattggtaaatatgaaaagatcagtgctatcaagaatgtggagaaatagatactttcacaaactgctggttacagtgtgaattactacaatctgtaggggaagcaatttggcaatatcggttaaaatttgtatttgcaaatcctttgacccaccagcaatcacattacaaaaagaaaaaagaaggccgggcatggttgctcacacctgtaatcccagcacttgggaggctgagacagatgggtggatcacctggggtcaggagttcgataccagcctggccaacatggtgaaaccccatctctactaaaaatacaaaaattagctgggtatggtggcaggcatctgtaatcccacctacttgggaggctgaggcaggagaatcacttaaacctgggggcggaggttgcagtgagctgagatcgtgccaccgtacttcagcctggggtgacagagtgagactatctcagaaaaaaaaaatacatttttaaaaaagaaaaaggcagccctatttcatatgtaattgaaaacaatgtcaaggtctgttaatagcataagatggtattctatgaactggaagagaggagggaataaaatataaaactgtgtatatttgttggtctaaaccaaggacaaaatatgcaagggtgtatatcaaatggttaacgttggtcactaggagagaacttgaagttttctttaaatatttttgtactgtttatatttttaagagcatatagtttttttaaattatttttaagaaatgagttataggccgggtgcggtggctcacgcctgtaatcccagcactttgggaggccgaggcaggtggatcacaaggtcaagaggtggagaccatcctgtctaaaatggtgaaacccccgtctctactaaaaatacaaaaaattagccgggcgtggtggcagactcctgtagccccagctactcggggcggggctgaggcaggagaatggcgtgaacccaggaggcggagcttgcagtgagccgagattgtgccactgcactccagcctgggcgacagagtgagactctgtctcaaaaaaaaaattaaaaaaaagaaagaaatgagttatagcagttattgagaataaattgctgtttcaaatgtacctgagaactgagtacattcagtgattaatagttttaggaatccacagtgtaaatcatggtcagtatacttttggggaaggataattgagatgttgacatttgacatcattttacaggcctggtctttagaaaccatatgaacatccacactgacacaaataccgatattataaatgaaagaatatgctatcattagataccagagtcatatactgtacaagctaaaagattgcctgtttggaaaatgcttccagaatgtagggaaagaagagattattggctttgtaacttgttgcccactgcttttttctcttaaggttgaaaagtaattttgcttggaaacaccaacaaccattagcctagatgtttttgtagaatagcgtccatctttctagaatctacctgagaagaaaagatctgggtgacctttatacacagcatccatcagtcttctttcacctttcttagacttttttctggctttgtcattttattttttatcaaagtggtgatacatgcatataatgtttatttaaacaactttattgaagtatgatttagacactgtaacatttgtctattttaaggatacaattcagtgacatagtgaatttacagaattatgcaactgtcactactgtgtaattttagaacatttccatcccaccctaaagattcctcctgcccatttgtagtcactcccattcccacacccaacctcacaagtctactttttgtctcaatagagttgcctttcttggacatttcacataaatgaaatcacaatatttaatctttttgcatctggctggttttttaaatatcttttgagacaataccatgtgcttcattcctttttaatgctgaataatattctattatatggatataccacattttcttcattcatctgttcatagacacttgagttattttcagggtttttttttatattgtgatagtactgctrtgagcatttgcatttaagtctttgtgtggacataggtttttgtttctcttaggtagatacctaggaatggaatctctgggtcagatcatacatttatgtttaatgtttaaaagaaatttccaaagtgactacatcactttacattccccccaacaatgtataaggatttccatttyttcacatcctcatcaatacttgtcattgtgtatcttttgattataacctttctagtgggtatgaaccgttggtttcttgttttaatttgtgtttccctaatatgactaatgatgtttgagcatttttttatgtctatttatatatccttggtgatgtttattcagatattttgcccatttttaaattggttgttttaattatataagaagtcattatacattctggatacagattctgtattagacataatttgcaaattttttttctagtctgtggcttgccatttcattgtcttggtgatgttttttgaagtgcaaaagttttaaattttggtcaaatccaacttaycagtttttccttacctaggttgtttttggtgtcacatttaaggaatctgccaatccaaggtcattaaaagtttcatttgatgttttaaaaaaatgtatagtttaaactttcacgtgtgaaagaccatttcacaaaatcatctgtgatccatgttgagttaattttcatgtgatgcgaggtaaaagccttaagtgtatctccttgtgtgtagatatttacttgtcctcgcaccgttagttgaaaatactattcttttcccattgaaatgcctttgcccctctgttcttataccagcaccacagtgttttgatactgtggctttatagcatgttttgaaattcaggagtacaagccctccagctttgttcttttcaagattgattttgctattctgggtcttttgcgtttgatataaattttggggctggcatcagaaaaatggcagagttttagctccaaacacccatttctccacagaatcatcaaaaaacaaataggaactatcagaatgaactttgtcagaactctggaaaacacaggtttacatcagtcaggtaaacaatagataaagaaaaaggcaaattaaaaatggtaggaaagctgtgtggtgtttttacttgtccttgcccatcccctttccaggtcaatggcaatcttgaagaaagcaacctgcattgccagtgtgggaccctggtctctggttctaaagggagcagagcagaccttatttgcaaattattgtggtctttctattttaacctctctgtggctgcctgaagggctgacacagagtgcccatctgtgttttatctaactcagaattcacctaggatggaaaagtggtgagcattgcttggaaacattataaggagaacaaaaaaaccacaactgcttggagcaaaagatgatatacacaatctaaagcctgggaggaagaacagaggagagtttatttgagaaattaggtctttcaaaagtgtatattagggaatatagaaagccatatacatgctcagggcaggacacatgcccagaaaagacctgagaagatcctaagctctcaccttcggctgatctctaagtttagtgcaagaagagaaggctgaggcagagttggaatccctgagcccagagctcatgtgtgtgtgtgtgtgtgtgtaatcctagtatttaaggaaatctttgtcaaagcactagttgaacacaaactaaaggaacagagacttcagtaactaatacaataaggagtacagtttttgcaaaaacaaaaaaggttggaaaaatcagtaacacaatcttagacttcaacaatcaacagcaaaccctagggaaaagaaaaactgatttacagagtttccacattataatattcaaatgtccattttcaataacagcaacaaactacaaagaaacaggaaagtatggtctactcacaggaaaaaaaaaaagaaaagactaaagccatccctgagaaagatgatacatcagacttactagacaaggactttaaatcaactgtctcaaatatgctcagagaactaaaggaaactaaagaactaaaggaactaaaggcaaatgatgtatgaacacaagaatatccaagaagagaaatgataaaagggaaccaaatacaaattctggagctgaaaattatggtgactgaaatgaaaaaatttgctagaggcattcagaagatttgagcaggcagaagtaagaatcagtgaacttgaagataggacaactgaaattattcagtctgaggagcagaatggaaaatgaagaaaagtgaacaaagcccaaggaaccctaccatcaagtggaccaacatgcattacgggaatcccagaaagaggcagaaagaatatttgaagaaataattcatcagaaacttccaaaatttgatgaaaggcatgaatctacaaatccaagaagctcaatgcattcaaagtagaataaacacaaaagagatctacactgagacacataatcaaactgtcgaaagacaaagatggagcatcttgaaagcatcaagagagaagtgattcatcatgtacaagggaccctcagtaagattaaaagctgatttcttacaaaaatcatagaggccagaaaaaaaaaaatgggataacatttacttaaagtactaaaagaaaaaaactaagaatatttggcaaaattatccttcaaatatgaaggagaaattaagacataagtagataaacaaaagtggaggaagaatattacccataggcctttcctgtcaagaagtgctacatgtccaggtgcagtggctcacacctgtaattccaacactttgggaggccaaggtgtacggatcacttgaagccaggagtttgagaccagcctggccaacatggtgaaactccgtctctaccaaaaatacaaaaaaaattagtgaggcatggtgatgggtgcttgtaatcccagctactagggtggctgaggcagaagaatcggttgaacccgggaggcggaggttgcaggagaatcacttgaacccgggaggcggaggttgcagtgagctgagatcgtgccactgcactccagcctgggtgacaaagcaagactgtctcaaaaacaaacaaacaaaaaaagctacagggaaagagctacagggagtctcccagtttgaaatgaaaggaaaccagccagtaacttcaagctgaatgaagaaataaagatctccagtaaagctaaaaaggtaaaagccagtattaatgtatttctgttttgcaactccactttttattttctacacaatttaatagataaatgcataaaaaataattacaaatttttgctattgggtacactgcataaaaatgtaatttgtgacaacaataaggtcaggaaagagctgtataggagcagggtttttgtgtgttattgaagctaagttagtatcaattaaaataatatagttacaaatttaggatgttaattgtaatcttcatggtaaccattaagaaaatatctaaaatatatacacaaaggaaatgataaggaatttaaacaaaaccctacaaaaaaatcagctaaggacaaaagaaggcaataatgaaggaaattaggtataaaagataatccaactgtatgctatctacaagcaactcactttaatccaaagatacaaataggttgaaagtgaaaggatggaaaaagttatcacacaaaatagactttacatttaaaactgttacaagagacaaagaagggaattacctattgataaaagggtcaattcatcaacaagatgtaacaattataaacatattcatactcagcaagcaacagagccccaccaaaatatatgaagcaaacactgacagatttgaacggagaaatggttccacaataatagaaacttcaataccccattttaataataaaaattattattactattagaacatttagaagattaataaggaaatagaggacttgattaacatcataaatagtacacttcccccaacaataaaaatacacaatctcctcaattgcacatggaacagtgtccaggacagaggataggttacaaaacaagtttagaaatgctgaaatcatacaaagtattcttctctgattacaatggaatggagctagaaatctataacaaaactagaaaattcacaaatacgtggaaattaaacaacacactcttaaccaacagatcaaataagaaattctaaaggaaattaggaagattgcttttttgcattttatggatgtaactattttgacaaatctcatgtcaaattatgatatgatggtaatatgtcaacttgactgggatgagggatgcccagaaacaaggttaaaaccttgtttctgggtgtgtctatgaaggtgtttctggaagagatcaacatttgaatcaatgaactgtaaagattgccttcaccaatgtggatgggcatcgtccaatctgttgagtgtccagatatttaatagaacaaaaaggcagaggaatagtgaatttgctctctgcttgagctgggacattcatcttctctggcctttgaatttgggctggtactgaacaccattggctcccctggttgtaaggccttttggcttggactggaactacaccagcagctttcctgggcctccagtttgcagatggtaggttgtgggaccttccaggcatggtgttcatgtgagccaatccctcataagtctctttgtgtatgtgtgtgtgtgtgtgtgtgtgtatatatatatgtatatgtatatgtgtatatatatacgcacattgtattagttttatttccttggagaaccctaattaatgcagattttggtaccaagaatggtactagaataagaaagttctaagaattagttttttgaattgtttctggggcttctgaaatactgcattcttttgtccttagctgatttttttttgtagggttttgtttaatttcctaatcttttcctttgtgtatatattttagatattttcttaatggtaatctgattggatttaaaggggctgatgattctgtatccagtagtaaagagagccctgataatagtccatgcttggatactcctaatcaactccttataggaagcaaggaggctgggcacggtggcttatgcctgtaatcctagcactttgggaggccgaggcaggcagattgcctgagttcaggagttcaagaccagcctgggcaacacggtgaaaccccgtctctactaaaatataaaaaattagctgagtgtggcagcgtgcgcctgtagttccagctactcaggaggctgaggcaggattatggtgtgaacccgggaggtggagcttgcagtgagccgagattgtgccactgtactccagcctgggcgacagagcgagacactacctctcaaaaaaaaaaaaaaaaaaaaaaaaaaaaaaaagcaagggacctcaagggttctgtgtctgatacttttaaacatttttggaaaactaaggagtataatagcattggttggttgctcctaatgtcactgaaattgctgagagtcaaatcctgggacttgatgaattacagcgcatgttgaatttccagccccacagggcatccgctcttttattttatttattttattttattttattttattttattttattttagtttagtttattttagtttattttagtttattttagtttagtttagtttaggttagtttaggttagtttattttattttgtgacggagtctcgctctgtcgcccaggctggagtgcagtggcgtgatctcggctcactgcaagctccgcctcctgggttcacgccattctcctgcctcagcctcccgagtagctgggactacaggcacccaccaccagggcatctgctcttaaagtggggacattaattaggaaatagtggaatcctgtcaattgaaatggggatgtttgggaagacctagataaagctggagacattgagcccctaaaatctgatgagtcttttttgccagtgtctcccaatcccagtggaagtgccttccccaaacccagtgacagtggcattcccactcacagtgatatcagccttttctcctctgaggaaaccctgcattacctaaggaaactgacagggtggtgattcccaccacatccccattcaacactatttggcctgtgcagaagacagatggatcttggagaatgacagtggattatcataagcttaaccagatggtgactccaattgcagctgctgtaccagatgtgtcattgcttgagaaaatcagcacatctcctgctacctggtatgcagctattgtcttggaaaatgccttttctccatccctctccataaggcccaccctaagcagcttgctttcagtgacatgaccagcaatgcaccttcactgtcctgtctcaggggcatatcacctctccagccctaggtcataatttagttcatggggatcttgatcaccctttccttccacaagataccacgttggtccgttactttgatgacattttgctgattggacatagtgagcaagaagtagccataactgtagacatatggtaagacattaccatgtcaaagagtgggtaataaatccaactgaaattcaggggtctttacctcagtgaaatttctaggggtccagtggtgtgtggtgtcgagatatctctttctttctctcttccttccttccttcctctctctttttttcttttctttctttctttctttctgtttctctttctctttccttttctttcttttgagagaatgtcattttaaacaaatttatgtatttgtttcatgagaaagagcattctgaaagcagtgtagccagcatacaatcacaatgctgcagaacatggaataagcttttaaaaaatcgcagagcagagaatgggatggtaaattgttaaaatcaggaaagagtccaacaaagtaggaatccaatttggttcccacagtggggtaatcagtttaggaagtccattcgtgatgttaattacaacaatggaatagaaacatttcagttgatactagatattttcatatgcttgtttcggtagagatatcctttctaaggtgaagattaagt

SEQ ID NO: 93242 - DNA, 60978 bp, Homo sapiens
  misc_feature (1)...(60978): n = A,T,C or G
ctccccagtagctgggagtacaggcatgtaccctacacccagctaatttttcacatttttagtagagatggggtttcaccatgttgcccaggctggtcttgaacttctggtctcaagcgatctgcccaccttggcctcccaaagagttgggattacaggtgtgagccactgcaccagtccttttattgcttctgttgttgactttggttttttgggggcagctctcaggtactaccctactggtgcatgacagaagccctaacacatttcctgttatctggtggacatctgtgattttagcttagggatacagcgttagaataatgcatttgctctgtgtgccctctgctggtactgcatgagcagaccacacatggaatgcctgcatgggtgagaatctggtctcacctcccagggcaagccccttgcagacttaacagagtggtgattctccaaaggcagcgatggtcaaccatgttagaatcacccagggaaccgtgaaaataaaaatgcctggtcatgggcttcgacaatggggtttttaaaacactctccaggagattctacacataaagccagtgttaagaacctattctttgggcagaaaattggcccaggaacacaaagtccacagaaccatgtgtcactctggtgtcttctgttctagtaatgtatttcagaaattcccagcctgcctgaatctcagaattggcttcaagctggtcaaaaaaacagatcctggaaatccaccccagacataatcagaatatcctggggtgaggctcactcaggtcattacttacaacccaacagagagaatttttggttttaatgaggttaaggtcaaatcattatgacttcttaagacattttttagccacaggctttatctcttcatggggaagggagtcacagtcactgaaggaactgacaggcaggtgaaggcaaggtacagaaggaatgaacagccacgtgtaactgctatgcacatgtctcttctatataattgaatcttcactacacttcttgagcataaatagtaaaaccctgttataccgagaggatactgaaggggaggcggttagttctctttgcaggcatctagggagaaagccttccaggcagagggaactgtcaatgcaaaggccttaaggctggaatattctcgattactggagaacagcaaggcagtcgtgacctgggggaatgatctccacagaggtgcggatgagggagggaaggggagggtggattaggccatcagccttcacagcagagtgacgtgattctgtttttaagcatcactttgacagctgcaaaaacggactcaagtaaagcaaggatggaagcacaggacagaagcatcgaagtgaagggccaggcgtggtggctcatacctgtaatcccagcactttgggaggccgaggcaggtggatccctcgagttcaggagttcgagaccagtctggccaacatggcaaaaccacatctctactaaaagcagaaaaattagctgggcatggtggtgggtgcctgtaatcccagctactcaggaggctgaggcaggagaatcgcttgaacctgagaggcggagtctgcagtgagccaagatcacaccactgcaacccagtctgggtgacagagtaagactccatctcaaatttaaaaaaaaggaaaagtaaccactgttgacaagaatgtagagaaacaggaacccttgtctgttgctggtgagaatgtaaaatggtacagctgctgtggaaaagtggcaggtcctcaaaaataaacagaattaccacaggatccagttaatccacttctcagtacgtacccaaaacaactgaaagcagggactcaaacagatactcgtataccagtgttcacagcaatagccaaatgttcattcatcagtagtcaaaaggtgacgacaactcaaatgtccatcaacagatggacaaacaaaatgtggcacacacagagaatacacactgcacccgtaaatatatttaaccataaaaaagaaatagcactgacatatgctacaacacggatgcaccttgacaacactacaccaagtcaaagaagccagatacaggccagccgcactggctcacgcctataatcccagcactgtgggaggccgaggtgggtgatcacttgaggtcagagattccaggtcagcctggacaacatggtgaaaccccatctctactaaaaatacaaaaattagccaggcttggcgtcaggcacctataatcccagctacttgggaggctgaggcagaatcatttgagctggtgaggcggaagttgcagtgagtggacatcgcgccactgctctctggcctgggaaacagagcgagacttcaactcaaaaaaaaaaaaaaaaaagagccagatacaaagggtcacatattgtatgattccatttatatgaaatatccagaacaggtgaatccagagggacagaaagcaggttagtggttgccaagggctggaaaaagaaggaaattattgctcaatgggtatattagttctgtttgggataatgaaaatgttctggaaatagatggtggtgacggttgtacaacattttttgttttgtttgtttttgagatagtctggctgtctcccaggctggagtgcattggtgcaatctcggctcactgcaacctctgcctcccgggttcaagcttctcaagtagctgggaatacaagtgcccaccaccatgcccagctaatttttgtattttcagtagagacagggttttgccatgttggccaggctggtcttgaactcctgacttcaagtgatccacacgcctcagcctcccaaagtgctgggattacaggcatgagacagtgtgcccagcctgtacaacattgttaatatacttaatgtccctgaattgcacacttaaaaatgattaaaaggataaatttgttaggtgtatcttggtatggttaagaaaaatggaaggctacacaataaaaaaaaatattttttttttgagacggagtctcactctgtcgcccaggctggagtgcagtggcgtgatctcggctcactgcaaactccgcctcccaggttcacaccattgtcctgcctcagcctcccgagtagctgggactacaggcacctgccaccacgcccagctaatttttttgtattttttagtggagacacggtttcaccctgttagcgaggatggcctcgatctcctgacctcgtgatccgccaccttgacctcccaacgtgctgggattacaggtgtgagccaccgcccccagcgataaaacattcttattgactttcgagtggcaaaataataaagatcatgccttccttcctctttactgtgttacaaattgtataatgaacatatattattaattatgtggggcaatgtatataactggcttaagtttataaaataacgtaccagcatccggtgcatttggctttattacactgcagggccatccaaagcaagagcctctagacctctgggtggtgaacaaatctcaactggggtttcgtgcctacctggacgacatctgctcgtcaatgtgtagttaacatcctgacagacccttctgccgctggatatgtgaggggcacagcacagggctctggaagtccctgctgactgctcgaagcctttctccctgctaaaacctctgaccaaatgcttaataatatctgctgtaggctgttgagtctgccacacgtttgacatttattgtttattcccacacccatcccatgaaacaagcaggactttccattttacagatgtgaaaaccaagattcaaagagactcaataacctgctccaggacaaatgacagaactgagacttctgactccaaatcttacgctcccccgccacacctctttgcctttctctttcacaccaatggactctatgggtgaccttggcayaggttcttctaagaactggctcttaacaaaaacttctggccattatctgactgaatgtcacaaacaagtgctgtaagaacttgcttagagcctttttcctaaacctgtacaccagctcttgccttgtgaatttattcaccacaaaacacatgttcccaggggcccaggcaaagtctccaagtacccagtcccctttcttcagccttgcccacaccctcagccttcctgttaatccaggcgacccagggttacccagaggtccaggtcccagttgttcacttgagcatctgatgtaccccaaacacctgtrtgaaacgctctctgtccaggatgcgtccatagcgcagggtgacgtagaaggtctgtttcccactgtaccgctggatacgcacaaacatctcctgaggccggtccttggtttctgtcaggggaatcacatctgccatgggacagtatgtgtcctgccgccagccccagaagttcagatgggccacccgcagcatggtgccagactcattcagatacaggataccaaccagtctccgtaagaaatagctcatccagcacagcatggtcagggcaaagcccgatatcccactcatgaggcacacggtgttgagagtgaggaggccctgggagtacaagtaatagcctggtggcaaagctaccactgtcagggcagtctgtgccaacttcagtcgtgacaggaacccgaaggttctgatggcatcaaaacggtaaaacatccagaatttctcagtctctgcgtttggtagtttctccttcgagatgggtgaactgctgcccacccacctcttaggatcctcctgcccactgcagcaccacagcccatggagaggcctttcccacacagcttttccccgaaacctacgcacagctcggagaagggcagcctgaaagggagacagtagaccatttctctcatggaactcaaccacattaatcacacggtgaacatctgcaaagcaccatactctaaggcttctgccaatcctgcaaggtaaccgttattgccagacgagggaagggtaaagccagatgctatctcatgtgggcatcacaacagctatctaagatagttatcactatttccactttaccactagggaaactaagcccagagagggtaagatatttaccaaagatcacacagtcagtgagtgcagcagagtcctccttccaccaggcaattccaaataaatacaggaaaggaggtgcggccgtcattaattcaaaacatatccagggaggacaaactctgggctggacaatgtatccacaagggggtgtgaacatttccccaagcaggaaactaaataatcagtgtcttagtggggaactcgagcaacaaatctgtgagatatttattccaataaactttctaattctctgtttgattcatatgctatcttgggtgctggagggaactgctgctttctcttagcctagtctggggaaggggaaacagcggagaaggagaaggagcgaggcagggaggccccaacacgtagcacaagggtattactaggtgggtagtgaagcagtaaaagctcttattccaattctggctccaacagtaatttgtgagcaaattactccacacccctgagattcggtttcttcgcctttcaaaatggggactcagaagacagtgaaccagaggatggtttcagagtcctcaacttagtacctaatgcactgtgagagctcggcgagttttagctactactactgtgcgcatgtgacccaaggagggcagagaaagcccgggaaaagcgaactgtaacacacgccagagcttcctcccacggatcctcggagtccgaaacccgagcgtcgggcctgcccgccccagccctgaccccgaccccaaagagcatcaccccctcaaggctcgccacccgcctccttaccatggccccaccacctgctgccggaagtaaatcccaccggcccccggaacccctaagagcgcatgctcgaatgtacaaggcgggcgtgatctgcgttgcaccctgggagttgcggtccaggaatcgtggctgccgctactcccaggcgttatgggaacggagtcccctcctcttcccgacgtgccctgcgactcagsggccgaacccggaagttccgggccgagttcctcgtgccaacgtgtcttgtaaggtgcggctagaaactggggacatggcagcgcctggcccagcgctctgcctcttcgacgtggatsggaccctcaccgccccgcggcaggtaagtggcggccggcgggctgctggcagccgacgcggagcccgtgctgttcccagttggggctatcgaccacccagggtaggcgccaaggggtggctaaggaccgcctacgtcctcacggcgctgaaccctattctgggtgcactggaggaatgagagggaggccctaaccagctcttsaagagctctggtgcttggaaagatgagayggggctgaagaactcttaagagcaggaaacttgtgctaggttggaaaatgtaatctggactcaccgctagtgctcgggactgatagaccaggatttcaacccaagatcaggcccccttatcagctatgtgccggccccartcctgtaaccaatgggctgtgccgtgagtcatgatattaaaaacaggtttccaggtcaaaccgacctagtggagtctcatcttcacctcttgacatctgtgtgaccttcagcgagtcattaacctctctgagcctcaacatctacagctttaaatggggatgttacctgttccatatggtgtctgtgaggatcaaatgagattgtgtaagttcttgaaagtatgttggacacaacacactaggcctcagtaaatagtagccacctccaccacacccatctccagcccctgcaatggactagggagatggaggagccctaggttattacaggctgcccgctgagagcctctttgggcccttggaaacttgctttccactttcagattttgctgctacaggcacagataagtttcagttacgatcagccttgaggtgaggctctcctggccccttttcagaaattggccactgaacactggccatttcaacttgagactggaccccaatggtctcactatcctcagcttctaccctcacccctcatagttttcgcttggtggtaacaatggtgtgctccagaagtccaggtcaaatgcgtgtgaccttagacgtatcattttgcccttctcagccacaggtttgatttacctagtgatgacgctcaactcccaagttcttcaaaggctttttctgattctgaaattcagtgatcacacacttgggtttgttaaaagcccatagtggtctaaaactccggtccccaattcattttttgtaaagggccatatagcaaatacttctctgtctttgctgactatgtggtctatagtaaccactcaactttagtgcaaaaccagccataaaccctatataaataagagtggctgtgtaccaataaaattttatttatttattacaaaaacaaacagctgcccaatgtggtctgtgggccatagtggtctagggtttacattgccaccctttttcatatcactgaaccctctcaaccttcctccatctttcttcccaggtaggatagttgttattaccgttttaaacataaggaaacacactcagtgaagaactaacctcctcagtttcacacagccaacctggtacaagtctctgggcctcaggatattggttcctgtcaagtttgccatttcctatctgtgctaaggtggaagctgttctagtcactgggtatgccattcaggaaagtgcttctgattttctgattttcacagttctgactctttttttttttttaagacagagtctcactctgtcaccagactggagtgtagtggcccaatctcagttcactgcaacctccacctcccaggttcaagcaattctcctgcctcaggcaaccaagtagctggtgctacaggcaggcaccaccacgcctggctaatttttgtatttttagtagagatggggtttcactgtgttggccaggatggtctctatctctggacctcgtgatccacccgcctcggcctcccaaagtgctgggattacaggcgtgagccaccgtgttctgacttttaaaggccactcctccaattctagattctgtctaataggtccagattccactgtgagagtagaaaagattgcactctattacaaacccttctgtacaattttaatcacattcatgtattactctaaaaaagttttttaaagaaaaatcattgaactccaagtgtttatatactgaggttgaattaaatggttttttgtattttctaaatttctagtaaaaagatattcagccgggcacggtagttcatgcctataatcccagcacttggggaggctgaggcgggtggatcacttgaggtcaggagttcgagaccagccttgccaacatggtgaaacccagtctctactaaaaatacaaaaagattagccgagcatgatggcgggcgcctgtaatcctggctacctgggaggctgagacaggagaatcgcttgaacccaggaagtggaggttgcaatgagccgagaccacaccattgcactccagcctgggtgacagagcacgacttcgtgtcaaaaaaaaaaaaaaaaagacattcagtgtaaatgtacaactgagattgctcaaagtgctgagttataagacttgtaaaaatacattgtgatgtgtcttaatgtagggctattttttcatcttagtttataacttttttaaaattatcacacagtttggaatttaccataagattataccactaagaccactctttctagataggagctttgcttttagaagagactaaaaaatctagttatcttactcttttacatttttgttttgttttgggtgattgcaataaaatcaattctaagcttctccttttttttttkttttgttttgttttgttttgttttgagacgaagtctcgctctgtgacccaggctggagtgcagtggcacgatcttggctcactgcaacctctgactcccgggttcaagtgattctcctgcctcagcctcccgagtagctgggactacaggcgcccaccagcgcgcccgcctaatttttgtatttttaatagagacagggtttcgccacgttggccaggctgrtctcgaactctgacctcaggtgatccacccgcctcggcctcctaaagtgccgggattacaggcatgagcctccatgtctggccctaagcttcctctttaatttcattatgttgttttattttaaaatcaacaacttaaatccataaatggagtatagtgtagcatttaaaaggaatgatgagctagatctgtgttggcatgaaaagatcaccacagcatagtgctgaaaaascaaagtccctgcacaggacatgattccatttatgtttcaaaaataagacctatttgtatatgtgcccatagatgggtatataaatgcatagaaaaatagctgggacagtgcacaacagctactaacatattacctgtgtttaaaatttggtaaaaataacacttaagtttattctggtaaagatgcccccccagttacaactaaaatatttgaactatgtacagagctggtaacttaattggcatgtatgaaaataaggcttatagacctggcttatacctgtaatctcagcactttgggaggccaaggctggtggatctcctgaacccaggagttccagactggcctgggcaacatggcaaaacttwgtctctacaaaatataaaaaaattagccaggtgtgctggcacataactatggtcccagctactcaggaggcagagataggaggatcaccggagtccagggaggtcgaggctgcgatgagctatgaccatgccactgcactccagcttgggtgacaagtgagaccctatctcaaaaaaaawwtttttctttaatttttaaataagaaaataagacttatgtacttgtgttacccttagagttttggtctcctgattattgtgtggcttatgactgttgtattttctttcttgaaatttagaaaattaccaaagaaatggatgacttyctacaaaaattgaggcwgaagatcaaaatcrgagtggyaggcggatcggactttgagaaagtgcaggagcaactgggaaatgatggtaaatgatgggttgctaatkacatctggtaaaagattaacttcttatgaggatattgttgccaagtatcataggctgccctaaaaccttgtccccatatggcgggctttctgcttccttttttgggaaacattttcttggmctttgcttttcctctgcttttaatccagtacatttctggagttactgatggagaactgggtactcagatgtgtgagtagattcacctagaaaggtcagtggctgtatctgcacatgataatctctctgcctggaatacttcttgcttgtacccgttsacagcccttctagccccagtcagaccgrtcttcatattgtccctctgacagcccccctcacctccccatcactgaaacagaatctccagcacaggaccccgaaaaaccagagaggcttattgaccccttcactggagagtctgacttgataggtctgtggagcctgggaatcctatttcagtgagtacctctgagagattctagtgtacaaccttgctaatgtagcattctgtaattattgtaaactatccgattatatgtttttgaagagcaggagtatgggttattcatctccatagccacagggcctcctggcctgtaagaaattgtaagtggatgccaggcgcggtggctcacgcttataatcccagcacttggggaggccgaggcggatggatcacctgaggtcaggagtttgagaccagcctggccgacatgatcaaaccccatttctactaaaamtacaaaaaatgagctgggcgtgatgacgggcacctgtaatcccagctactcaggaggccgaggcaggagaattgcttgaacccaggaggcagaggttgcaatgagccgagatcacaccattgcactccagcctgggcaataagaacgaaactccgtcttggaaaaaaaaaaaaaattataagtggagaggtggatgaattgrttgttcttttaacccctgttgtccccagagtcctcacatcttggaaccagctcctctagagcaagatttctcaccttcgcactattgatattttggaccagttagttctccattatgaaggctgtcctgtgcattgtagggtctttagcaacatcccaggcctctacccactagatgcccacagcatacacacacgcacacmtacggctatgactaccagaaatgtctccagacattgccaaatgacctctgtgtaaaattacccccgtttgagaactactgttctcaaagatgtaatatgttacagtccaaatctgtatggactgtatttataggatcaccattactagaagagtaatctctgcaatctctttaaaactctctcttccacttccacttcattttcctggtagatctcctacttagaaatgctataaaccgcatactggggatcacgaagccctgaaaatcctgttacctgctcatgatcgccctttctgcatctagttgtgtatttaaccacttgctcagggaagttttgtgtagtgtagcatagtgtctgcacctgtcagagacatgcaacaatagaatcaaaacattcacaggccaaaagacagttgaaggcccacctgtatcagaatcacctgggaagcttattaaaatatgagtgtggggtccccacccaacacataggggatctgcattttaacaggtacctgaagtttgagaatcccttcattaaggttgacaacatggatagtttccaaaccaaactgattataagaatcactgaagagctttttttaaaatttattttatttatttatttatttttatttttttgagacagtcttattctctggtgcagtggcacaatcttggctcactgtaacctctgcgtcctgggttcaagtgattcgtgtgcctcagcctccgaagtagctgggactacaggcgcccaccagcacgcccggctaatttttgtatttttagtagagacggggttttaccatgttggccaggctggtcttgaacttgcgacctcaggtgatctggccaccttggcctcccaaagtgctgggattacaggcatgagtcaccgtgcctggccaccaaaggtcttttagtgctttgttttttgttttttgggttttttttgttttttttttttttttttttgacgttagacagagtcttgcaccgttgccgaggctggagtgcagtggcacaatcttggctcactgaaccctctgcctcctgggttcaagcaattctcctgcctcagcctccggagtagctggggttacaggcgcacaccaccatgcctggctaattttttgtatttttagtagagacgggggtttcactatgttggccaggctggtctggaactcctgacctagtaaaaccccgccagcctcagcctcccaaagtgctgggattacaggtgtgagccacaccgcacccgacccaaagagcttttttaaaaatatatttagcctgtccctcagcaattctgattcaggaagcgagagagcaaagcttggaaatctgcattttcacactgccctggttgctgctggtgaaccatcagcatcatggacgagtatcttcctctacagacagtcaggctgaagtcagggacataagataacctgtcaccaagtccctaatctcctgcccagtcatcatcgtttaaatgtgtaaccaaaaagagccattaaaaaarcaaggaacttttttccatactcttctcttagtctgtaagatgagatagtctttcacagtccttgctggagtttagcggttttattggtggtcattgttaatcaaggagtaaaaacacaggttttgattctttgcattctaagtgtttttttggttttgattgtagtggttgaaaaatrckattatrtgtttccagaaaatggcttggtagcatacaaagatgggaaactcttgtgtagacaggtaggttcttgagtatctgaattactatatactattaaaagtgttttctaaaagggcatttcacaatgaatgcctctaggaagatgaggaacgggtagaaatgaatctttactctgtattttttgttttgcattttgaaccatgtgactattacatattctacattgataactaaatttttatactttttaaatctaatatttctctcttttcttattttgtttttgagacggagtcttgctctgtcacccaggctggagctggagtgcagcggcacgatctcagctcactacaacctccgcctacctccgcctccctggttcaaacaattcttacgcctcagcctcccccatagctgggattacaggcacacgccaccacacccagctaatttttgtatttttggtagagacagggtttcaccatgttggccaggctgatctctaacccctgacctcaagtgatccgcccacctcagcctcccagagtgctgggattacaggcatgagccaccacacccagccttttcttctttttttwaaaagatggggtcttgctgtgttaaccaggctggagtgcagtggtgcaatcccagtggcctagaactcctgggcacaggtgatcctctgcctcagcctcccacgtagcagggactaccggcacatgccaccaagcctggctttaaatctattaataacatttctatgatgataaaactagagcagactgcttcactataagcatttttttttttcttttttcttttttcgtggtggaatctcactcttgcccaggctggagtgcagtggctcaatcctggctcactgtaacctctgcctcctgggttcaaatgattcttgtgcctcagcctccctaggtgggattacaggcatccaccagcatgcccggctcatttttgtatttttagtagaggcagggtttcaccatgtttgccaggctggtctcgagctcatgacttgaagtcatccacctgcctcagcttcccaaaatgctgggattacaggtgtgagctgccacgcctgggcactataagcatttttaagaggtactgtgtagctcttagtagtagtaagatcattctattcagacataagagaatgccgaagtggaacaaatatattgtctgtcaatatctggagatattttaattgaataaaagtggcagcagtaagctctttggaccttacaggaagcatttgaacaataatgagtacaaaaatcttgggtgatgwagcagaaaatgcttttgactaaagcttttctggcttgcctaatgcttttgaccagagaaataagagaaggaattaaacagacagtggggcatgtcaccatcactgctacatcagcctactgattttcagcaatcgtggctgaagaccctgggtttgctatgaagctgttttgaaaatgctcctgctaaatcaagtaactcaagtattttcttcatctagaatattcaaagtcatctgggtgaggccctaatccaagatttaatcaastactktctgagctacattgcgaaaattaaactccygaagaagaggtgggtttgcttttaacaaagaggcgtcacaggaacatagcgtagtgtcacatggtgggctaatgtgggcattctccaaataggattataaaaatcacctaaagagttttaaaaacaaagtctgatatttagcccgccccttggcaattctggttcagaaagcctgagagccgagcttggaaatccacattttctctggctgccctggtgctgctggttcacagcagggttcagtagccaccatgggccagcgaatttaaatccgaatcccagcacttagtaaggaataattggaaacagtccacaaagccaacagtacaagaatgattacgtaaatgatggcttatccacatgatggaaatttatacaaccattgaagaccatatgctttcaaaggctgtcagtgagaggaaacagcagtgaagcagcatgtacaaaaagcaacagaaaccctagatcgggaagtctgagacaggaagccttcgggccagatccacgtaaaacccaaatctggttggcctgcagtgttaaagaaaatcggattaattgccatcatgtaaaagtctgattttatgtttgttttatttatttatgaatttatttttgagaccgagtctcactctgtggccgaggctggagtgcagtggcaggatctcacagctcactgcaacctccgcctcccaggttcaagcaattcttctgcctcagcctctcgagtagctgggattataggcgcacaccaccatgcccagctaatttttttttttttttgtatttttagtagagatggcatttcactctgttggccaggctgatatcgaactcccaacctcaactgatccacccaccttggcctcccaaattgctggtgtcaaaggcgtgagccaccttgcccagcctgattttatgttttaaacatctggatttctggcttctgttggcaaatctgagacctggctactccggctcccagttacctgccggcaggtgccacctgagcagctgccacctgactcatagacatttgttccagtcacagactgcttctctcattttctgtctccctaggctttctttttgtttttttgttttgttttgttttttgagagagaggatctcgccctgttgcccaggctggagtgcagtggcatgatcatagctcactgcagcctcaacctccttggctcaagtgatcctcctacctcagcctcctgagtagctgggactacaggcacatgccgccatgcctgactaattttttaattttttgtagagatagggtcttgccatatggcccaggctggtctccaactcctggcctcaagcgatcctcccacttcactctcccaaaatkttgggattacaggcattagccactgcccctggctttcataaatgtttggtttggggacctaccttctgccatgggtacaattatctcagttccatttttaaaataatagtaatactaataatgatgaacataaatgccgacagtaaatttaaagactggcaggaaatagacccaaatgttaacagtggctatttcttgatggtgaggttgcaagtgatttctttgaaatccttctcatttttacccccagttttcaacacttactatgtaacaccttaatcatcagggttggaattaagtggcaattcaatttcagggctgggtgtacttcagaggctgcttcacactattaggattcataacctgagcgcctcctgctcagcatctccagccagagtgcaggaatgtcccttagccgagggggaggcctgcatgagacaggctggacatggacttggttattgttgcagctgggtaatgagcacatgaggacttatcctattctgtttacttttgtgtgtgttagaaattttccatggcgaaaagataaaatatacaaatatcccaggtcagttccatttttactttgggctgagcactaagggaggatttaaaaaaaaaaaaggcataatcctgtcctcaaagagcgtatcatttagcgagggagagggatgtggagagccataattccagaacagtagaagagacctggtgaatccaggaggcagaactgagacccaccttgatccacatttgtccacatttgcctgacaacactaactacatgccccacracggccaggcagatgcagtaagacttcagagagcccaggtctttagggcggaactgattgcttagtaaaccaccttcagccttgttttggggaaggctttctaaactgcatcaacttctctctgtgccttggaaatgagaagaagaatatgtccttgagtgggggggcattaattgagctctttttctgatcattaggacctttagccctagggtcacccggggcacggtcacccgtcccctagtgcctcagtgctcatacacacgtggtagaggacaggctgggcctctgccaactccgggacggcctggacatgggattattgagagagatttttaggctcgcatattttgttacatcatttgsctctttctctgcaagttgagcaaaataggagagaggatccagacgattgagattttgctgtttttactttaatgagtattcattgcttcccastttacaaagtacctttacataactggcatgtttgatttttaacaaggccctttggaggtaaccagagcaagtgccattagcctttctgtaggtgaataagaggaggcttggagaggtgcccagagccacacagcctcctaagaggccacactgacatggaatcaggtcatcagccctgcacgtggcatgtggtctctcggtatttccaatggccagtgccaggacatcaggtctgtgagattaaaatagtagaaaaagatgagggaaaatgtttcatagggttcccaggcatcagcgtttagaactggaagacacttttcactgcatagtttgtcagaaaatgcttaaatttcattggtcagaatgatatctagcttacaagttatctgaacttttaagaaactgggtggttttctttttttggttgtggggtttttgtttgtttgcttgttttgttttttttgagacagagtctgtctcccagactggagtgcaatggcatgctctcagctcactgcaacctccgcctccgggttcaagcgatcctcctgcctcagcctctcaagtagctgggactacaggcatgcgctaccatgtcccgctaatttttgtatttttagtagggacagggtttcatcttgttggccaggctggtcttgactcctgacctcaaggaatccgcccgccgcagcatcccaaagtgctgggattacaggtttgagccaaagaaactgttttcagactcaaactggaaaccgtggaaaaaaactctttgttttttgttttttattttttgtttgttcgtttgttttttgagacggggtctccctctgttacccaggctgtagtgcagtggtacgatcttggttcactgcagcttccactgcccgggcccaagcaatcctcctgtctcagtctcccaagtagctgggaatacaggcatgtgccaccatgcccggctaatttttgtattttttgtagaaacggggttttgccatattgcctaggctgctctcaaactcctgagctcaagccattcacccaccttggcctcccaaagtgctggggttaataggtgtgaggtaccgcgcccagccaaaagaacatctttaaacatcgtcatttgaagtgactaaactaatgttagcttctcattttctgtgatcaaatcaaacatttaggagctgtctgctactgggtaaattgaatttcctcagttattactgaggctcgttggacaattctcagagcctttttctgtgtagctttgcttggtactatcagtctgttcagaagctccgtagcaaaatagatgtctggtacatgtattttcaaactcttcwrggaaatgactgctgttgccagtgctggaaatcattttcatagctctttattaaccacaaaattatctgcccagtagcagcactgtgcaacagaaatagaaagtgarctatgtataattttaaattttctgtagccacattttgaaagaatgaaaaggaagaggtgaaatgaattttaataatatattttatttagcctgatatttctaaaatatgacttttttttttttttttttgagacagggtctcactctgtcacccagactggagtgcagtggtgtgatctcagctcactataacccctatctcccaggctcatggaatcttcctgcctcaacctcctgagtagctgggattataggcatgcataaccatgccaggctattttttgtattttttgtagagacagagtttcgccatgttgtccaggctcaaaatatgagcattttaacacaaagtcaatatacaacatgattgatgcaattacattcctttttcatactaaatctttcaaatctaatctcaattcatattagccacatttcaagtcttaatagtcacagtagttcatggctaccatattacatagcacagagctgagaaacattgaccacactagcctctgctttttagaatttcccaagattttaggctgtttatctatgatgttgcccaaatgaataacgtgtttttggagaaactctgtcaccctttcattcccaggsgtactttmaytgaattcbraaatgggatgttaaacgtgtccsctahtggaagaagctgcagccaaraagaacgcattgagytctacgaactcrataaagtacgtctttctgaaatayctttggtgaatggctgggtttatggaaataagatatggcctggtgtggtggttcatgcctgtaatcccaacactttgggaggccaaggcaggaggatcacttgagcccaggagttcaagaccagcctrggcaacatagtgagacctcatctctacaaataataaaaamaaaaattagctgggcatggtggcacacacctgtggtcccggctatttgtttggctgaggtaagaggatcacttgtgcctgggaggttgaagctgctgtgagctatgatcatgccactgcgctccagcctgggcaacagagcaagacccccatctcaaaaactaaacaaataaataaatcaataagataatcctacctttgtggccagtagttaaaactgtgctttctaaactgcaatacaagaaacaattggtatctttttgtttttctcagaaagraaatayaagacaaaagtttgtagcagatctacggaaagagtttgctggaaaaggcctcacgktttccatasgtattgtatatattgcctgtgttccaaacttggatacccatttcccagagtwtgttgtgggccagtgagctattgataatgaagtatgtgcagttttaggtgggcaggaagattaaatgagcagtccagtctatagacaaaaaccaaccactctcttttctgcataattagccataataggacttgcctagtcaagaaacagcttacacgctgttgggcttggttctaaattcttacccaacagcattcttcctacctggactcctctcatcaaaagaggagcactttgattactaaagagtaggaacttctcacacctttgggcagaagagaagcactatagtgaactccataagggagacatggaattgaaccccttaggtaaactagaccgatgttttggaatcatagaatgtttcaacagcaaggaacctyaggggccaattgggtggcttttacagatcaagaaactgaggcccagaaaggagaagagacttgtccaagttcacaaagctgttgtttacacagccagtgtgtgaacgtttctggtgtctaatgcagagttcttcctgcagcacggacatctcaggcttgtcttttgttagaatattcctgccaaatgctttgcacaccgatttctcttgtcagtgctaatgagtcattgctcaaagcctcctcattttactagctttcatcaaggtagaggttgtaggaaaactggaatggcaaagggattatatttaacagatgagtgggtgggttttttgtcttcctgaactgtgagatggacatctttctgacaaagctttgaaagggtttttgttgcccgtgagcactgcctgtaaatcaccttcagtgaagattctcatttttcccrcaaaatatgccggatgcaacctgcttccgggcatttccccctgagggtgtgttaaagcccgagacaagcacagcagaatgaggctggtatcmgatttttcataagcatgcttcctttaaaccacaygcttgacagggcgcttaaacgcaaatgcatttctcactctgagttggcattctgtgcctcaattttagacctatgtgaaataatgctggaaaaaaacaatgtagaattaatttctagaacctatgcatgaagtagtctaagtagcaaactagagtactgaaaatcaaccttggcaacccactaactgacaaaagagtaaattgtttttttcagtgacatatcattagcccctttttcaccttttgcctttgtgtgccccgtccccacccggcaggaggccagatcagctttgatgtctttcctgatggatgggrcaagagatackgtctgcgacrtgtggmaaatgacggttataagaccatttatttctttggagacaaaactrtgccagtaagtagagaagtgtttgtgcaccttcaytgttgcatttgcgcttgatgggggaaattgayaactgggctgtttttcctgtacctacactttacccacccgccctgctcaaactgagcagtggcttctgtcctggagaggtgggtgattgagccaccttcccctctaagctcagaccccctacgcctctgtggaggcaaggatcacactgcatgttagttgaaccttttcaccttggctttggaattaaacgttggccaccctatgtgccttccagaataccagtccccggtgccactgtcaaaccctctgcgtttcaaagctctggctgtttcaacctcatttttccactgtatttgtccacccgaggcattcattctaagttgaacacgaggggccatgaacgatgggaggatagggaatgatctcatgagcctgaaacaggagaggacaccagcaacagcaaagaggccaagtgagtcccaggcatcacacacggcrggtgcttggagctgcccccaagggatktcagaaatctcgagttcagggccaaatctaaactgagaactgagagcagagcccagtgttaaaggccagggccagcaggaggaatacatagaagaaatgcccccaggtgtcctctccgtggggcaaggtggatccccaggaggtcagagaggcgttgctgccatcaaaggcccaagaggaggctcatcaccacccagctttgggccagctccttttctttctcttttttttttttttttttttctgagacagagtctcgctctgttgcccaggctggagtgcagtggtgcaatcttggctcactgcaacctctgcctcccaggttcaagcaatccttgtgcctcagcctcctgagtacctgatattacgggcatgcaccaccacacctggctgatttttgtgtttttagtagagatagggttttaccatgttaaccaggctggtctcaaacccctgggctcaagtgatccaatcaactcggccgctcaaagttctgggatgacaggtgtgatttttagtacagacagggtttcatcatgttggccaggctggtcttgattcctggcctcaaggaatctgcctgcctcagcgatccacccacctcggcctctcagttctgggatgacaggcygcgcccagccccatcaccttttcagttactcccatcctctgggcccctctgcctccctcccacatgcaggctgggggtgttggttaccttgccatcagcaggcccgtgtcaggctttstcgccatcctgcacctagcaggtgcatcataaatgctgcatattcagagtttctcatccctctgatctctggtccactccaaaatccttgctgcactgctaagatctacccatgaaagatttgcttttcagcagggtccccacgtcacagtcttccagcatgaggggtacacagtggtagtagaggcttgttacttattttcagaatgataaaactgaaacccataaagggtaagggatttgccraaggtcacacggctaatgacagagctggtggcaccagaagaagtctacctgttctttgtatgttttaaatagctttattgaggtataattgatcagcaaaagctgtacatatttaacgctcacagtttcgtgagtttaatcattgtgcctctttggttttgggggcggtttgggatttttttgttgctattgttataagaacacttaacatgagatattccctcttaacaagtttctaagtgtacaatacagtattgttaactataggcacttctgtttgtccaacagatctgtagaacttacacatcttacataactgagacattacacccattgaacaacaactctccatctccctcctccaccgccccgtccctggcaaccaccgttcttttctctgcttatatgactttagcacctttagatatctgatacaaggggaatcatgcagtattcatccttctgtaaggggcttattcactcagtatgtcttctcagtttactcatgctggcacaaatggcaagtttccttattttttaaggcggaataatgtttcatggtatgaatacactatattttctttcttttttttttttttttcttgaggcagaatctcgctctgtcgcccaggctagagtgcagtggcaccatcttggctcactgcaacctccacctccctggttccctggttcaagtgattctcgtgsctyagcctcccgattagtggctgggattacaggagcctgccaccacgcccggctaatttttgtatttttagtagagacagggttttgccacgttggccaggctggtctcgaactcctggcctcaagagattcacctgccttggcctyctaaattgatgggattacaggcgtgagccagcgtgcccggtcagaatatactccattttcttgatccattcttctgtcagtagacacragttgtttccgtatcttggccattatgaataatgcttcagtgaacacgggggtacagatacctctytgagatcctgacttcgtccttttggccatctacccatggattaaagacttaaacacaggacctgaaactgtaaaactcctagaaaaaaaacatagggaaaaagcaatgatattttagatgtgacaccaaaagcacaggcaacaaaagcaaaacaaacaagttggacaacgtcaaactaaaaagtgtctgcacagcaagggaaataatcagaatgaaaaagcaacctacagaggggaagagaatatttgcaaaccatatatctgataaaagggctagtatccaaaatgtataagaaactccaacaactcaatggcaaaaaaaaaaacaatttaaaacatgagcaaaggacttgaatagacagttctccaaagaagacatgcagatggccagtgggtatataaaaaaaggctcaacatcagtgttcagggaaatgcaaatcaaaactacaatgagataaacctcacacctgccaggatggccattttattttattttattttgagacggagttttgctctgtcacccaggctggagtgcagtgatgcgatcttggctcactgcaaccactgcctcctgagttcaagctattcttatacctcagcctcccgagtagctgggattacaggcgcccgccaccatgcccagctaattttgtatttttagtagaaagtgggtttcaccatgttgccagcctgtctcgaactcatgacctgaagtgatccacccaccttgacctcccaaagtgctaggcttataggcgtgagccaccacactgggccaggatggctaattttgttttttttaatgttggtggctgggtgnnnnnnnnnnnnnnnnnnnnaagataataacaccacctacccaggattgtggggaggattacatgacttactacatgaaaagcacttaaaatagtgctcagtccaggcaagcactcaataaatgttagctagcaatactataatcatccttttttggcagaataaggttcagagaactgaagtgacttgcccacgatcacccgtctagaaaacagtagagctgggtcattccactgcctccccaggggaaggacagaatatagaaaacaggccggcacagtggttcatgcctgtaatcccagcactttgggaggccgaggcaggcggatcacctgagctcaggagtccgagaccggcctgtccaacatggcgaaatcccgtctctactagaaatgacaaaaaattagctggggttggtggtgcatgcctgtaatcccagtcactggggagactgaggcaggacaatcacttgaacctgggaggtggaggttgctgcgagccaagattgcaccactgcacgccagcctgggcgacagattgagactcttgtctcaaaaaaaaaaaaaaaaagaaaagaaaactgtgcctctttaacaattattttttggttttattttattttttgagacggagttttgctctgtcacccaggctggagtgcagtgatgcgatcttggctcactgcaaccactgcctcctgagttcaagctattcttatacctcagcctcccgagtagctgggcatggtggtgcacacctgtcatcccagctacttgggaggctgaggcaggagaattgcttgaacccgggaggtggaggttgcagtgagctgagattgtgccattgtactccagcctgggcaacaagagcgaaactcggtctcaaaaagataaaataaatgttggcgagggtgtggagaaattagaacccttgtacactgttgtgggaaatgttaaatgtcatagctatgatggaaaactacatagtggttcctcaaattaaaaatagaactgccatatgatccagcagttccacttagagatatatatccaaaataattgaaatcaggatcacaaagagatacctgctgtttaaaataaaataaaataaagacagggtcttgctgtgttgcccaggctgtactccaactcctgagttcaagcaattgtcccgcttcagcctcccaagtagctggaattagaggcgtgcactaccacagctggtgatacctgctgtttaaatgagtgtgckttccactacgataagctctctctcagtggggtagaaagatcttgttctaaatcccagatgaactgggtactttgaaggaggtgtagcattcaggtttgttcttaatgrcagttacatatggttttataaccacatccttttgttgaaatgcttttgatgcagaaatgctttcagtgcaggctttgaaaaagatcaccgtctgacttcatgtctttaaaaaaattaagctaatgaaatgacacctaggatctaagggatgcccggaagcttcctcagtccttctctagcttggtgccatttcttgtagacagagaggagagctattaagacacacgacagcagattgttctgtaatgatgacattcttgcttcatgtaaatagccatttagaagcctcagttgggactttgcagaatggaatgcagttcttggataatcagaaaatgacttattttgggaattcttcatttgggaattagagggttttctattctgtttaaccattgcattaccatgcctggattctatttttaaaatcttacctacgttttaaaaaatgagtattatttaatggaagctttcccccaattgtaaattaacctgtgcattcattatagaaaattagagaaagtacgaagaagaaaaagaaagtcacctataatcatccaacaatgtcccagcctttctatgtatatgatcccaaaagtgggatccttacatgttgttttagttttagttttctttctcttaacgtattttatttttatcatattrgtgaatattctttgcaaagaagattttttttttttttttgagacagagtcttgctctgtcacccaggctggagtgcagtggcgtgatctcggctcactgtaagctccacctcccgggttcacaccattctcctgcctcatcctcccgagtagcttggactataggtgcccaccaccacgcccggctaattttttgtatttttagtagagatggggttcaccatgttagccaggatggkcatgatctcctgacctcgtgatccgtccgcctcggcctcccaaagtgctgggattacaggcgtgagccactgcgcctggcgcaaagaagatttttaatggctgtataatattctctcattaggcatcagttactcacctcccttgcagaggcacgttgggtggtttaaggggttttgctatcataactaatgctgtggtgaacattcttgcacgattctttgcccccatccctgatccttttcgtcagcggttttctagaaatggaaattagcagtccagccatgtaaaccttcaaacaacctatcagttcttgaaacttcaggtgcagagcaatccaaatactagccttacactttgcattttcagtgatagacatttagaaagctggggttttttcctttcctaatgaagtttgatgtttttgccggcgtccagggaagtgatcctgagctgaggctgtcagtaaaaaagccatttctcagccaggccctgaggcttagcagcctcttccagcagcacagcctccaggaggcagagtctggtgttacataaagggtgccatctgcttggagcaactcgagagcagagtgaggaagtgtggcgttggccgttgcytttcaaaatatttgccatcttcagaaaccctgtcattcttcccatcagccacaaaagccagtgtttcttaaaatctggctctgagttcagcatggaggccctgggcctggcatggagtaccttggtttgttgcagagagagagagacggcaagggcagagagcacacaccacacatggctctgcatggctttccagaaaccaccctggctggatcaccctcagccactctgaattcgcaggcaagagaacctgtacttacccatgctttctgtaaaagtcatcttggctttaaggcagttgcaacatgaaaacattctaacacttcatgaatatcaagcagctggtttggtttttgacttgacgcttccattttgggtaatttggctrtcagtgcactcaagcatgtgtgaaagactcacgcagagggttcagggttggggacagccccgctgctcctcaggaggctggccacatgacagtggtctgtctctgcactgggatgccatgtagctgtaaaaasagtccatgtggacccatctctagggctttttgttaggtgatcaaagcaaagtgcaggacaatataagtaatgtgctggctacatttttgtctaaagagggcaaaggaatttctctttttgttagcttataaatgcataaaaggagtctgaatggatgaaatttacagaggttactgtgggggtggggaggacargagagagaattgccacctaggtcttaactctttcttaatatgtttgaactatatgaatgtgctatctattgaaaaataaaatttttaaatcaacttgagaaaaggatctgagtaatccctgtaatcctggctactagggaggctgaagtgggaggattacttgrgcctaggagttcaagattatagtgagccacgattgcgccactgcactccagcctrggcaacagagcgagacctcgtctcttaaaaaaaaaaaaaacaataaaaattaaaaatttttaaaaattgaaaaaagggaggaaatgtaaatcttccagcacttcctcagtgtsagaccctgagctggacacttatgttgtacatgctcccaggggagacagcagcatcctccctcttacagaggaagcacagtgggaagtccagggtctcagctagtcagagactaagctgggatctgaaagcctcrcctctgtcattctcctacatcgcttctaamatgctacctgccttccttttaagtaaattgtgcaacattttattctccagaaatgttaataaggaagatctgcctttaaaattagcttaaaaatacaaaaattagctgggcgtggtggcgcatgcctggatcccagctactcaggaggctgaggcaggagaagcgcttgaacccgggaggcggaggttgcagtgagctgagattgtgccattgcactccaggctgggcaacagagtgaaattctgtctcaataaacaaataaagaaaaacaaaattagcttaaaagaggtttgtatcagtgtggaccatgttgacccagatctggccccaccattcaccagtgaccttgtgacagtgaggacagtgacagtgacctcgtcagcccagtgaggacacagttcttctttttttttttttttttcctgagacamggtctcactctgtcacccagactggagtgcagtggcrcaatcttggttcactgtaatcttgaactcctgggctcaagtgatcctcccacttcagcctcctgagtagctgggattaccggtgcccaccaccacgcctggctaatttttgtatttttagtagagacggggtttcaccatcttggccaggctggtcttgaactcctaacctcaagtgatccgcccaccttggcctcccaaagtgctggaattacaggcgtgagccaccactcccgaccacagttgctcttctgaaggagtcatatgagaatgaagtgaaggcatctgaggaaagtgggtgacgcagggcctgactcaggaaaggcagctgggacatgcatctttggcctggtccacaaccagcgtctgcttccttcactttctaagaaagttattcaaaggctcatctgttattgagattttcctaagagattggagcctgccaagtccctcagtgaagggccatccttgtgagtgagcaccttcctacacaccttccaacagttcattagagcgtgaattagtgaaccatgtcctcctgtcctcaggttccaagttaggctttggatggcagttggcctttgcgatcctggacttaaccatgcctagcatctgtagctctttcaggactcawggctaaggagggcacagaatggattctgtggatagatctgtcttactacttattgctgggaccacatgatttgagacccaggtcttcttgtgtggctggtggcagacttagcttcttaacatgtgagtccctcactcctggagggaccctgagtgaattgccgctcccacagtcagcttccagaactgactggcagaaattgatgagaggttctcagcctggtggagatgtcccacccgctcctgtgtgggaggccaggaagcagggtgtcatgcatgggagccacgagcttcagatgttcctgctagcccaccttcctcctgagtgccagactccacagagtccatggccctgggtgttggtcccargaatasgactgtggctaacaaccagcccacagagtgagcatccctgcctgtgtctgtgctgaagctctttcattcagggagacactggcttcaaacccctggagtggggctggccttccagggagccccttgatgtccgcagaatcggcatctcctgtgggcattccaggcccagatccgtcacagagctgtctcctctgcccttgaaggccggagaggtgaaatgagagggctgtgctcagagccgtcaacagacccaagggtcactcgccctagggccactagccccttggccagctcaggttccaccctcgcccccaagccaaggggtgttttttcctagattctaagtcactggtgctcagccctggatatatattggaatcacctgatcactttcaaaacatcatgaccctgggcttgggccatgccccaaacaagcatttttaaggcatccccagggactctagccagggagagccactactgctctacgccatttcagagcaggctcttgtctcattggccctgtaactgcccaacaggttctccttgcccactgcctagacaagagccgatttatcaagacaggagagttgcagtagacaaagggtaattcacgcagagctggctgtacaggagactggagttttattattcctcaaatcagcctctccaagaatttggggatcagagtttttaaggataacttgctgggtaggggcttgggaagtggagattgctgattggtcggcttggagatgaaatcatagggggtggaagtgagtttttcttgctatcttctgttcctggtgggatcaaagagctggttgagccagattacctgtctgtgtggcatcagatactgcatcagaacacagggtctacaaaatatctcaggcacaatcttaggttttatgacagtgatattattttcaggagcaatttggggaggttcagactcttgtagctaatttgttagtcctacaaaggcagactggtccccaggcaagaagggggtttatttcagggaaagggctgttaccggcattgtttcaaagttaaactataaactgaattcctcccaaggttagtttggtctgcatccaggaatgaacaaggacatcttggaagttagaagcaagatggagtcatttaggtcaccatcataattttctcagttaaaatttttgcaaagacagtttcagttcctcctgttgggttttataataccttattcctaatacttcatactgtgggatatgaagatgggaaaagagtgataaccgctctagcttctttctsctgacagggagcgtagtcagggtaggtgttgacccaaaggtaggaggagtgaaaccactttgcagctgtctgcttctactcaggggttcctggttagggtttgaaggcctgcatgacaaaggcattagtattctcatctatagttttaacaaatgagtcctaggataaagagtgaaagtcctggcttcagaagcttttgtagaattgatcctaagctctgagggacccaggtaaatagctccaagaaccaatcagacatggggttactagcagagagagatttgggtcagaggttgttagacagacagattggggtagacaggaaagaggaaatttaaatatactcatccttatctttttagtcagttttcctagtcctaagactagatcagttcagttaaacagctgtttccattatcaagagatggcactggagatgggctaggcatctttagttatagaggaggaaggcagtggcaatttgacatgtttttgtcatctgtattacaaagaataagcttcagcttgcagggcctcaggaaaaaggtagtagcaatttaattgagtccaagtcagaaaagtgggaaaaaaaaattgaaagcattagtttgggaattgtagcccacagagaattcaggatttagtccaaattgcaggaaataataaaaactcaagaacaaaggacaagactagaatctaacagcagggtgtatcatagttttttgaaacacttttttccctctcccatccttatttttattaaagacaaaccgtagtaggacaagtttacttgcaaaataagtcatagtcttattaagcttggcctgattatttgtataaagtaaagcaagaataattgtttgccagataggctgtttttaaaattggctttgctgaaactttgttccataagaaatctcaggttagacttttttaaagcctcgagcccagccatggatttatctactatacctgcaaagataaacctgtatgagttgggtgaaattttttcttctcatggtcctaagataatttggggctcctgggcctgtcaaaaagtgacrgtctttatttaccacagttcaggaaccccgtacagggactgtgtagacaaggtatgaggccagcttttccaagggacttctattggctctgttagtcaactttgttccttaaagcagtctgtttatatttgaaagtatgtcgtaccagtcaaagccttggtaaagtaaccggcatctctaattgtatcctattacaaaagaaaacagattgttactgcccttgcacaaataattatactgccataagttgagaatactcacaaatagtttcyaaattctggagaaatcagagagaaggcaatatgctctaaattttgctcacagaagtatactttaactcaattgttaaagttrtaaatagctcaaaagaaaaatagttttctggactctgaaaaacaaaaggattaacaatgtttaacacatcagctctccatgaggatcctagaagttttttttcctccattccaatggcacaatttgtaaagttatcagagacctgcattcaagagtacccattagagtactatatctgattataaactgccttttgaaaaggataaaaccaagacagcaactgcctgtgggtaacaaaagtctcaggacagccgtagttaaagatgcagtcaacaaggaaatctggtcatctctgtgacacacagtttaacagaacagttataattattactcataacatatactgagacgtatcagaattataggagtcttacacaattttgtaacacatactaataacatagttatacgactataaacccaaagaaagttaaacacttttttatatttgacagtgcttcctacataattttaatacaccaaataagccaaatatgcctcttttggactttaggggactttttttttttaacttagaatttgatcttgggaagtttgttaaatatcaaaggtttgaaacactagatatcacaaagtagaatcccaggtcaccataagtaattcatttagccacaatgataactcaaacattttgtaacaggaaaaacctttactctgatagagagaagactcagctttctaaacaacaaaacccagtgaagatagcatgaggccaactgaatctttcttttattttttttaatagtttactccaaagccaaataaaaatctttcattgtctctctctgtcaatattacataaaaatattcttcaaaagagaaaaccaaattttatctcgcattagtgcatctttaatgctaaagctagttttgtttttgttgttgtttgaggtggagtctcgctctgttgcccaggctggagtacagtggcacgatctcagctcactgcaagctctatctcctgggttcatgycattctcctgcttcagcctcccgagtagctgggactacaggcgygtgccaccacgcctggctaattttttgtattttttagtagagacggggtttcaccatgttagccaggatggtcttgatctcctgacctcgtgatccacccacctcggcctcccaaagtgctaggattacaggcatgagccactgtgcccggcctgttgtagttttgagacggagtttcactcttgtcacccaggctggagtgcagtggcatgatctcggctcactgcaccctccgcctcctgggttcaagcgattctcctgcctcccaagtagctgggattacaggcacccaccaccactcctggctaatttttgtattttttagtagagactgggtttcgccatgttggccaggctggtcttgaactcctgaccccacgwgatcgcccacctcagcctcccaaagcgctgggattacagttgtgagccaccactcctagccaaagctagtttttaataaaattttacaaacaaatgtatccgattttagtttgactgtagggtaacattttcataaaccttttatataaccctttataattgtttgttaacaaatcagtgttcaaaaataaaacactattttttttttttttttttgagatggagtcttgctccattgcccaggctggagtgcagtggcacattctcagctcactgcaacctctgcctctcaggttcaagcaattcttctgcctcaacctcccgagtagctgggaytacaggcgtgtgccaccacgcccggctaatttttgtatttttagtagagacaggatttcaccatatgggccaggctggtttcgaacttctgacctcgtgatctgcctgcgtcggccttccaaagtgctaggattacaggcatgtgccaccgcrtctggcataaaaccctattattttgatatatgggcccagattctggccctgcatcagtatgcttttaatatttaatttatggaaaaaattaaataataccctttcgattttagccagcttgctcacacacagagttgttcacaaagttaatttttcacaaacctacaatttgcttaaactttcagttttattttgtctttcaaccaaaaataatctttaaactctctaaattagagaagattttctcttttaaaaaaacccatattcccatgtctttaagcagttttaattacataccaagtgcagagcctagaatacaggacagaactgcagataaagtctgactctctctggcctagctaggagtcatggctacctccatatgtccccaggccttatctggaatctaatggctctaaagtaggtaaattgaacaattacaaaagtcacagaagccacttatgaccttaaagcatccagcagaaacagtatctgatctgcctaattcagaccaaatgaagacagttttatttcatcaataatctttaaaactatctttatttaccaaagattactaacgtcatgtgaactaaaatgcattagagttgctatttctttgaaaaaatatttaagtgcttattttttaagccaattaattacagctcttaaacatcacacacacaacattataaatatatagaccgaagaagatgcattagttaagatttttcatttgctgattttttaggggttttttttccccattttacaaatcttgtcaygactcacagagaccatctatgccatgcttggactgtctgacttgtcctatgtgtccctctttcgtgaataatcagtcgttctattttaggacaagaatttaccatacaagatcttttctcatataaatttctttttttataatcatccttaccaaaaatacatctttatagcctcaacttttttcacatatctctttcccctactaaagtaattcctgatgccctcaaaagtgaaaaaggccaagtaatgtgattcaaaacagaacagagccttagattttgagaggggtctgtctgcttacacttcttggggttttatgaggaaaacagagtttctcccaaaacagggtctgtggagccttctctctttttcccaaggagtccccagctgtcagaaagtaccttaggtcctctcatgtgggcattcagagtggcaggaagacagactggggaaataattcagttgactgagaagaaagacaaacaaaaactcattcctcgaagaaaaaaaaaaaatccaggaagagaaaaagcacaaaggccttttttttatttttttatttttatttttatttttttttgaaatggagtcttgctctgtcacccaggctagatagagtgcaatggcatgatctaagctcactgcagcctctgcctcccgggttcaagtgattctcgtgcctcagcctcccgagtagctgggaccacaggcacacgccaccaggcctggctaatttttgtatttttagtagagacagggtttcactatgttggccaggctggtcttgaactcctgacctcaagtgatccccctgcctcagcctctcaaagtgctgggattacaggcatgagccactgcacccagcccacaaannnnnnnnnnnnnnnnnnnnnnnnnnnnnnnnnnnnnnnnnnnnnnnnnnnnnnnnnnnnnnnnnnnnnnnnnnnnnnnnnnnnnnnnnnnnnnnnnnnnnnnnnnnnnnnnnnnnnnnnnnnnnnnnnnnnnnnnnnnnnnnnnnnnnnnnnnnnnnnnnnnnnnnnnnnnnnnnnnnnnnnnnnnnnnnnnnnnnnnnnnnnnnnnnnnnnnnnnnnnnnnnnnnnnnnnnnnnnnnnnnnnnnnnnnnnnnnnnnnnnnnnnnnnnnnnnnnnnnnnnnnnnnnnnnnnnnnnnnnnnnnnnnnnnnnnnnnnnnnnnnnnnnnnnnnnnnnnnnnnnnnnnnnnnnnnnnnnnnnnnnnnnnnnnnnnnnnnnnnnnnnnnnnnnnnnnnnnnnnnnnnnnnnnnnnnnnnntagccaggatagacagccagtatttctggcttttgaactttaccacaggtaacctcctagcaaaattaataagtcttatctaagattatgacttaactacggaagtataagatgtctcaaagggatggtaagcagttttttgtttttttcttttacaagatttagaatctccccaaacgtagtttagagaaaagaaaatttaaggcagatttcaaggcaagctgtccatggtggggaaagaatcaataaatggcacacaaaaaaaacttacataaataacaaaccagagagcacccattccgtaagctgggaaccagacccaggctaccactgtgaaatagcaaagcttcagctactgagctaaagctgaaggctgttacactgctcttcctgggaatccaggactttactcaagataattcttaaggctagacatgacactgtcacatgtcctctcagaccagctaccgacatgaacccaaaaattcatgccctctggatgccggagaccaaaagagggtaccctgacatggtcccaaagtcaagtttttcaggacgtaaaacaagagaagagggaaaccttatctggtttttgttggagcaaagtttggaactgaccagtctgccaggctggattgaacagcgggcttagaggggtcctatgtccacatcctattctgtggtcctgctctccatgacagaggatgcagctgtgagtgggtttggtttgcgctgtatctccagctactaaagcaatgcttggcaggtagtaggtgttctagaaaggtgtgtcgtattaatgtgtgaatactgactccccctcctaagtcactgagtgaggagagaggatgtgtgattcatctgaggcatgcgagagctggttgtgcctttgtctttgtttttcttttttcttttgagatggagtctcactctattgcccaggctggagtgcagtggtgcgatcttagctcactgcagcctccacccaccgggttccagtgattttcctgcctcagcctccagagtagctggggatttgtattcacagcacagagtrcaccagattccctacagcctaagtctaggctcataagattttttctattaatcagacccttgcagaggagacaaacagtgatgttttccattcatacacggcgagaggggccagaagcctggctggtaagaaatgtttaccctttttgcctgcatgtcaggtttctgggttcccattctctgtagcttccagaagaacggagcagctcttgatgaccctgctcgctgcacgctagctgtgggcgccaagtcgcattgcaaaggaaaaccatccgtttctgttttatggaaccacaggcaaaagcctctcaatttttcaagatgctgcccaatgggctgcatggggaactgaattaacattttccatcctggccagagcagagtacacatgacaaaactagtcactatgctcagtgcccagcatcaacttggcaaggctcacacttgctcccgttggtctctgtcatctttgatccactccactcaaggtgggaagggacggcttccaccgggaattcaaaggatggtctctgagccagatggaagagcggatggtcaccctcgaggcagccctgtcaaacttccgagcttctgctgacaagtccttcagggttcagtgaatgtgaccaaccagacaaactaggagagcctgatggacttccttcagcaattcccttagacatctcctccacatatacaaacacatacagcaaaacaccttccagaaagagtttccagactaaatcacaaaccaagagtattcctccaaacaagtcccctattctctgtacaattagggcagataccccatgctggggctacaaacagataccacctaatagagctagagatgccccatgatggggctacaggcagacacccaatgatggggctacagacagataccctgtgatggggctacagttacaggacgtctccccaggactgtttattgcagttaaatccatacaccatgggttggcagcaccccattagtagagatggtgccagtgtcagcccccagtcgaagagaactaggtggccgcctgggctggcctctggatccatcaccagtgaggggggttggggaggctactgaatcrctggaagatagccacaagggagatcacagatgagcccccaaatttgtaaccccctccacaggttctccttgcccacagcctagacagccaatttatcaagacaggagaattgcaatagactaattcacacagagccagctgtgcaggagactggagttttattattactcaaatcagtctccaagaatttggggatttgagtttttaaggataacttggtgggtaggggctctggaggtgtggattgctgattggtcagcatggagatgaaatcatagggggtagaagtgagtttttcttgctgtcttctgtccttgggtgggatcaaagtgccggttgaatcatattacctgtctgggtggcgtcaactgctgcattggaaggcagggtctgcaaaatacctcaagcactgatcttaggatttacaagcgatgttattctcaggagcaatgtggggaggttcagactcttgcagccagaggctccgtggctccaaaaccataatttctaatcttgtaactaatttgttagtcctacaaaggcagactgstccccaggcaagaagggggtttatttcaggaaagagctgttatcctttgtttcaaagttgaactataggccgggcagggtggctcacgcctgtaatcccagcactttgggaggctgaggcaggccgatcacttgaggccgggagtttgagaccagcctggtcaacagggtgaaaccccgcctctactaaaagtacaaaaattagccaggtgtggtggtgcacacctgtaatcccagctactcgggaggctgaggcaggagaatcacttgaacctgggaggcagagattccagtgagccgagagtgtgccactgcactccaccttggtgacagagtgagactccgtctccaaaaacaaaaaaaacaaagttgaactataaactgaattcctcccaaggttagttcagcctatgccctggaatgaacaaggacagcttggaggttagaagcaagatggagtcaggccagatctctttcactgttaacattttctcagttataatttttgcaaatgtggtttcagtccctgcatccataatacctagaaatttgataaatacttgttaaacaaccaaaataaacatccatagcaagaatcgactataaggcatggtggtgcacacctgtagtcccagctactcaggaggctgaggtgggaggatcgcttgagcccaggaggtggaggctgcagcaagacatggtcgcaccagtgcactccagcctgggcaagagtgggaccctgtctcaaaaataaataagagtcccgaccacgagctacagagagtccatctgtgctataggaggcatccacacagcacacacccactgctaccagcgaagcagttcacgcaggctgtgatagatcacactgttcctctctttggatgattggggttcactgctacactgcacaggtcagcaacagcatgtacagaaatgggctgcggtggggagactcatcagccccctggcatctgaacatggccaacactatgccttctgtttcatcctcagactttgggactattagggatttaaatattaatgcgcggatttcactgagccctggcctctctttggtgcctgtcaggtacactataatgagaaattggatcgttcattcttccctccccccttccctcccttctccagggaacagggtttttgttcttggagcttgggaggtggctgagttccccaactagaatcaagtaacctttagtgcatatgcaaatccagcatttgaaatttccggttctctagccttattattctagagggcagccagctttcctttcatttcatttggggtccgcttcacttgctttgcagctactctggtatgcaagctcgacacagccccaagaaggctgcaccccaggaaggagcccaccatgctctgagagtcacaaagaaagaagcagacccttggcgggagagaaaggaaggcctgaggcaggttgtgtttgtgatgcagatgctcctgcgagccgtgcggctctctgaaagcgggtggagctgagaagcaacccagagaggctcctgcagccagggtcgggaggatttcaccttcctggatgggaattgattctccagacctagctttattaagtgtcagcgagttacatgcacacagatcactcagattccacagacacctccccaccagcccccagcaggaccacgggaggagactcgtgccgttaggcctctgtccctgcatgtgacatctgcagggaagggcaggcctagcaactgtcaggggactagcataaaccctttttgcttcaggggtctcttcccaggtaatggcctctgtcctctttgcaccctggccggctgcaggagcctcctaactgctcccttcaattgcgtcctcaccccgcacccgttctccagaaagatcctgttgtaaagtaatctgatcatggcccgggcttgcaggcttcaggcggctacccgtgaaatcccaggtccttaccacaatctgtgaggcccgctgtggcccggccccagcccctgcccatcctccctcttcagcgtcttctctgatggccacatggcctgtgccctcacgtccctcagatgccagggttccctcaccctccaggcctggcagcccttccctccctttgctcaacaaggcgcccaagagctgtctgttgatgactggtctccccagggcagctgtgatgtggttttggtttgcgccgtatccccagctgctaaagcaatgcctggcgggtagagggtttcgtgcgcgtccgtgtgaagagaccaccaaacgggctttgtgtgagcaacatggctgtttttttcacctgggtgcaggcgggctgagtcccaaaagagagtcagcaaagggtggtggattatcattagttcttatgggttttgggataggcggtgaagttaagagcaatgttttgcgggcaggagtggatctcacaaagtacatcctcaagagtggggagaattwcaaagaaccttcttaagggtgggggagattacaaagtacattgatcagtttgggtggggcagaagcaaatcacaatggtgggatgtcatcagttaaggcyatttttacttttgcggatcttcagttacttcaggccatctggatgtatacgtgcaagtcacaggggatgcgatggcttggcttgggctcagaggcctgacattcctgccttcttatattaataagaaaaataaaatagtgttgaagtgttggggcggtgaaaatttttagggggtggtatggagagagaatggrcgatgtttctcagggctgcttcaagcgggattaggggyggcgtgggaacctagagtgggagagattaagctgaagggaggtcttgtggtaaggggtgatattgtggggatgttagaagaaacatctgtcrtatagaatgattggtgatggcctggatacggttttggatgaattcagaaactaaatggaataagagaaggagaaaaacaggtataaaaggtctaagaattgggaggacctatgacatctgattagagagtgcctaaggagattcagcatagtcctgccagcaaagattatttatttacctcaagagtttagagtggcagtttggggatagcaccaggagatatcagctgtgatggcttggagaaacagtgtaaaccggcagtgtaaacaagagcagggcatgtatgagtagttgagaatggcgaataggaatatgactagacaggagatagtagggatgacaagttttggggggcacagtctaagttggtctggtgtctggaatgagactggggcctaataaaaaggagcgtctatacaggagcttacatgggctgtaccttgtagcattctgaggacaggcctgaattctgagaagggaaagtggtaaaagtattgtccagtcctttttaagttggaggctgagcttggtgaggtgtgtttttaaaagacctttagtccattctacctttcctgaagattgaggatggtaagggatatgaaggttccactgaatactaagagcctgagaaactgcttgggtgatttgactagtaaaggctggtccgttatcagactgtatagaggtgggaaggctaaactgaggaattatgtctgacagaagggaagaaatgactgcggtggccttctcagaccctgtaggaaaggcctctacttatctagtgaaagtgtctacttagastaagaggtattttagttacctgactcggggcatgttgagtgaagctaatttgccagtcctgggtgggggcaaatcctcaagcttgatgtgtagggaagggagggggcctgaataatccctgaggagtagtagaatagcagatggaacactgagaagttatttccttgaggatagatttccacgatggaaaggaaatgagacgttctaagaggcgggctagtggcttgtactatagcatagcctgcctttgctgctatgtggcgattaggcctggtggaaccgccatcaataaatcaagcgtgatcagggtgaggaacaggaaagaaggaaatatggggaaatggggtgaatatcaggtggatcagagagatacagtcatgggggtcaggtgtggtatcaggaataatgtgggaggccagattgaggtccaggccaggaacaatggtaattgtgggacttaacaaagagtgagtacagctgaaggagccggggagcagaaagtatatgcatcaggtatgaggaagaaagtagattttggaagttacgagaaatgtagagagtgagttgagcatagtttgtgatttttagggcctctaaaagtattaaagcagcggcagccgctgcacgcagacatgagggctaggctaaaacagtaaggtcaagttgtttggacagaaaggctacagggtgcggtcctggctgttgtgtaagaattctgaccgcactaaccatgcctaggaaggaaaggagttgttgttttgtaagtgattgaggtttgggagattaatcagacacgatcagcagggagagcacgtgtgtttttatgagaattatgccgagataggtaacagatggggatgaaatttgggcttgactgaagtagtgggggctgtctgtgaagccttgtggcagtacagcccaggtaatttgctgagcctgatgggtgtcagggtcatctaactgaaagcaaagagacgctgggatgaagggtgcaaaggaatagtaaagaaagcatgtttgagatccagaacagaataatgggtagtagatggaggtattgaggacaggagagtatatgggtttggcaccacggggtggataggcaaaacaatttggttgataacgcgcagattctgaagtaacctgtaagccttgtctggttttaggacaggtaaaatgggggaattgtaaggagagtttataggttttaaaaggccatgctgtagcaggcgagtgataacaggctttaatccttttaaagcgtgccatgggatgggacattgagtggggtaagggtgattaggttttaatgagatggtaaggggtgcatgattggttgccaaggagggagtagaggtatcttatacttgtgggttaaggttgggggatacaagaggaggacacaaaggaggctttggattgggaagaagggyggcaatgagatgtagctgtagttcaggaatactcagggaagcagataatttaaagtgtctcrgcctaataagggaactgggcaggtggggataactaaaaggagtgcttaaaagastawtgtctaarttggcaccmgagytggggagttttaagaggtttagaagcctggccgtcaatacccacaacagttacggaggcaagggaaacaggcccttgaaaagaaggtaatgtggagtgggtagcctccgtattgattaagaaggggatggacttaccctccactgtgagagttacccgatgctcggcgtccgtgatggtttatggggcttccgaggggattgggcagtgtcagtcttcagctgctaagccgagatctgggaaggagtcagagagccttgggccagagttccaggggctctggggagtggctgccaggtgagttgaacagtctgattttcatggggtcccgcacagatgggacgcggcttatgaggaatcccgggctgtgggcattccttggcccagtggccagatttccagcacgtgtagcaagctcctgtgggaggaggttctggaggaacgcctggctgctgcggttcaggcgtttggaagttcttgtgtgctggagatgtggctggggtttgtctcacagtggaggcaaggaattgccacttttttctattactgtccaccttgaaggtgaggttagttaagtcctgttatggggtttgagggccagattctaatttttggagttttatttaatgtcgggagcagattgggtaataaaatgtatattgagaataagacggccttttgaccttttagggtctagggctgtaaagcgtgtcagggttgctgccaaacgagccatgaactgggctggatttttatatttgatgaaaaagaaccnnnnnnnnnnnnnnnnnnnnggaatgagaataagagtgagtataaaagtaaagaatagaacttcatcagggtggaaatattggagggtgccttgccagcaaagatcatctatccactctaagagggagttaagagtggcagtttggggatagcaccaagagatatcagctgtgatggcttgaagaaacagtgtaaaccggccgtgtaaacaagagtagggcatttataagtagttgagaatggagaataggagtatgaccagacagaagatagtagggatgactagttttttggggctcggcctaagtggtgggggtgacttcgtaaagccctgttgcaaaaagtagggtaaggacgaaaaacctaatagaatgaagggatgtattaggctcataagggttatgactgttcttcgaaatacgactgagtttaagggaagtaggggagagtacttgcaacttccaggaggaagaggagggattaggctggctgtccgatggacacagctttattctggaacggtgagcctagtggggaggatcctgcaggcggacagcagtcggggtactatagatgactaagtagggtccggtccatcgaggttgtagagtttgaggagtcagattaacaagaactgatcgtccagctagggtgtcttcatatggctggggatctggagtaggcaagagaagcttagcagcctggcgaatttcctgtctagcctgctggaggactggaagacagtcgcctagagggctggtgtctgggatgaggttggggccaagcaagaaagtgcgtccatataaaagttcaaatggactgtacctaccctgtagcatctcgagaacaggctctaattctgagaagagcaagaagtaaaagtactgtccaatcctttttaagttggaggctgagcttggtgatgtgtacctttaaaagaccattagtccgttctacctttcctgaagattgaggatggtaagggatatgaaggttccactgaatactaagagcctgagaaactgcttgggtgatttgactagtaaaggctggtccgttatcagactgtatagaggtgggaaggctaaactgaggaattatgtctgacagaagggaagaaatgactgcggtggccttctcagaccctgtaggaaaggcctctacttatctagtggaaagtgtctacttagannnnnnnnnnnnnnnnnnnnnnnnnnnnnnnnnnnnnnnnnnnnnnnnnnnnnnnnnnnnnnnnnnnnnnnnnnnnnnnnnnnnnnnnnnnnntagtagaaatagcagatgggaacactgagaagttatttccttgaggcatagatttccacgatggaaaggaaatgagaggttctaagaggcgggctagtggcttgtactatagcatagcctgcctttgctgctatgtggcgattaggcctggtggaaccgccatcaataaatcaagcgtgatcagggtgaggaacaggaaagaaggaaatttggggagatggggtgaatgtcaggtggatcagagaaacacagtcatgggggtcaggtgtggtatcaggaataatgtgggaggccagattgaggtccgggccaggaacaatggtaattgtgggacttaacaaagagtgagtacagctgaaggagccggggagcagaaagtatatgcatcaggtatgaggaagaaaatggattttggaagttatgagaaatgtagcgagtgagttgagcatagtctgtgatttttacggcctctaaaagtattaaagcagcggcagccgttgcacgcagacatgagggctaggctaaaacagtaaggtcaagttgtttggacagaaaggctacagggtgcggtcctggctgttgtgtaagaattctgaccgcgctaaccatgcctaggaaggaaaggagttgttgttttgtaagggattgaggtttgggagattaatcagacaagatcaacaggcagagcacgtgtgtttttatgagaattatgccgagataggtaacagatgaggatgaaatttgagctttggagggggatacctgatatcctttggagagtaaatgctgaaggagcagaagtgtgtcttgttgagaagattcaaaggaggggctacaaagaagaaggtcatcaatatattaaataaggtgagaagcggaggggtggaaagaaagtagatcatgagaaagagcttggctgaagtaatgagggctgtccctgaaaccttgtggcagcacagcccaggtaagctgctgggactgatgggtgtcagggtcagtccaggtgaaagcaaagagaggctgggacaaggggtgcaggggaacgctgaaagaagcatctttaagatcaagtgtggaatagtgagttgtggaggaaggtattgaggatgaaagagtgtacgggttgggcaccacagggtggataggcaaaacaatttggttgataaggcgcagatcctgaactaatctgtaagacttgtccggtttctggacaggtaaaatggggggattgtaagaagagtttataggttttagaagcctatgctgtagcaggccagtgataacaggctttaatccttttaaagcgtgctgtgggatgggatattggcgttgagcggggtaagggtgattaggttttaatgggatggtaatgggcatgtgatcagttgtcagggaaggagtagaaatgtcccatatttgtgggttaaggtggggggatatgagaggaagacgcaaaggaggctttgggttggggagaagggcggcaatgagatgcggctgtagtccaggaatagtcagggaagcagataatttgcttaaaatatctcggcctaataagggaactgggcaggtggggataactaaaaatgagtgcttcaaagagtattgtctaagttggcaccagagttggggagttttaagaggtttagaagcctggccgtccatacccacaacagttatggaggcaagggaaacaggcccttgaaaagaaggcaacatggagtgggtagtccccgtttcgattaaacagtgggtggacttaccctccactgtgagagttacccaaagcttggcgtccgtgatggtctgggggcttccaaggcgattgggcagcgtcaatcttcagccgctaagccaaggagtcagtcagagagccttgggccagagttctaggggctctgggagtggctgccaggtgagttgaacagtccgatttccagtggggtcccgcacagatgggacacggcttaggaggaatcctgggctgcaggcattccttggccctggtagtcagatttctggcacgtgtagcaagctcctgggggaggaggttctggaggaacgcctggcygctgcggttcaggcatttggaagttcttgtgtgctggagatgtggctggggtttgtctcacagtggaggcaaggaattgcaacttttttctattattgtacaccttgaaggtraggttaattaagtcctgttgtggagtttgagggccagattctaatttttggagttttatttaatgtcgggagcagattgggtaataaaatgtatattgagaataagacggccttttgaccttttagggtctaggggctgaggaagaattggaacctagctcrgcctggcgaggaggggagaggtcagatgggtctgtagaaaaggaagattagaaagactcagcaacgcttggggttgggactgagggaacaggcrggagggaaagaaggaagatttgggacgagttgcactgggcacagagactaggaagggactgatgtgtaaaagaatgcctggacatcaggcacctcagactgtttgcccattttacgacaagaattatttagatcttgcaggatggaaaaattgaaagtgccrttttctggctatttggaactactgtcgagtttgtattggggtcaagcggcattgcagaagaaaataaggcatttatttaggttttaggtcaggtatgagttgaagaggttttaagttcttgagaacacaggctaagggagaagaaggaggaatgtaggaaggttgcccatagtgaaggaggcaagcccagagaaaagagagcgtagagacatggagggaaggggtttgggggttcttaccctccagaaaagcgggaaaggggttggggcatggaaataagggattggggcacagagatacgagtttggggtacttgcctctcccccagaaaagcgrgacttgccgctaagggtgaaggagaaggggttggggggttcttgcccctgccccagaaaatcagagaaggggtagagacacggaaagaaggggttggggtacttgccccttcctcagaaaagcgggacttgccgctaagggttatggaccaaggcaggtgtccctgcgtggtctgacacctctgaaacgtgggtgaatgatcagaggcgtccttgcaatgattaaacaccaagggaaggctgccttcccagtccgtgaccggcgccggttttttgggtccacagataaaacgtctcctttgtctctaccagaaaatgaaaggaattgaaattaagagaagggagagattgaagtgtggcgcctagattgaaaggagaaagacggtgagggatagggaggttggagaagagagtaaaaagaggctgcttattggatttgaaattggtgagatgtttcttgggctggtgggtctgaggacctgaggtcataggtggatctttctcatggagcaaagagcaggaggataggggattgatctcccaagggaggtctcccgatctgagtcacggcaccaaatttcatgcgcgtccatgtgaagagaccaccaaacaggctttgtgtgagcaacacrgctgtttatttcacctgggtgcaggcgggctgagtccgaaaagagagtcggcaaagggtggtggattatcattagttcttatgggttttgggataggcggtgaagttaagagcaatgttttgcgggcaggggtggatctcacaaagtacatcctcaagagtggggagaatttcaaagaaccttcttaagggtgggggagattacaaagtacattgatcagttcgggtggggcagaaacaaatcacaatggtggaatgtcatcagttaaggctatttttacttnnnnnnnnnnnnnnnnnnnnnnnnnnnnnnnnnnnnnnnnnnnnnnnnnnnnnnnnnnnnnnnnnnnnnnnnnnnnnnnnnnnnnnnnnnnnnnnnnnnnnnnnnnnnnnnnnnnnngctatttttacttcttttgtggatctttagttacttcaggccatctggatgtacacgtgtaagtcataggggatgcgatggcttggcttgggctcagaggcctgacagtaggtgttctagaaaggtgtgttgtgttaatgtgtgaaatactgactcccctccctcagtcactgaggcggggagggtgtttggctcttttgaggcatgtgagagttggttgtgcctttggttttttgtttgtttttttttcttttgagtctcgctctgttgcccaggctgaagtacagtggtctgttcttggctcactgcaatctccgcctcccaggttcaagtgattctcctgccaagcagctgggattacaggtgcgcaccaccacacccagctaggttgtgcctttgttaggttctctgtgacttttacccactgtgccattcctgaaagaaatcttttttttttttttttaattagaagaattactggaactagcttggcactgttggacacagtctttgtctcagctactcgagaggctgaggcaggaggttcgctcgagcccagcctgggcaacatagcaagaccctatgtccgaaggaaaaaaaaggcaaaatcagaattaccagaactgatttcacatgtgtaggtagcagatggtggccatgcaattcaggtctgtctgaaggcccccaggcctggtacaaaactgtgtaaggccagtacaaggccctgacaggttcccaagtggctggactggaagagatgccaagttcatggcctcctaacctgactccacccagcactccctgggcccagcgacgttccctcctgaagcctgaaattcacctccacctgaggaggccatctgcctggggataggttcttgcaaaaatgaaaacactcatttccagaggcaattaattcttttaaaggatgtcagatttttggyacaaaatcatggtttccacgttggcttcatgctcggtgctttatgagaaaaatcccttttttctacggttgtgttcattgtattgtaaagcaatcgtagattattttaaggttttgagttagagtgattatccaattttatgagggaaataaaggaattccatgagaaaaacgggggctttcctgcagggctcggggttgcgggagcggcagataacctgattcattaacatgagcccagtgggattggtgggggtgatggggacacagatkggagcactcaactcaggcacaggaccccagcagaacatgcccaggtcctcctagacatgggcccttgcagactttctgaggcctcggtttcgtcatcttaccaaggtgtgaccccaaccatcatctcctgaacttctggccacagagctstgagcaagcttccatcatgaccccattttggagatggggagttggcgcagccacactgctgctcagtggtagaaccagcatctgacccaggccacctgttccagagaccctgcttttagccagcagctcagwccccagtcatgtggggccatttatttatttatttaagatagagtctccctttgtcgcccaggctggagtgcagtggtgcgatctcggcttactgcaacttccacctcccgagttcaagcaattctcctgcctcagcctcccgagcagctgggatttcagacgtgcgccaccatgcccagctaatttttgtatyttaagtagaaatggagttttgctgtgttagccaggttggtctcaaattcctgacctcaagtgatccacccttctcagcctcccaaagtgctgggattacaggcatgagccaccatgcccggcccacgtggggctgtttaaattaaaatcaaattaactgagttcctccattgcattggccacgtttcaagtgtgcagagtgacacatggccagtggctgccatcaccgctgatgtcgccacgtccctcatcacaggaatatccctggcagccctgctcccggccctctgcctcctgacgctcccttgtgacttgttagaaaagcgtaggtacagctaaaaaaaaaaaaaaaaaaactgatggctgtgagaatactgtcactcgctgatgccttctgtgtagaaaaataagccttagacagatcttcgcaagaacatcgtgatggctctcataggcataattacgtgttccaagccaaattgcagttcaagagaaggttataaatctcttcttaataacaattgtactcacgttcctctcctggaaactaagaggaaggtagctgaagaaactctccctgcccagttaaatcttgttttttgggtacttttggactccagggtcacatcagcaatggcccgggacagacgagggggagccttcatctgtacttcgtgtctttccagggtggcaatgaccatgagatcttcacagaccccagaaccatgbgctmctccrtgacarcgcctgaggacabgsscwggatctstgaactgctgttctcctaacgtgggagcgggagggrcggggtcccggctgacaagccagcatagggcattcggtggccagagccgagggtcctcccacacgtgctcacccacccgcagcctaggcaggctctgcatgctatgccaggcatgtgcmgtctggacttccacctccagtgccagaaacttccagaargaaggagaaaactcttgtcaagaatggcccagaggaatgcctcgcacaaaaggtcttccccacccacccccagcccmctagtctaatacccaccctgatacgtgcaatcatgtagttttggcggaaatttccccatcattctaggatgatacagaaagaaaaactgtgcctggaccctccctcttggtgggtctgtggaaacataagcggtttttttaatgggcccctgcatcaataccaaacatgggggtttggtaatgagaaaccaggacaggccatctgcagtgacccagcccaggacgaagtttacaaacacctcctggaacgaagctcccgcctgcatgtcaccttgatggggrctgtgagtggggcagtgtgatacccrgtgactagacgcactctgcgttttcccgtgtttggggctgaggcctgctggacagatggctggccaagtgggagcagaccctagggagtttgcacctcggctgggccggattcggaccggctctgtgttcactacactcagaatagcctggctgcttctctgtctccgagaccggaggtagtgggaaccaacagctgggctggagagttggtgctggcaaaacagtccttsccctggggccggttcttacccaggtccagagaaaccaacgcgggatgtcagacttcaccaaaaggactttctggttgcccctggctggcttcctggaggcgttcgcctctagtttctcagggatggagcgagagcccagccagagaacagtaagaggagctgctctcctatctgcactcacccaggccttcacccagactttaccrcggaggcggctgagtgcagctacagctaggtccgcgtccctcactcttttcatcttctgcacgttcttcgtgaaactggaaggatcccgggtctcagctagaacacggtggaagagaactttcctaggaaacggttcatgtgtcacttttcaggatgtggaaacactgagccatacaccctccattgcttggtgctggggttgtgtggcctccactgggcacttgccgacctgagtctggggccaggggagcccaggctgccctgcactcctgcctcccagcccacagccaggtgctttcatcacagctaaacctggttccctccaaacctcccagccactcgggcttgtaactgtctgagccccggatccggtggggtgaaagcagccagctcatcccagtgactcacaggacacagccatccagcggcatctttccttgtcgaatgatactgtaatgaccttccaaagtgaagagtagcacattaaagtgattttattgtttcctgtttctcattccgatttctttttcctcctatgttcccagattctggaatggaaccccagcccttccaggtctgagagccactctttctttgctctggatttctgtcacatcgggggcccctccctctgcggagttgcatgttgctgttcctgatgcacagactcctcccccgctgcttttctgcccactgggtcaggatctgccattctttacaagtttccttaacgtattgcgtcaaagcgagacaaccgagtcttactcaaacttgttttaaccggagatggagggttgctgctgtgtcaccgcctgcacagggctgccctcaggtgagtaccccgagtctgccaggctgggtgctgatgcgtggaggtttgggccgtccctgccccagttcccacagtggctgcttgagaccctccccaggcccctcgagcccctcctgcactgtctgctgcctcccttctgcagtcagaattgacactccccttccaccttctttgtcatcacattgcatcccaggccagcttcctggggcttactccaagggcatcggcttgccccgcactgtggtgggatgtaaagtgataacagctaaacgacgcatgcacaacatgtcctggtgccttctgcgtgaccccagagcagcaggttctgcacrtggcaggtaagagcacagctgccaagaccccaagcctagttctgctgctacaagctgctgcgtgacttaaggtgagttcatcttcgcctcagtttcctcctctgtcaaatgggatagtccttaccgtgtatggaatttaaagcactttgaacagtgagtgtgagccattactaactcaagtaataccccttcccaacccagaaccctataaggcagggacagtcagtccctctctctgctttagggggttgcaggataaagacaccgtcacaagaaatttaaacacagtaggtaaattttgagccacagcaaagcacagaggttgcatccaggccagcttagcactgttgaaagtcaccatccccagcactgcagaagctgaccctgaactcaaggtcacccagggcttaagcctcagagaaaaggcctgggttgaacctgagcagtgggtgagtgcagggcaggcctctggctccctggagggagaggctagccaggaagttgagcttgaacctgatcccgagggagaggtgtggggcatgctcatgatctgtccgggaaggtctctccagctactggaaggggagtgcccacaggggccaggagaaggcagttgggcagatgttgccrtagtccggacacatccaggcatacgtggttttgaatcacttcctctccaagggctgctgcttcctctccacccctcccaagtgttctggctctgggccccagctggccacctcagcccaggcaggctcctccaacctgaacgacaggcaacctccacgctgcctgccacggcaccccaaagtcaagacgtagaactcattccacctccttcacccgaggctgctttcccaaacgtcttcccagtcccaccttcagttttgttttttgttgttgttgttgctattgtttttgagacaagtcactgttgttgcccagcctggagtgcaatggcacgatctcagctcgctgcaacctccgcctccccggttcaagcaattctactgcctcagcctcccgagtagctgagattacaggcccctgccaccatgcccaggtaatttttgtctttttagtagagacggggtttcaccatgttggccaggctggccttgaactcctgacctcaggtgatccacctgccttggcctctcaaagtactgggattacaggcatgggcatgagtcaccatgcccggcctttttttttgtttttgagacagagtctcactctgttatccaggctggggtgcagtggcacaatcttggctcgctgcaacctctgcctccaggttcaagcgattttcctgcctcagcctcccaagtaactgggattactggtatgcaccaccacgtgcagctaatttttgtatttttagtagaaacggggtttcactatgttgcctaggctggtcttgaactcctgacctcaagtgatctgcccacctcggttaccaaagtgctgaaattacaggcgtgagctaccacgcccgctccccaccttcagcttttgccaaacccttccttggctacccatgtagtactccatatagtaagtaagtcagcaaatctcattgttttgagctaagtgcctacgttaggctctccctaaacaggtttgatgggctggttttttcccaatatgctttggaaatcattgtataatactgacaagaaaagtgtccatctctgcaccacccaaaatcactgcctcccttrggagacaccggccagagcaaagccttcccaacagagcacagcgaccccagagtggcccctgcctgtcactgctctcctggaaaccaagaacaggagttcttacacctgcccaccttctgccctcactcccactggcccaacagcaaacccttcctcccctgctatggaccttgaaaagctctccgtcctaggactctgccagccccgggccctcaagcctcatctgcttccagcccctgacttcatgcctgaagagcagcaagcttttttttttttttttttttttttttttgagactgggtgtcactgtcacccaggctggagtgcagtggtgcattcacagctcattgcagccttcacttcctgggctccagcaatcctcccacttcagcctctggagtaactgggaccacaggctcatgccaccatgcccagctaattgtatttttggtagagaccatgtttcgccatgatgcccagctggtctcaaacccctgagctcaagccatccacctacctcggcctctcaaaatgctgggattacaggcgtgagccactgtgcccagccctagcaaacgttcatcaaatgtctatagcagtggccgggtgctgtggctcacacctctggtcccagcactgtgggaggctgaggcaggaggatggtctgagtacaggacttcgagaccaacttgggcaatgtagcaagttgctctctacaaaaaatttaaaaattagccaggcatggtggcatatgcctatagtcccagctactcaggtggctgaaggaggatcacttgagcccacaaggttaaggctgcagggcaacaaagcgagaccttgtctcaaaaacacaaacaaaaaacacttctatagcaggaatgagccagggactgtggacagtgtgccccgaggcccgtcctctcttcccacagctgatggggatgaggtgtaactcacacatcctaaaagcttcaacagggcactggagcgccgctgaccaagttactggcattttctattgccaggaagccgcattctcctctctgctaagctttctcatgctagagaatgatgactaaaaaacagatgatcccatcttcttattcaccatcccctaaaaaaaacagactgccacgtggaatgtgtcagcctcacctgggggagacacccttatctgacgacttaaaaggaaaaacttggtgagccagcctccacacaaacacacgcatagccttgcacaaaacaaaaatttattgggagaaagatggctgatgggaggcaagatctggattcaggaatcctcaattttagctctcgctctgtcaccaaaaccctccgtccctcccagagcctcgaggagtttccccttgtgtaaaccggtatcgcgtcccttccagctctgacatcctgcggttctagaatacccattgattgaaagagctgtggccaaacaggaaggacagagtaagagccgctgacaaaggattctgccaagacagaatcccaaggtcacaggagagaggcttggggcagtgaaagccctctcgggtcttggctktggaagtgtggactgtaccagcagatgggcccttgggaagccaacagggaacaattcaaggctggagagaaaaggccacctttgacccagcagaaggcagaggcgggagaggagggtgaggatgtacaaggagcatcgcaggcgaggaaacaatggccaggacctaactgtggtgggaactgcctttgtctccacacactcgcaatcaacatgcgtatttgctattctcaaacaactcccttccacccccttaggctgaaaggacaaactcatcagagttgaggagtacctacctgatgaagctgttcatgcttccagcatcaaactggacgtttactgtctgcccaaaagccagtttccaaaaggtttgcttccctctgttcagtggattcttgactacatataggtcatatatttcaaaaaataatgcctagctatttctactttgaaatcatgactaaagccaaaccacaaccacagcaaagataacctaaggatttgtttaccagaaatacctacaaaaaagtttgcaggccgggcgcgatggctcacacttgtaatcccagcactttgagaggccgagatgggcagatcayctgaggtcaggggttcaagaccatcctgcccaacatgatgaaacctggtctctactaaaaatacaaaaattaaccgggtgtggtggcgcatgcctgtaatcccagctactcaggagactgaggcggaattgccagaaccctggagggcagaggttgcagtaagctgagatcgggccactgcactccagcctgggtgacagaatgagactcagtctcccaccctgccaaaaagtttgcaatgtcggcagcaaagtgcaaacagagccggctctgggtgaaagctttagttatgaaaaataagaaaaaaaaaatccctaagcatttcttaacactagttttaaagaaaaccccctctccaaaggtatgtttctccttcaactttcttgactttgccaggctgtcaggatgcaagctacctactcttttctggatggatcgggacaaagtttttaaacaaagactgtgtcctctccacaagcccttcccaccaccaccaccccagccccccgccgccataattacaggggctgtgaaatggctgttgagtgatggtcacacaaccagaaggcagatgaaaaggtcaggctctaagaggggttcagcctcccagtaccagcctgctgtgcccaggggtgggagtgctgggagaactgtcttccccagacaggcagctatgccgcctcccactgcaaaggcaccaaaaggcaacatccgtccaatccaaagaccgccacccccgcctttccccccccacttcaagccagctcccctagaaccaaccaagccaagaattagaaaactgctttgcccaggccccaggagaggcgcaaggggcacttaggtggaaatttgccttggagaagtcacgcaaggtccctgtcaggctgccagggggccagatctgggaatctggggcctccagctccaggaggaagagggattctgtgggttgagcccatgtgtctgagcagctggagaaataccacccttgatccactccctgggatggggttggaacctccactcagccaccagtgggcacctctcctttttaaatgcttttaatgctcttcagatggtgagaggttgttgcaatggtcataggctgtgctgatggccgggaacaccccacaccccacacctgccccccataccccttcctccaggagatacttgagagggaccatgcccggctgaagccccgtctcgtgtggaagaatgtcatctccagtgtctgctgcctcctccccgcaaagtctcccacaagcacaggacaaggggtgcttccaccatctcctaggagctgatgacatgtccagaccaggtctcatgcttggtgcctggtgccaggtgagtgatgacgacctccacggcctgcagcttctcattcttgggtgggatggagcacattttataggtgacctcgtcgccttccactgggacatactccccttccacactac

SEQ ID NO: 93243 - DNA, 52614 bp, Homo sapiens
  misc_feature (1)...(52614): n = A,T,C or G
cgactcactgcaacctctgcctcctgggttcaagttattctcctgtctcagcctcctgagtagctgagattacaggtgcccgccaccacgcccagttaattttcatatttttagtagagatggggtttcaccatgttggccaggctggtctcaaactcctgacctcagatgatccacccacctcggcctcccaaagtgctgggattataggagtgagccaccacacctggcccaactcacgtttataataatttttttttctagaaacagagtatcacattgttgcccaggctggtcttgaactcttggcctcaagcgatcctactgccttggcctcccaacactgggattacaggtgtgagccactgtgcctggcctattttattgtttgataatgcttttttaaattttggaaacaacttttccagcatataagttcaaaaactaaagtgcataattaatgaaaaagtaaatactgaatctctttctcaagaaagttgatgataaatgtataacatgcataaatcatttgtccgcatttatcagccactcacagggcacaatgatgtcactgaccacatgaaaatcagaagacataaatctgcagagaaagcatcagtatctacctcaaaagtttgtcggttttttttgtttgttttgttttttgagacagagtctcgcactgtcgcccaggctggagtgcagtggcgcaatcccggctcactgcaacctctgcctcccgggttcaagcaattctcctgccccagcttcccaagtacctgggattacaggcgcccgccaccacgcccagctaattttttgtatttttagttagagtcagggtttcgccatgttggccaggctggtttcgaactcctgacctcgtgattcacctgccttggcctcccaaagtgctgggatttcaggcgtgagccaccgcgccaggccggtttgtagttattttaagactgtggccaaagaggtacagctgcagagaggtatttacatactgctctgtgaaggacttttgtttagatcaaatgacttatttagatcaaaattcattggctcattttccattttatgttgccttgtacatgatgaaaagtgaagcactacttgtaatgcgtagctctattagcagaacttcacagttaaatgatgccagtttaatgttgatatctttagatggttccaatagaaaatcagttgtattagtcggggttctccacaaaaacagaagcaacaggatgtacctggatctatctcgatctatctatatgtctatatgcgaggttgggagagattcatttattttaaggaattggctcacgcaattgtggaggcttgttgagtccaaaatctgaaggtgtaggcctgcggtctgaagactcagggaggagttgcagttccaatccaaaggcaatgtgctggagaatgccttcttgatcaggggaggtcagtgtttgttctattaaggcctttagctgatgaggcccactcacattatggagggtaatatgctttctcaaaacccaccgatttaaatattaatctcatacaaaaaacaccttcacagaaacatccagaagaatgtttgaccaaatatatgggccaagttgacacataaaactaaccatcatggccaggcacggtggctcacgcctgtaatcccagcgctttgggagactgaggcaggcagatcacgaggtcaggagtttcagaccggcctggccaacatggtgaaaccccatctctactaaaaatacaaaaattagcccgacgtggtggcacacacctgtaattccagctactcaggaggctaaggcaggagaattgcttgaacccgggaggtggaggttgcagtgagcccagatcgcgccattgcactccagcctgggtcacagggcaagactttgtctcaaaaaaaaagaaaaagaaagaaattaaccatcatgttagttaattccaattatggttcaattttacaccccatttatggaataaaagtaaagtttatggaggccgggcacggtggctcatgtctgtaatcccagcattttgggaggccgaggcgggcagatcacctaaggtcaggagatcgagaccattctggctaacacggtgaaaccccgtctctactaaaaaatacaaaaaaaattagccaggcgtggtggcaggtgcctgtagtcccagctactcgggaggctgaggtaggagaatggcgtgaacccgggaggcagagcttgcagtgagccgagatcgcgccactgcactccagcctgggtgacagagcgagactccgtatcaaaaaaaaaaaaaaaaaaaaagtaaagcttatggaaagttattctgatgaaagtgaaacatctggcattattgagaaaaccattatcaactcattgaaaaagtaaacatttagtataaatatttttgtgatgattgtttttcatagaaatacaaattttggcggagcacagcaccatggttaaaaacagacttcttaataaagaaatttctagagaagaaatacagttggacttggttgtggcgcacaaataattcataattgtgttcaaacaagtcgattacaaaattgtttctggctgggtgcagtggttcatgcctgtaatcccaccactttgggaggccgaggcaggcggatcacctgaggtcaggagttcgagaccagcctgatcaatatggtgaaaccctgtctctattaaagatacaaaaattagccgggtgtggtggcgtgcaactgtagtcccagctattcgggaggctgagaaaggagaattgcttgaacctggaaggcagaggttgcagtgagctgagatcacaccgctggactccagcctgggtgacagagcaagactccatctcaaaaaaaaaaaaattgtttctggaaaggcatcgggaagaggaatcttaggttacactcatgctttccttatttcttcctgcatgcagatattccagtaaagaacagtgacatacctagcatataggacgtccagagtagataattttttaacatttttcacctctatgacaaaatcattttcaataataatcatataataattaggaataattattttcttgcttttgtctgtagtgggaaaacaatattttagaagaatacatttccactttaaatataatgtggaaattcagtaaaccatttcatatgtgaaccagattttcacttaccaagaaaaagtcttacatcttgcagattgcagtgtttgctgttttccattttaaatacaaataaaaagtccaaattgtcacacagaatgacaagattgaaagaacagtactgtttctttgtttttacaatcatctggctatcattatttgtttcaaatccactattaaaatacaggagtatctggtactgcaggatttggagaaaggaactgcaagccagaggcaagctggaaggattctgaattgttgggtacctaatttagaaacaaatttgagtagctgagaccacatgtgtcaggggacgaatatataaccggaagttctctgaattaacttcctgatagaacacaatgtttgttaaaaggataagtaatgaaaatgttctaatatgaatttcaagttctatgccaaatagaaatgcattcatatattcaccaaaagatatgtacaaaatgttcatagtagcattatttctaatagcccaaacctggaaactgcccaaatgtccatcaacaggggaatggataagaagtcttagaggcaggctgggcgtggtggctcacatctgtaatctcaccactttgggaagccaaaatgggcggatcacctggggtcaggagttcaagaccagcctggccaacatggtgaaaccccattttctactaaaaatacaaacattagccaggtctggtgtcacacgcctgtagtcccagctactcgggaagctgaggcaggagaattgcttgaacccgggaggcagaggttgcagtgagctgagatcattcaactgcactccagcagagcagcagagcgagactctgtctcaaaaaaaaaaaaaaaagtcttagaggctagaagaaagtgaactgtttaaggcaaaattattatggaacacgtaacattggtatcatcatgtattgagccaagctctatgctaggcacttttgcatatattattttgtttaatcttcaccacactctgtgacagagatattaacctcatttgacgtataagaaaccaagcacgcagggaccaaggatcttgcccaaagtcaaaatgctataatagtggggaacccaggatttgaactcagtccaaagcccatacatcccttttccattacagcctgctgcctctccaggataaagagggaagacagggaaagtagggaagtatggacttcacaaattcatacatgctaaaattataacagctactgtttcttgagcacctattatgtggcaaatactatatgaggtactttacataaatgatttttagaattctcgtaaaactcttcatggcagtagttattattctctctctctctctttttcttttttcttgagacaggatatttctctgttgcccaggctggagtgcagtggcacagtcttggctcactgcagcctggacctcctgggctcaagccatcctcccacctcagcctcccaagtagctggggctacaggcacatggccaccaggcccagataatttttcatttttgtagagactgagtctcaccatgttacccaggtttattattctcattttttagatgaagagactgaggtccagagaagctcaatgacttgcctagttttacaaatctcctgccatcacatacccctcagcgtccttaataagagggaggccaccaactatgtgctgggcactgtggtggatgctggagctatagggttgagtatataagaaatggtgttgctggagcaactgttgcttgcttacctgacctatctgagaattaattagcaggggaacatatttttgttttcagattcaatataagaacttgtgtgggcaaaaataaagatcagtagtaataacagtagttcccatttgctgactgtactgtcctaagtgcatatatatatacatacacacacgcatacctatactcctctaatactcaaaatgatcctgtttatgtattgttaatatgctcattttatttttaaatttttatttatttttatttttatttatttttgagacggagtctcattctgtcgcggaggctgaagtgcagtggtgcgatctcagctcagtgcgacctccgcctcccgggttcaagtgattctcctgcctcagcctccggactagctgggattacaggcgcccgcctccacgcccagctaatttttgtatttttagtagagatggggtttcgccatgttggccaggctggtctcgtactcctgaccttgagtgatccacctgcctcggcctcccaaagtgctgggattacaggcatgagccaccgcgccgggctaatatgctcattttagtgaggcaaaaatagaggctcagagtctgatttgtacaaaactacagagcagttaagtgtcctctcagatgtgtaccctgatctgggtgactctaggactctaggtctcaactgttacaaccagttaagggtttggggaagcactgggccaagagtcaggaaaatggaagccacaggtagtgcaaggtcttgggaatgggacgtctggtccaaggattcacgcgatgactggaacccgaagagccggggcccggtttacggccgccatgaagcaacgcgcgccggtaggtttgggaatcagggagccctctgaataggagactgagttgggagggaaaggggcttcgctgggggagcctcggcttcttctgggagaaaattcccacggctacctagtgagcctgcaaactggtaggcgccggcgtaggcgcgcgggcggggccgggggcggggcctgcggggcgtggcggggcgggcagagggcggggcctgcttctcctcagcttcaggcggctgcgacgagccctcaggcgaacctctcggctttcccgcgcggcgccgcctcttgctgcgcctccgcctcctcctctgctccgccaccggcttcctcctcctgagcagtcagcccgcgcgccggccggctccgttatggcgacccgcagccctggcgtcgtggtgagcagctcggcctgccggccctggccggttcaggcccacgcggcaggtggcggccgggccctgaggcgcgggatccgcagtgcgggctcgggcggccgggcccagggaaccccgcaggcgggggcggccagtttcccgggttcggctttacgtcacgcgagggcggcagggaggacggaatggcggggtttggggtgggtccctcctcgggggagccctgggaaaagaggactgcgtgtgggaagagaaggtggaaatggcgttttggttgacatgtgccgcctgcgagcgtgctgcggggaggggccgagggcagattcgggaatgatggcgcggggtgggggcgtgggggctttctcgggagaggcccttccctggaagtttggggtgcgatggtgaggttctcggggcacctctggaggggcctcggcacggaaagcgaccacctgggagggcgtgtggggaccaggttttgcctttagttttgcacacactgtagttcatctttatggagatgctcatggcctcattgaagccccactacagctctggtagcggtaaccatgcgtatttgacacacgaaggaactagggaaaaggcattaggtcatttcaagccgaaattcacatgtgctagaatccagattccatgctgaccgatgccccaggatatagaaaatgagaatctggtccttaccttcaagaacattcttaaccgtaatcagcctctggtatcttagctccaccctcactggttttttcttgtttgttgaaccggccaagctgctggcctccctcctcaaccgttctgatcatgcttgctaaaatagtcaaaaccccggccagttaaatatgctttagcctgctttattatgattatttttgttgttttggcaatgacctggttacctgttgtttctcccactaaaactttttaagggcaggaatcaccgccgtaactctagcacttagcacagtacttggcttgtaagaggtcctcgatgatggtttgttgaatgaatacattaaataattaaccacttgaaccctaagaaagaagcgattctatttcatattaggcattgtaatgacttaaggtaaagagcagtgctattaacggagtctaactgggaatccagcttgtttgggctatttactagttgtgtggctgtgggcaacttacttcacctctctgggcttaagtcattttatgtatatctgaggtgctggctacctcttggagttattgagaggattataagacagtctatgtgaatcagcaacccttgcatggcccctggcggggaacagtaataatagccatcatcatgtttacttacatagtcctaattagtcttcaaaacagccctgtagcaatggtatgattattaccattttacagatgaggaacctttgaagcctcagagaggctaacagacataccctaggtcatacagttattaagagaaggagctctgtctcgaacctagctctctctctctcgagtaataccagttaaaaaataggctacaaataggtactcaaaaaaatggtagtggctgttgtttttattcagttgctgaggaaaaaatgttgatttttcatctctaaacatcaacttacttaattctgccaatttcttttttttgagacagggtctcactctgtcacctaggmtggagtgcagtggcacaatcactgctcactgcagcctcgacttcccgggctcgggtgattctccccaggctcaggggattctcccacttcagcctcccaagtagctgggactacargtgcgcaccaccatccctggctaatatttgtactttattttatttatttatttatttattttttgagatggagtttcgctcttgttgcccgggctggagtacagtggcatgatctcggctcagtgcaacctctgcctcccgggttcaagcgattctcctacctcatccccctgagtagctgggattacaggcgcctgycaccatgccyggctaattttttgtatttttaatagagacgaggtttcaccatgttggccaggctactctcgaactcctgatctcaggtgatccacccgccttggcctcccaaagtgctgggattacaggcgtgagccactgcgcccggcctaatatttgtattttttgtagagatggtgttttgccatgttgtccaggctggtcttgaactcctgagctcaagcgatctgcccgcctctgcttcccaaagtgctgggattacaggcatgagccaccgtgcctggcctaggtagacgcttttagctttggggtgtgatgcctgccccagtatatagtgaatttaattattgctagagctggctgtttgttagttttctttgaacataagatactcattgtttttagtttgcaaatccctcttcctttttaaaaaatttctttcccttaaattgtttgcatgttagcaataacaaatgcttaaatggtgctatgtgctagatactcttctaagccctgttatgtatattaactaattttttaaattacacaaatcagagaggttaagtaacttgcccaagattacccaacaatactaggatttgaacctaagtttgtctcaccccagattctgctcttaatctctaaacttttaagttagtagtgacaatagtaggtatttattgaatacttaactatgttttaggcgttgaagtaaatattttgcaggcattatctaatgtaaacaccctaaagttacataacaggtaccctttaggtaaataaacactagtatgaccttggaggcacagatagttgaagtaacttgcccaatatcacttacatgaaattggccctcaaatgtgtctgatacaacccatgctgcttgtaactatcgttttaaactgccagggtaaacttggacacacttgagctaagaaaaagcttttagatttttgcaaattaatgtgaaagatatgctttatgtggatataatatcttctaaatttcggggatggtagtcctagaaatgtaatcctgccctagccgagcttaccctgccaataattttttacagaattggtaaaacggagcaccttttttttgtccttggccacactgttatcaacagggtgtagattgacatcaatctgtaggtgtaaaccagaattactctttgtgaccaccaggaaatagagcagttcagttcaggggtttctttctgtgaatttagcactgtgacctgcatactacaagtctactttgttttctatccattgtttgtatctgggtattgcaaaaggtaggaaaaggaccaaccagatcagcagagaagagttgccttggagttttcttttagttttctgcagttcattagatagtaactaggccatgtcattttactcccttgtagtgaagatatgttgaagttgtactggtatactcttctacctttctgtaattttatattgtgtagacttgataaaatttatgtgtcaatcaccaccattaatatcaatattgagcctcaattcttatttttctgcccagtggctgccaaattactaacatttacaataattcactactactaagataatctactagttcgatcacatacttcaaattgttatggaactactgtcttcagcattgtgcttctgataactgataagtataattttttttttgtccagagtgaacatgtctattcttccactgtacacactaataaaaggaaaaattgtaatattgggtaaattcatgtccttacacatgtagtagttatgagcccatgtccctagaatgagtaataatttatccctcccttggttgaatagtcaagaatgctgattttaattcttctaacagctttatccctcagaagggaaggcaagcaagttatatatgtagtttatttgtaagactgatatgaaattggaagatgaatctactattagctttaattatttttacatttaggaatattgcatcagtaactcataattttggttttctgttatcctgagttaacacaaattatccaaggagatggcggatcatctgctttgaggtgtttttttttgagaattttaatgtatctgaatataaaaggtaaaaatatgccaactagcaatttctgcccattccagaagtttggaaatattactcattactaggaattaaataaaatatggtttatctattgttatacctcttttaattcacatagctcatttttatcttttatttttgtttgttttttttgagatggagtcttgctctgtcaccaggcaggagtgcagtgatgcaatctcggctcactctagccaccgactccctggttcaagcgattctcctrcctgagccttctgagtagctgggattacaggcaggcaccaccacgcccagctaatttttgtagagacaggatttcaccgtgttggccaggatggtctccatctcctgacctcatgatctgcctgcttcggcctcccaaagtgctgggattacaggtgggagccactacgcctggcccacatagctcatttttagactcacttccattaagtcttgtttggacccacgaacattgtctttttttttttaagatggagtttcacttttgttgcccagactgtagtgcaatggtgcaatctcagctcactgcaatctctgcctcctgggttctagcaattctcctgcctcagcctcccgagtagctggramtacaggcgcccgccaccacgcccagctaatttttgtgtttttagtagagacggggtttcaccatgttgggcaggcmaggggtgatccgcccacctcagcctcccaaagtgctgggattacaggygtgagccaccgcatctggccaacatgtcttttttttttttttcctttttaaccacaaagagacttaagcagtccttgtcacagatgatgaattgatgttgcaagtattgtcttagcttggattaattttcttgcttactgtaattttagataatatagctttgtaattagagattttatgtgtaaaccacaaaaatgtttacatgaaggccattattacagatgtgacgtgcataattattagtaatttgtatgtttacatgggtcagtctggcaaaaaattatgaagttttaaaaattaaaaaaaattataatgccagttttactggaaagtaaaattatttcagtaatcgattatagcaaaagtattgattttcattccagacaaaagtcagaatgaaaggtaatttctcaatactctttcagattaataaaagtacctgtagcgatttttatcattcacaagtatatcacaagtaagttagaatttgagaactgtgttctagatctctgaggagatgcagtcagatttctgaactgtctcagcaaatggtaagtaacttagagctagtaattaataacctgtcctttgatttctgattcagccaagaatggccatatttgggaaaggcagatctggagagtaaccacgttttcattcatttaccacttctaggcccctccagagctctcagatattttggggttgagcccttccccaaagccatacaggaccttttttttgtgatctgttctagccatttttatgttgggtgcttgttatggactgagcatttatgtcctcccacaccccccccataccttttttgaagtcctaacccccagtgtgatggtatttggagacagggcctttggaaggtaattacagttagaagaagtcgggagggttgggcccaggtctgattggattagtgcccttatatgaaaagacaccaggacgggcgcagtggctcacacctgtaatcccagcactttgggaggccaaggtgggtggatcacgaggtcrggagtttgagaccagcctggccaatgtagtgaaacaccatctctactaaaaatacaraaattagctgggtgtggtagcgggctcctgtcatccaagctactcgggagggtgaggcatgagaatcacttgaacccgggagktggaggttgcagtgagcccagattgtgccactgtactccagcctgggtgacagagtgagactytgtckcaaaaaagaaaaaaaaaaaaaaagagacaccagagagcttgttagaagaggtcatgtgagcacacagttagaagaccttcaagccaaagaagaggcctgagattgaaacctaccttgcaggtaccttaattttggacttcccagcctccaaaactgtgagaaataagtttctgttaagtcactcagtctgtggtattttgttatggcagcctgagcaggtagttgttctttcagaaggtgttgataataaccacatgcaacaccaagtcacaaataataaaacagatgtaacttatattcatacagaaagttgggcactgccattgccttgttggtttacacggctgtgctagttcagtagcagaaaggtgctggtctcctttactcagtttacaatctaggcagtagaatgtaatcactgctttaaacttgatactgcttagggagagaatcattggtgctgggtaactttgggttctaggtttactttttgtgtatatataactgtttttggtaaatcacaagtttctgggcttgtcgaattagattttgttacagattatgagctttattatgctatacagttagttgtatgtatatatgcctttcccactagattttaagctttttttttttttttttttttgkgacggagtcttgctcttgtcgcccaggctgaagtggagtgcagtggcacaatctcggctcactgcagcctccacctcctaggttcaagcgattctcctgcctcggcctcccaagtaactgggactacaggcacgtgccaccacacccggctaatttttgtattttttgtagagacagggtttcgccatgttggctaggctggtcttgaacttctggcctcaggtgatccacccgcctcagcctcccaaagtgctgggatttacaggcatgagccaccacgcccagctataagctctttaagggttgtaaatttataatcattcttttactctcctgcaaattctgttgcacactgccttaatcaaggtagatgctgaatgcatttttgtataattgaatatgttgcaatccccaactctctccaactgttcctgtcaaagcagccactggattgttaactaatccatattagatggggttaattaatatcagatgggacaagtaagggctaataagattataggccaccaagtagatttctgtctagctcttatagagattgagtttattggacctgtttgataggaagttttggtgtttgggatgattaaaactgaagttcctatttattgaattatacctatttatattatttcatatcagtggtccacatgcaagtgaggcttctgagacagagtttgagttctctcttcaactaccataacacttaacctgtatctttttttttttttttttttttagacggagtctcgctctgtcactcaggctggagtgtagtggtatgatctcggctcactgtaacctctgcctcctggattcaagcagttctccatgtctcagcctccctagtagctgggattacaggcctgtgccaccatgcctggctaattttttttttgtatttttagtagagacggggttttaccacgttggccaggctggtctcgaactcttgacctcgagcgatcaacttgccttggcctcccraagtgctrggattacaggcatgagccacagcgcccagccgtctttttttttaaatagcaatttaacactgttcacagttactcatgtacatgtcatgccatctattacactgtaagttctgtgagggtagctgtatcaaatttatctaactctctctagtatgcatgacatagtaagtattcaataaatatttgcatattagtgataaggatacaggttctgaatagtgggtccttaccatttaagaattagtatttgatggccgggcggggtggctcacgcctgtaatcccagcactttgggaggctgaggcgggcggatcatgagatcaggagatcgagaccatcctggctaacatggtgaaaycccgtctttacaaaaaaaatacaaaagaattaaccaagtgtggtggtgggtgcctgtagtcccagctactgctttgtgaggctgaggcaggcagatcacctgaggtgggaaattcaagaccagcctgaccaacatggagaaaccccatctctactaaaaakacraaattagccgggcgtggtggcgcatgmctgtaatcccagctactcgggaggctgaggcaggagaatggcgtgaaccygrgaggcggagcttgcagtgagccaggatcgcgccactgcactycagcctgggcgacagagcgagactccgtctcaaaaaaaaaaaaaaaaaaaaaattagtatttgatatttgatcattaaatatgaattaagaggacttagactttttgttaaatgtcaagctgggaaaagttgtcatttaaatgaattgcctcttatttaatttcgtctgatgatacattttgtttttattttgtaaaaaattattttttttctttttggagacagggtcttgctctgttgcccaggctggtcacaaactcctgacctcaagcaatcctcctgccttagcctcccaaaatgctgggattacaggcgtgagccacctcgcccggccttgtattatgatacattttgaacaactacaagtagacttggtataatgaacctgcacgtacccattgccaagttctgacaactgtctgtctatagccaattatgcatttcttaaattagaacccccccaatatacccaaatatatatatatgtgtgcatatatatagtaagttgtaacaaagttgtgaattcatacctgaagtatctcaagtgatgcaagttttatgaatttttgtttatgccttttgggaagagttgtattgacaaattttttatgcttaaagtaaaccataaatcaaaaaaataaaatctaggatgcaataaaacaaaacaacttcttgacataagtatggtatgtaaatctgttttgattggaaatcaatttgttatattgccagaattcctgttttagaatacatctctgctgatctgtctgtattcttagactgcatatctgggatgaactctgggcagaattcacatgggcttcctttgaaataaacaagacttttcaaattcttagtcgatctgcagaacctgtagccaggcactgaaccattttgatagatgcagtaatcgttgcaagtgtatatttcaaggagttctggctgggtcctagtttatgcttgtggcagaagcagtgagtaactgggaggaagttggtgagtaagcttcaaggaagaagtcatttttagtactctggatcttcctgattttaaagcactacaaaatggtgcattttcattcttgtcaagtgataacagatatattctgatgagcctgaaatgaatatatattgtatcatttttataatatctagcaaggtttgtattttcctagaacttgaactaaatttcagttcataaaatttataaaatacttagttgttgtaaaatatttttggaatgttcacataggtgacacacaaatgtcccattttcattctttctatagtaaatatgttctgatatgtgaaggtttagcagatgcatcagcatttaatcctagaggatctggcataatcttttcccccaagaatagaaattttttctgcttatgaaagtagtacatgtttctttaaaaacaaatcaatattgacttctgcctgctgtatagcactatgcctccacctggccatgaccaggggcatgtcctggtccacctacctgaaaatgtttgcaaccagcctcctggccatgtgcacaggggctgaagttgtcccacaggtattacgggccaacctgacaatacatgaagttccaccaaagtctgagaactcagaactgagctttggggactgaaagacagcacaaacctcaaatttctcagcactggaaacctcaaaatataactgaattccataaataagattttaagtcttaaatatgtatttttaaatgtattaaaagtcaagctgcttgtatttaagcacctaatacaatgcttaggttgtaaaaggagatgctcaataggtactaactgatatattgagatttaattatggtttgaccaatatttattggaaaccgccaaagcttaaatcatcagcttcttgaatgtgatttgaaaggtaatttagtattgaatagcatgtgagctagagtatttcattctttctggtttatttcttcaaatagactttgaatataatggtgaatgggtattataaattaactaataaaaatgacattgaaaatgaaaaaatatatatattaaagtgtagaaagtgaccaggcgtggtggctcacacctgtaatccaagcaccttgggaggctgaggcaggaggatctcttgatcccaggagttcaagaccagcctgggcaacatagcgagacttcgtctctaaaaaaaaaaaagagagagaaaaaaattttttttatttaaaaaaagtgtagaaagtgtcaagaccccacttcttaccattatttggtatatttctctatacccacccacccttcctccttactccctccctcccttcccaatctttttatctttttgtattctgattttttgtttgtatattttgctttaatttaatgtatcctttaaaaatttcccatacattttatatgtatatataaaaacgcatgctgccaaagataatttataagaaagaccattgaatttttttaaaagtgatatatattcattgaaaaaaatttagaatatatagcaaagcaataaagaactaaataaaattgctgtaactcctctttcaaagataagtgcttttatgattttgttgtatttttttctgtatataggtacatatatagtatttataaagctgtactcatagtacattttcacatcacaggtaccatatcagtgttattaaatattttgtatgccaggggctagacataccaagacaaccaatatgtggttctacttaaataatattagagtatcttttatgatgacacttcatgagttgactataataatcttagacttctaagagtttgggttttcaaaagatcacttagcttttttgggtgatttttcccccttactgtgagatgagagaggctgtttggatttgggattggggtagcggggacagcaacttttcttttctttttcttttttattttgaggtagggtattgctgtgtcacccaggctggagtgcagyggygkgatctcggctcactgcaacctccacctcccgggctcaggtgatcctcctgcttcagcctccccagtaactgggactacaggcgcgtgccacatgcctggctaattttktatttttagyagagatggggtttcaccaygttggccaggctggtctctaactcctgacctcaggtgatacgcccacctgggcctcccaaaatactgggattacaggcatgagccgctgcatcagccagcagtttttcttgtggttttttttgtttgttttgttttgttttgtttttgagatagggtcttactctgttgtccacgctggagtgctgtggtatgatcgtagctcactgcagcctcaaactcctgggctcaagtgattccttctgcctccgcctcccgagtagctgggactacaggtatgcaccaccatacctggcaaatttttacaaagttttttgtagggacggggtcttgctacattccccatgtcggtcttgaactcctggcctcaagcaactctcctgtctcagcctcccaaagcactgggattacaagtgtgagccaccacaccatgccagtttttcctgttcagtgtgatattttatcttgttagactacagtgtgttaaaacttgttttactaaattttcaaacatactcaaaagtggagagaatagtataatgaatacccgtatgttcatcacccatgtttagaatattattaaatataaagattttgctgcgtttgtcttagctctttaaaatttttctttttctctttgtgacctaaaggaaattccatatcttatcactttacttctacattcttgactaagatgactaagacatatagttacatggttttttgttttgttttttgttttttaaagacgaaatctcgctcttgtcccccaggctggagtgcaatggtgccatctcagctcagtgcaacctctgccttctgggtacaagcgattctcctgcctcagcctcccragtagctgggattacaggctccygccrccacgcctggctaatttttgtatttttagtagagacggcggggggaggtttcaccatgttgacaaggctggtctggaactcctgacctcaggtgatccrcccgcctcggcctcccaaagtgctgggattacargcgtgagccaccgcgcccagcctgtttttttgtttgtttgttttgttttttttgagacagagtcttgctctgttycccaggctggagtgaagtggcgcattcttggctcactgcaaccttcacctcccaggttcaagtgattctcctgcctcagcctcccaagtagctgggactacaggcatgtgtcaccacacscgrctaatttttttgtatttttagtagmgacgggrtttcaccgtgttgcccaggctggtctcgaactyctgagckcaggcagtctgcctgcctcagcctcccaaagtgctgggattacacgtgtgaaccaacccgcccggcctgttgttttcttacataattcattatcatacctacaaagttaacagttactaatatcatcttacacctaaatttctctgatagactaaggttattttttaacatcttaatccaatcaaatgtttgtatcctgtaatgctctcattgaaacagctatatttctttttcagattagtgatgatgaaccaggttatgaccttgatttattttksatamctaatcattakgctgaggatttggaaagggtgtttattcytcatrgacyawytakgracargtaagtaagatcttaaaatgaggttttttactttttcttgtgttaatttcaaacatcagcagctgttctgagtacttgctatttgaacataaactaggccaacttattaaataactgatgctttctaaaatcttctttattaaaaataaaagaggagggccttactaattacttagtatcagttgtggtatagtgggactctgtagggaccagaacaaagtaaacattgaagggagatggaagaaggaactctagccagagtcttgcatttctcagtcctaaacagggtaatggactggggctgaatcacatgaaggcaaggtcagatttttattattatgcacatctagcttgaaaattttctgttaagtcaattacagtgaaaaaccttacctggtattgaatgcttgcattgtatgtctggctattctgtgtttttattttaaaattataatatcaaaatatttgtgttataaaatattctaactatggaggccataaacaagaagactaaagttctctcctttcagccttctgtacacatttcttctcaagcactggctatgcatgtatactatatgcaaaagtacatatatacatttatattttaacgtatgagtatagttttaaatgttattggacacttttaatattagtgtgtctagagctatctaatatattttaaaggttgcatagcattctgtcttatggagataccataactgatttaaccagtccactattgatagacactattttgttcttaccgactgtactagaagaaacattcttttacatgtttggtacttgttcagctttattcaagtggaatttctgggtcaaggggaaagagtttattgaatattttggtattgccaaattttcctctaagaagttgaatcattttatactcctgatgttatatgagagtacctttctcttcacaatttgtctctttttttttttttttttgagacaaggtctctgttgcccaggctggggtgcagtgcagcagaatgatcacagttcactgcagtctcaacctcctgggttcaagcgatccttccacctcagcctcctgagtagctgggactataggtgtgcgccaccactcccagctaatatttttattttgtagaaacagggttcgccatgttacccagcctcccaaagtgctgggattacaggcatgagccactggcccagtttctacagtctctcttaatattgtatattatccarraaatttcatttaatcagaacctgccagtctgataggtgaaaatggtatcttgtttttatttgcatttaaaaaaaattatgatagtggtatgcttggtttttttgaaggtatcaaattttttaccttatgaaacatgagggcaaaggatgtgwtacgtggaagatttaaaaaaaatttttaatgcatttttttgagacaaggtcttgctctattgtccaggctggagtgcagtggcacaatcacagttcactccagcctcaacatcctgcactaaagtgattttcccacctcacctctcaagtagctgggactacaggtacatgctaccatgcctggctaatttttttttttttgcaggcatggggtctcactrtattgcccaggttggtgtggaagtttaatgactaagaggtgtttgttataaagtttaatgtatgaaactttctattaaattcctgattttatttctgtaggactgdacrtcttsytbvagrtgtgatgaaggagatgggaggccrtcacattgtasmcyycygtgtgckcaagnrgskctrtaaatkmtttgctgaccwgswggwttacatcaaagcactgaakagaaatagtgatagatccattcctatgactgtagattttatcagactgaagagctattgtgtgagtatatttaatatatgattctttttagtggcaacagtaggttttcttatattttctttgaatctctgcaaaccatacttgctttcatttcacttggttacagtgagatttttctaacatattcactagtactttacatcaaagccaatactgtttttttaaaactagtcaccttggaggatatatacttattttacaggtgtgtgtggttttttaaataaactccttttaggaattgctgttgggacttgggatacttttttcactatacatactggtgacagataccctctcttgagctacatcggtttgtggggagtcaaaagtcctttggagctaggtttgacaaataaggtgggttaacacttgtttcctagaaagcacatggagagctagagtaytggcgaattgaagaaatccccctttttttttaacacacttaagaaaggggactgcaggtatactcaagagagtaagtcgcaccagaaaccacttttgatccacagtctgcctgtgtcacacaattgaaatgcatcacaacattgacactgtggatgaaacaaaatcagtgtgaattttagtagtgaatttcattcataatttgatcgtgcaaacgtttgatttttattactttagactattgtttctgattttatgttgggttggtatttcctgtgagttactgttttcctttaaaataggaatttttcatactcttcaaagattagaacaaatgtccagtttttgctgtttcatgaatgagtcctgtccatctttgtagaaactcgccttatgttcacatttttattgagaataagaccacttatctacatttaactatcaacctcatcctctccattaatcatctattttagtgacccaagtttttgaccttttccatgtttacatcaatcctgtaggtgattgggcagccatttaagtattattatagacattttcactatcccattaaaaccctttatgcccatacatcataacactacttcctacccataagctccttttaacttgttaaagtcttgcttgaattaaagacttgtttaaacacaaaatttagacttttactcaacaaaagtgattgattgattgattgattgattgatggtttacagtaggacttcattctagtcattatagctgctggcagtataactggccagcctttaatacattgctgcttagagtcaaagcatgtacttagagttggtatgatttatctttttggtcttctatagcctccttccccatccccatcagtcttaatcagtcttgttacgttatgactaatctttggggatttgtgcagaatgttattttagataagcaaaaacgagcaaaataggggagtttaactttaatattttcttttaaaaagcatttcatgttataagatcaattctgagtggtagaaatgctttgacattttatttccattttctacttttagtttttttcctatttgtttaagatcttagaggattattaagctgaactcctcaactgataaaaagcatgacatcttaaacataagcaaagcatatttttaggttaattttcacatagaaaacagtttattttatgtgaaattctatgtagatatactatttttttggtatttattgatatgtttattttattttattttattttatttwattttattttattttatttatttatttttttttttgagacaragtctyrctctgtygcccaggmtggagtgcagtggcatgatcgtagctcactgcaacctccacctcccgggttcaagcaattcttctgtctcagcctcccgagtagctgggactacaggkgcctgccactatgcccggctaatttttgtgtttttagtagagatggggtttcaccttgttggtcaggctggtctcgaacccmtgacctcaggtgatccacccacctcarcytcccarrgygctgggattataggcatgagccaccgtgcccggccgacatgttaattttttaaaaaaggctttactggggtatattttatataatataataatcacatgttttaactatacaattccaagctttttagtatatttatagggctatgcaaggaagatatactgttaaacagtagaaattgagaaagctcttctgataatatctcttgatttgatgatggctcatgcctgtaatctcagtgctttggaaggccaagacagcagaatcacttgaggccaggggttcgagaccagcctgggcaacacagcaataccctatctttacaaataataaaaatatctgttgatttgaagtaaagtttttttttaaagacaaggtctcattctgtcacccaggctggaatgcagtagcaagatcacagctcactgtggccttgaccttctgggctcaagtgattctcccacttcggcctcccgagtagctgggactaacaggtgtgcaccaccatggctggctaatttttttttatgtttgtagagattgggtcttactgtgttgcccaggctgatcccgaactcctgggctcaagcagtcttcctgcctcagcctctaaaattgctgggattacaggcttgagtcaccatgcccagcctgaagtagcatttctaccctgtttaataattcagcagcttgtcatgtaagatattcatatatgcatataaaacattaggcagcttaatttggtaaaactgtaaaatggaaattttaaattgtttgcagcatcaataacattgatgtcagtatgatttttacatgctgatcttgaccaatttgaaacagtgagttaaaatctggctgatccgtactaatcctaaagaaatattctatgaactattaaatgtttccagaatatataaagaaacattatgatgtcaacacacccatctatttttttttggaaataaaaactccatttttcttattaaagaaaacatgcttattagaaaacatacggctgggtgcagtggcacacatgtaattccagtgctttgggagatcgaggtgggagaatcacttgaggccaggagtttgagaccagcctagacaacataatgagaccccctctctacacaaaaagaattagttgtgcatggtggcgtgcacctgtagtcccagctacttgggaggcagaggcaggagcatcccttgagcctaggagtttgagactgcaggagttcgagactgagtggaatgcagtggaactgcattccagcctgagtgacagagggagaccctgtcttaaaaaaataagaaagaaaacacaactgcagaaaattataaaggatttaagtcattccaaatatcactgccactttttatttagaatattctaaagaattctctctctgtgtacacacacacatatgcgtactcttaatccaagtagcttggtaggattttatttacctagtgcctagatgggaaattgcctggggattccaaatacctatttcattaaattaaagatgtcactgattttaagacttaacactatttttcatactgccaagaaagaaaacactaccagttataaatgtaaattgccatcaattgtaatacatcarttttagagctattattaataaaatgtgaatgtgcatcttagagcaatgaaatatagtactatatatttgatgaccttttctgccctgtgatattcagaaagtgaaagttaaatatgggctgagcatggtggctcacacctgtaatcccagtactttgggaagtcaagacgggaggctggcttgaacccaggagttcaagaccagcctaggcaatgtagcgagacgccatctcaaaatattaaaaataagtaaataagtaaataaaaagaaggttaagtatacaaatgtatttcctttgttgtgaatttatttcaattttatagtgattttttttttttgagacgaagtctcactcttgtcccccaggctggagtgcgatggcgtgatctcagctcactgcaacctctgcctcccaggttcaagctatactcctgccttggccccccgagtagctgggattacaggcgcctgctaccatgcctggctaatttttgtatttttagttgagatggggtttcrccatgttggccaggctggtctagaactcttgacctctggtgatccacccgcctcggactcccaaaatgctgggattacaggcktgagccaccgtgcctggccagtggttttttgttgttgttgttgttgttgttttgtttttgtttttgtttttgttttgagacaggatcttgctctgtcacccaggctggagtgcagtggtgccatcttggttcactgcaacctctgcgtgggctcaagcaatcctcccacctccctttccagagtagcggggaccacaggtgtgtgccaccacacctgactaatttttgcatttttttttgtagaaacagggttttgccatgttgcccaggttggtctgaaactcctgagctcaaacaatccaactgccttggcttccctaagtgaaattacaggcatgggccactgtacccagtctagtgatttttttatttttatttttattttattttattttatttttttaccaaaaaaacaacaaagcctcaggaggaaaagttgatacacaagtaaattttattggaaatgtttttgtgtggaccttaagcagagggaaaattagtctgcattatggtgtatccagactaaatgactgatattaaaatgaaattattcttaggatttgcaatcttagagaaaactttttcatttttatttttttgagttacaaattatcttcatttacatttgagaacagtgagtcacagagggattaagtaacttactcaagatcatacaagtctttgatttgaacccaatcttttaactctgcagaactcagagtcactcttatttggaaaaactttttaactgatgtggatcctctaatatgggcttcctattattcattctctattagtcagaagttttgcaagcagacagaattcattttgccaattacgggattttccctcagttgcagtcaaggttcataaaactataactctttatctttaattagaaatgtttttttttttgagacaaggtcttgctctgttgcccagactggaatgcagtggcatagtggcccattgcagctttgaactcctgggctcaagggatcctctgcctcagcctcccaagtatctgagactacaagtgcgtgccatcacccatggctattttaaaaaaaaaaaaaattgtagagatagggtcttgctgtgttgcccaggctggtctcaaactcctggtctcaagcaatccttctgccttggtctcccaaagtgctgagattacaggtgtcagccgttgcacctggccaaaacgataacttaaaatacacacacacacacacacacacaaacacatatgtgtatttgtgtgtgtgtgtgtgtgtgtgtgtctcaaaaggtatcaaaagagaatagctataactttagtgttgatcttgatagtgacttgattaggctctgtttaacatcaaagatgcaaattaatactttctttgaacatattaaaaatgcagaaaatattggagtattttattttaaataaattgtattctgtatatttaaggtatacaacatgatgttatgggatacatataggtggttaaaagattactgcagtgaagcaaattaacgtatccctcaactcacatagttacccattttttttttgttttggtggcaagaggagcttaaaatctcatttagtgtgaatcccaaatacagcacaattttattacctatatacttcatgttgtacattatatttctagacttgttcatcctacatatctgctactttgtatcctctgagctacatctccccattttctcacttgccccccaagtagtttcttaaagtgtctcatgtaagagggcagtagctttcagcttaaactttttctctgtatgtagtcgatttctttgaggtatacttttctctccagaatagttagatgtaggtataccactttgatgttgacactagtttacctagaacttatcttctgtaaatctgtctctatttccatctctgtctccatctttgtctctatctctatctgtctatctctatctatctatctatctatctatctatcyatctatctatctatctatctaaagcaaattcatgcccttctcctatttattgaatcgagaccatagacaggggtgagagaaagaatttggcaggaatggggatgtgtattatctgtggcataaggaaactttacagaactaggttcaaaagtatactttctagttctttcccatggcttttcactttgatgtagtccttatcaggtaactgaggttttatataagtcccctgattcttagaacatgaaggtgtagtagtcaaggttggtcccttgaaascacaaattttgtgaaaaaaaattaagaaaattgaataatttcctcagcaaatacatattgatcatctgttatacagccatgagaagtggttctgttgcacacgtttattttatcagatcctaatcccaaaccaggcataaaatggaaaccatgaagataggatgaaataacttctgaatgtttgaatgtttgaaaatagtgtacttaaaaataccaggtggtttttgtttgttttttgtttttttctttttttgagacagggtctcactctgtcacccaggctggagtgtagtggtgcaatctcatctcattgcagtcttgacctcccaggctcaggttatctcccacctcagcctcccaagtagctgggactacaggcrhatgccaccacgcccagctaattttttgtattttttgtagagacggggtttcaccctgttgcccaggctggtctagaactcctgggcttaagcgatcctcccamctcagcctcccaaagtgctaggattacaggcatgagccaccatgcctggcagaaaataccaggtttttaagtatcagcacttactcttcaatcttttctattactatgttgtgctaaatggtattttttatttaattagagcaatgctgttcaatagaactttctttgaggatggaaatcttttatgtttctgctatgtggtacagagccactagtgacatgtggcttttgagcgcttgacacatcttgtgcaacacaggaactgaatttttaagtaatttatattgccacatgtggctaccgtatgggacagtgtagtactagatgatctgtaagggctgtgcttcatcagtgtcgttttttaactgacaaaaacctttagttttttttttagtaatgtgtttatttaaaagaattcataaaatacaagtaaacaaattaacttgttacctgagcatatgtcctttcatacttattttttctgcatacatattttggaaaatggaatatctgcccttttttttwatctgagatacagtctacctctaaaaatacatgattctaacattctcacttttgttggcatttgatcagggtatagaaaaacagttaaaaggacagagaatggttgagagattatgatatgaagagaaaatgtgattgagtgtggtagacttggggcctgcttgaatgttgagagaatgactgttttccgataaaaaaaaaaagtccattctaggatcctaaaagaagggtctgaagttcactgcagaaagcaagctacatagtactaagccactaaggggacatggagcccttagtaattcctaccttagtaatagtctcatcatgccctcttgggaacccagccttgttgattagcctctctgctttctctccttatagttcaacctccctgtttgttccaagcagttcttttcctgcccatttattatgcatttctatacagctttcctcctctttttctataccatgctgcagttcttattgctacctagaggttttcaaaattcctaggggcggataagtaggcataaacaaagttcttccctattatccttcctattttttcacctagactgaagaggtagacaaaatagaaataaagacattaagggtatgtgtttgtagtcccaaagagcttctctggcaattttatgtagttgacagtgacgctctgagttcaggacagattggactccttggctgagaggagtgaggagataggacggtagaggagagggtagagcaactctggaggaagctttcccctcacctttgccagtcctgttatcctagacttaaccataattaaagatgagggaggcactcagtaaagggatctagtgggaagcttgttccagacagccaaggagggaggttcgcgcagttcctttggccacccaggtggggtaattgatccatgtatgccattcatgtacaatgtaggcacttatacctgtattccaatgtagtgaactataccattactcttaaattaatattctttattagcttccatggtggctataggccaggcaagagagttaagaaaaaataaatagccaggtatggtgactcaagcctgtaatctcggcactttaggaggccgaggcaggaggatmgcttgagtccaggagttcaagaccagcctgagcaaaatagtgagatcctgtctctattttttaaaaaagccttggggcaaacaggagtatggaggtttggatgctaatagaacagcagtgtcttactgcttggagttctcttgtttcttgtcctatcaccgtagcctttggatcacagcaatttttccatgactccatacttttcagttcttgaatattttttcctttattcctcttgtctctgtaaagacatcaactggagttggactgtaataccaggtatctccagaagatggcactatttaacagattttataaataatttgatgtgagtcactgtcatctgaagcttgttgccttttctttctttcttctttcttttttttccccatcaattctgtatgtttgaaatgctgggwtttaagttagttagaataagggatgtctgtaatttccctaaattgagaagtaatatgcaaaggttgatatcagaagtcatatgctcaccttgcaacaccaaataatactggcccatttgtgatttttgaaagtaacactccataataaatggatgtatatatagaagcataacaaaaatagaagcacataaaagtgaaaagtctcataaacgccattgtcactactcatgtaattgctgttacaaatttgtttaaatgttgaataaaaatggtgtcataggcaacacagtgttccactacttggtgtttttaatagcattattctgtctcagtgtgctttggattatcaggtgctttttaatagttgcatggtattacattgtgtagatgaacttgattaatttaaatggttccctgttaatggacatgttggtttgtttttgtgaacaactgatacagtgaacatttattttttaaataaaaaaaagagagacagggtcttgctgtgtttctcgggctggccttgaactcctggggtcaagcgatcgtcttgcctctgcctccctgggattacaggcatgaagccaccgcacccggcccagtgaacactcttgaatgtatctttgtatacttgtcagtgtttttgtagcattgattcccagaagtgggattactggattaagtgacatgcatgtttgcaattttaacaggtattgctatgtcattttcaaaagaagctatgccaattaatactctcaccaacaagagtgcttatttcccctcagcatattatcaggcttaagttttgccagtatgggtgggagaacagtagaatcacattgttttagtgtttgtttctcagatagatataattttacaccttataaccttctcttctataaattgtctatttgtgttcattctccattttcctatgggttcttattgttggagcccaatatataaaagggggtatttgttacagaacctcttcagttttggttcatgtcatgcctgggtttttaccctttctacggatgttaaaaaaaattctctattttcttccagtccacttatggctttattttttacatttagattttaatccgtctggaatttatttttgtgtatgctgtgaggtagggaccatacttttattttttcccaaatgggttactagttggccaaacatcatttattgaataattcatcttttccctactgactcgaaataccatctttattgtatactaaatcctcatatagttctgggtctgtttctgggctctactttgttcatttactgtgctggtactgcaccgttgtaattgctgtggctttgtggtatggtatggcttgctctctgctagggcaagtcgaagctcttttgttcacctgctctttcacccaaattttctgtcctgaatccagcacagccaaattatggtcattgtcaccaccaactacagtgggtgttgagcatttcccattgaatctcctgtaagggttttattggattctgtgatagcagtaaaatgggagcctaagaggtattccttaaaggactactaatcagacctggtttcccagatgatgctgaagatgacggggcctgggctagacttttgagggacatatccttggggttgggtgtgatatagaccagcccttacaatttgcttgactcatgggaatcgtacagggccagaaccagacacctgtcatgctaataacttccctcacaattcagaaatcactgtgattgaagatgggtggctgttataatactacccacttaaaaatggatgtaacccattttttaggactcttaaaaacatcaaatcagtaatggccgattaggactttttaatttttactaatctstacttgaaagttttctagtcattcatttcaggaaacctaattcttataattcatatcatttagaatatcataatgctatggatattagmtagctaacttctcaaatcttctagttctcatttaatttgaagtttgtgtgtgtacataaggatatacatatacatatgtgtgtgtagatatatatatatatagttttttttttttttaactagaatgaccagtcaacaggggacataaaagtaattggtggagatgatctctcaactttaactggaaaggtatgtatcttgaaagggaagaaaaaaaagcacttcataccgagtcaattagtaacagtgtgctttcaatcaatcactaagagataatttacatagtataactaaatgggttatttaacccttggaagcagtctaggttaattatcgttccctaggtcatgtagtaaaaagacagtagaatccaacattaaccttaaatgtccatattgtcaagtactgctgtctgcctctgtgggactctaatttgggatccttcaaaaaacattgatgggggaaaagatagcctttaaaaaaaaaaaaaaaacaaacctatgtgagtctatgtgaggtagactcacatagtttcctaaaagatagcaaagcagtattatgtagtggctgaaagtgtgagttccggagcctgacaactgattcaaagcatggcttagtacttcctaactctgaccttgggcaagttacttaacctctctgtgtcccatatgtgattagggtgaggttgataatagcagccatagagttaagaggattaagtgctataatgcaagtagagctcttacaacagtttctggtaaatcactcaataaattcagacatactattattttaagaaatctcaaagagttttcttgtaccttaaaattctcctagtgtgaaccattggttttggtatattgtgcttccatgtagtttaatatcaagatgtttttagatttcccttttaatttatttgttgacccattggttgttcaggagcatgctgtttacctgaaaataatggagatattaaggtatttgaatatttatcttctagtacattgaaaaactttttgagagtaaccaataataaatgatggaatgctactgctttttttttttgaagctgccagttattgtttacttacactatgccaaatataaaggcattaatctcataaaagtttcacaacaatcctgtgagggagacgatatccccattttacaaatcaggaaattaagacttaataaggttaaaagacttgcccaaagtcacagaaccagtaagtggtagagcttgaatttgaatacagacctgactctaaagctcttttctttctttagattttagtgttcattgcttacttgaatgagtatctataagaaaactttaacatgtaaaacttctgtgaaattatcttgtcccatatcagggtcatgtcaaactaatgtcctcctcagcatctttggaaaacttcagaggagaaatgagctttgcccctcctgttcatttcatataccactgttagacctgtccttccctttcagcatgctttgtccatatttagaagctgttgaagccattacttgtctggtcagtttttagtgctggaatggacctagccttttaggccttctgagatttagtttgatctcgtctttcccacctaatggctctgttctactacatagatttgatctgaaacagttctctgtttctaaaataactttcttttcatgatagtcacagtaaagtacatttattatggaaaaatcaataagtataacgagtgaaagttatttcttggtggtaagattatgggattatttgaactttctgtttcattgtattttatttatttatttatttttgtgatggagtctcactctgctgcccaggctggagtgcagtagtacgatcttggctcactgcaacctccccttcccagttcaagtgattctcctgcctcagactcccaagtagctgggattacaggcgcrcgccaccatgcctggctaatttttttatctttagtagagacagggtttcaccatgttgaccaggctgatctccaactcctgatctcaggtatccacctgcctcagcctcccaaagtaccgggattacgggtgtgagccaccctgcctggcctcattttgtcttttgggggtatttttgtgtgcagatatatatgtatataaatatttttccctcttttccccagttagtatttgagcagatgaactttggacccgaatacctgtattcaagtctctaataccacttcttggctattttcattttatcaaatggcctcttatcctcgtttttctcatttattaagtagagatgtaactacttgatataattcaaaaactcaataatggcattcttttgttttttagactctagtgtctgtactcsttgtaccatgctgggattcatttgaacaattgcatggcttttttagtgtattattaaatttgcagtttacttagaatttactgggacctcatacaaatgggaaaaaaacataactgtgttactcatttgctgtgtgcctttggattgaccctattttttgtattcattttctccccatgtcctgagttccactttgaataaaaagtaatttttttcctgcctgtaaaataggctaccaataggctgcagttgtctatagtagctgcttcactgaggagagctcagcatgagagaaatagtatgaattgcttgccacaagttatgggctagccttacttcattctgtacttggacctgtttaggcttctaagagatcttacctccaacaataaactgctttgagacatgaaaaggtggaagctttacttggttataactttacttttaatacctagaacagtgagtcttcaaacttgtatttgcatgcccaatttataaaaagtttcctgagcatttacccctaatatatgcattttaaattatatatgatttatggtaataataatatatatgttacaaaatacatacaaaaatatagattaaacaaggtgaggtaaaaaatttaaaagttctaatctttcttgcaaaccagtggatcttttgtgccttactctggtaaacactgtcttagaagaatatatagaacattaaaatcttaatgctatagttatatgacagagtatgatgagagctacagataaacaacacatcatgaatcttcttgtggcagtgtttataaccattatgtgaaatgctgcctcattcttataactagcataagaacagataggactttctcgattttgaggggtaattattagatggtattttctgttaaggactcttccagctataaaattcttaaatgtagaaagcgaagtgagggtttatggtgagaggaagcattggtatcatgttttagtgtagtccaagaatatggacacatccagaaaatgcagatcaagtttagcctaatgagaaaatatattttggagtccatatggtaaattaaattatgtgatttttgagttattgtacaaatataattcttagaatgttagagtcaggagactataagagaccaactgcttcaagtttcatttaacacatgggaaactaaggcsagagaaatttcaagacttgcccaagattagacctcttgttaagtaatgaaagtgttttaaaaacaggtgggtcaaattctgtttttaaaatttccattatgatgaaaatttcagtattacaggcttccaaatcccagcagatgggccacttgtttaaaggagagtttgatataataaagcatctaaaaacaagagtttggataattccttagggttgttatgatgtgatttgacttataattggaaataccgttttattcattgtactgattttcatttctctttttcttctagaatgtcttgattgtggaagtaagttcacatttacttttaatataacatttatgacttttctaacttagtatgcaccatcctaaaggtaagccagggagagaaattcctctgcatcagttttaatggtgggcttgtgttctaaaggagtgagattggttttttgtaaagactacttagtaatttgtttttaccaataatggaatggtatacttcctacctctctttttttagtttgaagtattttctttctaaacataactctctctctctatttatctatatataatatatacatatatatcttatattttatgtatatatatatawcttgcttagattttgtcttatgtaatatttggtacataaaaaataatatttataatttatagactattttccatgtgttattatgtgctaaagtattttgtatcttagcaccgagaggctaagcagtttcctagggttaccagctagtaaactaagggaaacctttacttcctttagctcagtggttctcaaaatgtggttccctagaccaaaagtattaatatcagacaagaacctaccgaatcaaaatatctgtgatgaggcccagcaagctatgctttaacaagtttccgagtgattctgatgcatgctaaggtttaggatcccttgtttttactcataagtcactttctcattaaggccttccctggccatcctatataaaatctcatgttttcacaccgtcaacttcgtattcctcctcaatacttttattttcctgatcacttatcactaacagcctctctctctctctctctctctctctatgtatatatatatatatatcacttatcactgtctaacagcctctctttatatatatataatctatagattatatatatatgcagcattgtgcaatcattatcacgctcaattttaaaacattttcattkccccacaaagaaacccaatccccttagccatcactcccmatttycccttcccccagcacctagcaaactgatcatctacctacttgctgtctataagatttgcctattctggacattttgtataaatagaatcatacaatatgtggccttttgtatctggcttctctcacttaatgttttcaaggttcattcatgttgtggagtatatctgcactcatttcctttttattgccaaattgtatggatagacaggtgttcctcaactgtgtcctgataaacccatctgaagttgaaaatatcataagttgaaaatggatttactactttgataaatctatcctaaagtcagaaaaatctcatgttgaaccatcgtaagttggataccatctgaattacatttttgttatccattcactggttgacagacgttaggttgtttccactgtttgctccttatttctcgtacctgaaatgtccttattccctcccttcttatcccatgtttaagtcatttaagacccagctcaaacgtcacctccacaaaaccttccttgatacccctttcctcttcaattcacttggaccttttgcatttaattttaatttttattttttttaagacagagtctcactctgtcaccaggcwggagtgcagtggtatgatctcagctcactaactactctgcctcccaggttcaagcaattctcatgtctcagcctcccaagtagctgggactayaggtgtgcgcyaccatgcctgrctaattgtgtgtgtgtgtgtgtgtatgtatgtatgtatatatgtgtgtgtgtgtatatatatatatacacacacatatataaatatatatacatatatatatatacacacatatataaatatatatacatatatatatayacacacacacacacayatatatatatatagttttttttttttttaagtagagatggggttttgccatgttggccaggctggtctggcctcaagccatcctcccacctcggcctcgcaaagtgctggtattataggcatgagccactgtgcctggcctgcatttcattttaattataaaatattttgaactcagaaaaaagggtatgctgaatacctacgtacccacaaaagtattaacattttgccatatttgcttctgatcttattttttttgagaaattaaagatcataatacaactaaagccccatttctttcccttcattcccagaagtatgacaattatccttaaagttgatatatatcattcccatgcatgttttttatacttccctagtacaagttagctgtatcctctgctcaggggctcatcaagctgaatcaagggactcatgatcctcttcaaagttccttcaggttgttggcagaatttagttccttgtgattgtaggactgagggcccgttttctcactggctgctggccaggggttgctcccagatatttaaaggctcatgccctagcccatgacagtctcacaacatggcagctgacttcttcaaaaccagcaggagaatcttgctctagtctaccacataacctaatcacaggagcggctatcccgttattttcacagatcctggtcacattcaaggggagggaacccttctgtgtgtgtacaccaggaggcaggaattttttttttctttttcttttttgttaaaaagtcttaaagtcttttatccctaaaggaggcaggaattttgagagccatcagaattctgcctaccacagcccagaaatctgcatttttcacaagtctccagccatgatgtttctgatggctcacactgctttattccatttttaaagagtatttttattgaaaagcattagggttatggtttaaaaaatattttccctaacaaagatgggtttgtttagagtcctacttttgactaaatagctgagattcacttttatgtaaagtcattttatagcgttattaatttgggtgcctttaaaaatagtataaagcatgtttctcgagtgtagtctgttagccacctatattggagagttgggaggagagagtctctatcttgaatttatgggaaaaattctaaaatactttttataatgaaggacaacatcataactccctaataaaatgtgcatgtatatattcaaatttgctgtcattgatcctgcacctacaaaatccagtcctgggggctggcattcttactgcttgctgagggccagatgatatagattccagaatatctccatgtagattttggtgagaattactgtgctgaaaagaatgacagtattgcagttatacatgggggttttggtactttatattgtgactctgaatttaaagctatgcaatgtcttcttttttgaaaggatataattgacactggcaaaacaatgcagactttgctttccttggtcaggcagtataatccaaagatgktcraggtckmaaggtatgtatgacattttgacacagaatattttcctcatttgaagggggattaagtgattgcttctttttaaggataaatgttttcaactgtcattttatcttcgaaaagtaatgtaatctcatataagacttaagatataatccttttaaataattttgtcatgtgttaataaagctcataattacagtcacttccttgcctamtattaacatttggtttttcagcatgctaattatatcagtttgtcctgaatagcatggcagaggattttgggcccccttgcaaaattaagaataaggattccaaagcgggtgaggaagtgataggaaggggtgggccctgaagatctggacctcctggaattgagtgatgaatgctgcatcttctttgtgtctgtagtgaaattttataatgcctgcttccttttttattaagtcggcctcacctcctcaccttacctatgctgttttacttttgcttttatagttctacctgtgtttatttctcattttcgtttcatctctcaacaactctggggtggcattattattcccacttttcagataaggttactgaggcatagggaattgtccaaaggtacagagctagtccgctatagagatgagatttgaacccagggaacctggctcacagtttatgcttttgctaccttaagtttttaatagagtgacatcaaacaaacatttaagaatatgtttttcttttccttttataatttcattaaaaacattaagtctctgatcagtctgcagtttttatgtaggggtcaggtaatgttctaacttctgctttttcctaagtgattaacaggtttttataagcccttttgaaaaaatcacggtatctgtcgagcatctttgaatcagagtaagccttctagtgagtcatatgtcagcagtttgactgtatgggcttttctaatatccagttcaagtgtttatcagtgagtttttcttttaaatagatttgggacaggtactatgagagtatataagtgatacgttataggacactaactagtatcctatgaaatggcaaaaactgcaatcacttttgcaccaaccaaatagaaactaatcagtgcacttgcttatttttctacatgctctttagggttttaaatgtcaacctactgtggcatagactttaatcctctgggtattcttttgttgttctttcctggtatatgctgtggaattgagatagactggttcgtgagcgagagattttgtgttgccacaggtaggacatgctcaaacaatacttgggtcatttcttgacccaagtcatctattcaccatagttttgtagcaccgatcttgcatacatttcatgtatcttctttgaaccccacgtcagtgctgcttatatgatactcagaaattaaacactaaggaataagattttcaggtaggattgagttttggagggtcacaaatcttgtaatgtctaatatttccactctccctgctgagaattagttttggcttccttggaggtgatatcgcctctgttgagtataagtggcctactgtgatcacaccactgcactccagcctgggtgacagagygagaccctgtctcagaaaaaaaaaaaaaaaaaaagaatgcatggcctagatgacttctaaggtttttcccacccagttccagttttcatgttctaggcagagcagtaaagtgagaaacacatggacttgggagtttagtctcgcatttcactgccacttaatctgagcgactattccatatttaatctctctgaatgtatttactcatctttaaaggggaatgattattaacatctttttctcagggaaactatatgagtcaaggagataatatatttgaaaatctttttaactgcaaagcgctgtttcactgttggttataatgtgattgatctcattgtagtgagcagctgcttaattgcgttttagaatgtagggaagatagtaatatttttcacattatatatgtagctggttctggaactgtaaacatactccttttttatggagatctgagtcacgtaccataaaattcactcttttaaagttgtacaatccagtggtttttgatatattcagagttgtgcatctgctaccactatttcattttggaacccaaagaaaccttgtacccattagcagtcattctcccttctcccagcccctggcaactactaatctactttctacagaaagtccgtacagatttgtgtattatggacattccatataaatggactcatgcaatatcctgtcttctttcacttagcatagtgttttcaaggttcatctaggttggggcatgtatcagtacttcatcccttgttttggctgaataatatttcattgtacaaatatatcacattttgcttatccatctgttggtgaacatttgagtttctacctgttggcttttatgaataatgttgatttgaatgtttgtgtacaagtatgaatacctgttttcaggtctcttgagtatatagttgctaggtcatatagtaactctgtgtttaacattttgaggaattgcccgactatttaacaaggtatatgtactgttttacaccagtaacatatgagggttccaatatctccacatccttgacaacacttgttactgtcctttttattgtagccatcctagtggctatgatgtggtatctcattgtggttttgatttgtgtttctctgatgctgatgatgttgaacatgttttcatctgcttattggccatttacatatatcttcttaagaacggttacccatttacagtatggaaaatgcttcagatgcaactctagtcatgccttagagatggagctttattaaacattcagatctctaggcatatgaagtgctgagttctcttgaactcctaatacagattgcactgagtttagtgataccttttctggagcattcctgagttcaggtagggagaagggtttttgctgtgattggcttgttatgttctttctaaatggaaatagaattgaagtgtctcctctctccatttattggaagagtcatgagggacataattagatgatcccttggagtctccggcttaggtcagtggttatctacttaggctgcacattggaatcacctgagagttaaaaaaccaggataacctctgcctgtgtctcatctccagcaattctgatgtaattggtcagggctgtggcccgagtaggtgagttctggttttttaaagctcccaggtgattctgatgtgcaatccaggttgagatcactttgggccctttccagctctttaaacatatatatttatctaggaaggtatgaaagcataagttttcttgagactgcctttaacatctgtaaaggctttcaaagcagcttctgtagttttttttaaatggctgaatatttttcaacaggcagcatttgggttataaaattagcttttggtagagttgacttataccacctccagcttttgttccaaaaataaatactggttcttttggcacactagttgttttaccctaaagttcctctttgtaagccagttattaaaagttgtgatgcagccagggcgaagtggtacacatctgtagtcccagctactcggaaggctgaggggggaggatcgctagagcccaagaagtcaaggctgcagtgaactgtgattacaccactgcactgcagcctgggccacagagcgagactcatctctttaaaaaaaagaatgttgtgaggccgggcgcagtggctcacgcctgtgatcccagcactttgggaggccgaggtggacggatcacctgaggttgggagttcgagaccagcctgaccaacatgsagaaaccctgtctytactaaaaaaaatacaaaattagccgggcgtggtggcacatgcctgtagtcccagctactcggcaggctgaggcaggagaatcgcttgaacctgggaggcagaggttgtggtgagttgggcgagccattgcactccagcctgggcaacaagagcaaaactccatctcaaaaaaaagaaaagaaaagaaaagaatgttgtggccaggcgcggtggcttacgcctgtaatttcagcactttgggagaccgaggtgggcggatcacgaggtcaggagatcragaccatcctggctaacacagtaaaaccccatctctactaaatacaaaaaaaaattagccgggagtgctggcgggtgcctgtagtcccagctactcaggaggctgaggcgggagaatggcgtgaacccaggaggcagagcttgcagtgagcggagatcgcgccactgyactccagcctgggcaacagagcgagattccgtctaaaaaaaaaaaaaaagaatgttgtgataaaaggtgatgctcacctctcccacacccttttatagtttagggattgtatttccaaggtttctagactgagagcccttttcatctttgctcattgacactctgtacccattaatcctccttattagctccccttcaatggacacatgggtagtcagggtgcaggtctcagaactgtccttcaggttccaggtgatcaaccaagtgccttgtctgtagtgtcaactcattgctgccccttcctagtaatccccataatttagctctccatttcatagtctttccttgggtgtgttaaaagtgaccatggtacactcagcacggatgaaatgaaacagtgtttagaaacgtcagtcttctcttttgtaatgccctgtagtctctctgtatgttatatgtcacattttgtaattaacagsttgctggtgaaaaggaccccacgaagtgttggatataagccakwctgtaagtgaattactttttttgtcaatcatttaaccatctttaacctaaaagagttttatgtgaaatggcttataattgcttagagaatatttgtagagaggcacatttgccagtattagatttaaaagtgatgttttctttatctaaatgatgaattatgattctttttagttgttgratttgaaaytccagacaagtttgttgtaggatatgcccttgactataatgwatacktcasgddtttgaangtaagtaattgcttctttttctcactcatttttcaaaacacgcataaaaatttaggaaagagaattgttttctccttccagcacctcataatttgaacagactgatggttcccattagtcacataaagctgtagtctagtacagacgtccttagaactggaacctggccaggctagggtgacacttcttgttggctgaaatagttgaacagctttaatatacaataattgttgcattattatttcagatgataaatgtggtcataagtaagaaataaatgatcgagtttagtcttttaattcactgtcctttgaatacctgcctcttactctggaggcagaagtcccatggatgtgtttatgaacatggttgaggaagatttaggaagactgcaacagtacactacctaaagcaggttttttactccatctttttttgccacgtacactggcctcccactttgatatgcttgaaattatctccttgatttgtctttcaaaactacatattgaggctggttgcggtggctcacacctgtaatcctagcactttgggaggccaagccggacagatcacttgaggtcaggagttcgagaccagcctggcaaacatgatgaaaccccacctttactaaaaatayamaaattagccaggcgtagtggtgtgtgcctgtaacccagctacctgggaggctgaggcaggrgaatcactggaacccgggaggcagaggctacagtgagccaacatcacgccactgcactccagcctgggtgacagagcaagactctgtctcaaaacaaaacaaaaaacaaaaaactacgtattaagacaagaaacagactgggcgcggtggctcacgcctgtaatcccagcactttgggaggctgaggckggcrgatcacaaggtcaggagatcgagaccatcctggctaacacggtgaaaccccgtctctactaaaaaatagaaaaaattagctggggtggtggcgggcgcctatagtctcagctactcgggaggctgaggcaggagaatggygtgaaccyrggaggcagagcttgcagtgagcagagatcgtgccactgcactccagtctgggtgacagagcragactccgtctcaaaaamaaaaacaaaaacaagaaacaaattaaactaatgtgatagactactgctttgttttcaaaagatacactccccaaaagttactgatctaaaatacagtagtactatctctgtttagtaagaaccctgacaactaatagtgttcttatatgtaaaatgctattcttgcctttcatttcagaatatactttttaaatgtgaatttctggatttttttttatagcatgtttgtgtcattagtgaaactggaaaagcaaaatacaaagcctaagatgagagttcaagttgagtttggaaacatctggagtcctattgacatcgccagtaaaattatcaatgttctagttctgtggccatctgcttagtagagctttttgcatgtatcttctaagaattttatctgttttgtactttagaaatgtcagttgctgcattcctaaactgtttatttgcactatgagcctatagactatcagttccctttgggcggattgttgtttaacttgtaaatgaaaaaattctcttaaaccacagcactattgagtgaaacattgaactcatatctgtaagaaataaagagaagatatattagttttttaattggtattttaatttttatatatgcaggaaagaatagaagtgattgaatattgttaattataccaccgtgtgttagaaaagtaagaagcagtcaattttcacatcaaagacagcatctaagaagttttgttctgtcctggaattattttagtagtgtttcagtaatgttgactgtattttccaacttgttcaaattattaccagtgaatctttgtcagcagttcccttttaaatgcaaatcaataaattcccaaaaatttaactgctttatgaattcaatttaaaaatccttaaaataagtcctgtctctttaaaaaaacctatgcatagttatcatttctctacaaattaacctagtttagttttctgttggttccattttccttgtttgttaagttttagtagctagtttaattgtaatctcaatgattatgtggtagaatgggttggcggagctacaaaaattcctagctacttcagagacattaaatttcagacacatggtacactttatattacattttactatgctaaaataacacggctttcttttggaattctgttcagtttttcagattgtaatctcagctacatctcaacagattgttctcagatatgtcctattaccttctttgtgtagatagtgctttattgactaagaacaatgacaacaacaccttttgttttctgggaataggagaaaagttttaagccaaaactcttaattgcttatctgctccacgtgaggtatgaactatcaaacttaggagccatctagcttacacgtgttccttaaaaagtttgctgtaggccgggcacagtggctcgtacctgtagtcccagcacttttgggagcccagggtgggggatcacttgagctcaggagttcaagaccagcctgggcaacatggcaaaacgccatctctacaaaaatacaaaaaaaaaaaaaaacgctgggtgtggtggcgcacaactgtagtcccagctacttgggaggctgaggtgggaggattgcttgagcttgggaggtgaaggctgcagtgagccttgacagtgccactacactccagcctggatgacagagtgagaccctgtctcaaaaaaaagagtttgctgtaattcccagcaacaaagtaggagactcaaactaaataattttctatagtcctagaacttcttagtttacaaaacatttttacttctgttatctcatttgatcttcatacccatgtaaggttgaggtagatgttaccacatgtgagtgcaatatccagaactcctgaatccccttcttcccctaaaatgtcagcccgctgaggtccacttggctaccctcttgaatactgcatccagcttcccactgctgaacctctttactctttttttttcagttgcacttaccaccttctagtaagttgaaccatatgaaattaccatttttgcaggtaaaaaatggccggtgataggcagtttggcgtcgtataacccaataacatgttatataatttacccacaagtggtgggttgctatgtcctggaggagtcagcttcagactctagctaaatgattgtataaccttgcagctctcccctaagtgaggaggcaatgttgaaagtcccatgtcttatcagaaccagggaggcagatgagaaactgccttatggcagctcccacaacatagggaggtgggtgacaaatggccttgggacagcttcttcccaagactggttatgttacagtgttcctgggaggatcacatggcattcctccaagatgggtcagactgctgttggccttgtctgtgtggcgtatgtgaagacattcatggcagagctgttcccttagaagcatctactaaattgatcttttcctttcttacttactgtctgtctcccttagtaggctgtcagctccgtgagtgcaggaccttgccagtcctggtcactgctatatccccagcacctacaagagtgcctggaaaattgtagtgctcaataaatatttgttggataaatgatagaatgataggaagttaaaaagcaattaaaatacttgaaaagaagcaaaacatttttcatgttaagcaaaaaaaaaaaaaaaacttattaaggatagctaacatgtattgaattctatatgcaatggaatgatacttagcgcctttgaatccttatgataaccctataaggtaggttgtttgggtttttttaattgtcccaactttacagatgaagaagtgcaggtccagagaggtcacataatttgcccaggatcacacagctagtaagtagcagatgaggaatttgaacccaggcagttgtattccaccatctgccctcttagttcattgccacttaacctataatgcccagctcttgtgtagaaattaatacactgataacatagaggaaaacattaagctcattgaatgtaataagtccagatgacttgtacattaaacacagctttttgaggtcacagctgatctctaagaatgtaaactgatttcctctggcactaaaaagcattttcaaagactgttaagagagtttctccaacattctcttcagatttttctgctggcttattttatgattctgtggacagcttcagacaaaataactttctggtatgaaggattgtgtttactctgcttttttttttgttgttttttgggttttttgttttgttttgttttgtttttgagacagtgccttgctctgctgctgcccaggctgagtgcaatggcatgatctcggctcactgcaacctctgcctccctgggctcaggccaggtgtatgctaccactctcagctaatttttaatttatttttttagagatacggtcccactctgtttcccaggctggtctcagaactcctgggctcagacagtcccccgccatggcctcccacagtgctgggattacaggcatcagccaccatgctcagcttgttctgccattttcaaatgtgaattttatagacactttaaaccacttgaaagagtgatgatgttttaatgattttcattattatttgcaacttcaagcattaaacactgccaaattaagtttcaagttttctctttacacaatatggatgtacttcataatggacttcctcatcatgattaatgagtgaagtgacattcaaacttggtagcttttcagtagaacttcctttcccaacattttttctgttcctttaattatggcaatatctgagagctctgaacataagtcaaaggtttgattatttttcatgtggcttcctctgcttggaactttctgccccgcatcttcccgttgccccctgtgtcctcttgtcatgcccctacccttttttgagtgtgtctattttctggcactacaagacataacaggctcatcttgtgttttccctaccctgacccagaatcagccattacttcaaggagccctggttccattattggagaatactattagaaaccaggatctggtgctaggcatgctcatttctattggagtgtcatacaaacaatttgtaaattgtttgtaggtcctcccagtggataggattaggaaataaaacatgcatactaaccatgcatacacacacatctacgtctatttctgtatctgtctgtatacatattaaaataaacatgggttgataactaatgtttctgctgtaatccacagccttcatcctagcctgccactcttcttctttttagctttttcaacagtgggaaatgtggctcttgttatgtacactttattcacttatttgtttgaccctagtatcataaagtagttccgtatgcctgtaacagatcgactaactagagtccattatttgcggaaagatctttttgtccgaagcgttaccgcaggggtgtccaatcttttggcttccctgggccacactagaaaaagaagaattgtcttgggccacacgtaaaatacactaacactaacgatagctgataagctaaaaaaaaaaaatcaaaaaaatttcatgatgttttaagaaagtttactaatttgtgttgggccacgtttaaagccatcccgggtcgcaggttggacaagcttgccttacagtatccagtcaaaataatgttttccaaaattacttcttttctttttcatccctttcagtgtggccgttatttataatgcagtttggttcattagtgtttttattacaaatacaccctcagccttcatatcctagttttaatgaattattacggtgaaacataataagagtcagagctatacagaaaggtctactcagaggtgctttgttccctcctattctgttcccactactcctactttccactgaccctgtaagcatcatatttatttttaatggcagttacatttttaccaagtgcttactatctgtaggcacttggtgtgtattgcttcttttggtgttcacagcaacctcttgaggtaagcactattattatcccccctttttcttttttctttctttctttcttttttttttttttttttttgacagtcttactctgttgcccaggcaggagtgcagtggcgcaatctyggctcactgcaacctctgcctcccaggttcaagtgattctcctgcctcagcctcctgagtagctgcgagtacaggcacaagccaccacgcccggctaatttttgtatttttagtagggatgaggttttgccatgttggccagggtggtctcgaactcctgacctcaggtgatctgcccgcctcgacctcccaaagtgctgggattacaggcacgaaccactgcacccggctattatccccattttttagatgagaaagctgaatcccagagagcataagaagcttgtccagagtgacatctctgatgcataaccagtactcaaacctatttttctgacaccaaggcctgtgtgtaaactgtaaaggggctgcttggcacctactttcctaaagttgtcctatcccttctctgtctgggtcttcctgaagcttggcacttctgaagtcacctctctgaaaacattctggtaactgttaaatcccttgttctagctattcatgtgttctgtgtggttaaacaaggttcacaatgggccacctggcctttggaacttgggtgaagaggctgccttcagttgatcctccccactcccattttcaaaacatgggtttacatgagttatttgtgaattaggaaacataaccatgttttgagccttcatagaaaacaaacgtctggggtcatacaggttaaaaggagtaaccaaattcggcactatcattgttctattcagtagacaattctggggcctttctgtgtctcaggttctgtactagttgtttcaggactttgggataaatacaaactatccctgccctcagggggcttaaggtcaggtgtacaagtgactctaatgtgaggcaaggctggattcagtgctgcatatctaatgctatgggaattcaaagaggaagtgatcagaatgagaagggagggatggatcattccaggagaagcttcagggaaaagcaacatttaaaatgagacttttgagagtgagggaaatttggacaggtggatatagaggatgcaaggctagaggaaaggttttagccagaaagtctgcttgggcaaatgcctgggtaaaaaaagaaaatccactttgggaggacaaggcgggcaatcgcctgaggtcaggagttcgagaccagcctggccaacatggtgaaaccccgtctctactaaaaatacaaaaattagctgggcgtggtggtgggtgcctgtaatcccagctacttggaaggctgaggcaggagaatcacttgaacccaggaggcagaggtttcagtgagccgagattgcgccactgcactccagcctgggcaacaagagtgaaacatctaaaaaaaaaaaaaagaaaatcacagggcagtgtggggaatggtgagtattctaatttggttgtggcagagaggatgtagaaggaagtgataagagagaaagccggataggagggcctttgtgccagttaggatgttctagacttccagccaggttgcccagctcaaactggcttaaacaatgagggggtttattggctatgtaattgggaagtgcagaggtagctcaggccagatcagtttgatccactgctccattatgatgtcaaagacccatgcgatttccacctcattattctgctgtccatagagccaacttcatcctaaggccagtccttgtggtcagacaagggctgccaatagtaatctgggtgcaagtttctttgagaaaatctttctgtgtcaactctcttaaaaggggtgaaaaatctctccttaagt

SEQ ID NO: 93244 - DNA, 40889 bp, Homo sapiens
aaacacccacacacagccaggagggacaggtgagccaatttagcttccttggaatgatggattaaaacatttggagagcagaatttcaagcaattgccatgttagagggttttctagaaagataattaaagagaaatcataattgggttttagatattgatggttgttcatctgccctactccattcatcaacattcccatatacactgttacaaagaaatctcaagttcaacaagagaaggaaagaggtcttctatcttatgtttgattttttttttttttaagttttctttggagacaggatcttgctctgtcacccaggatggagtgcagtggtgcgatcacagctcactgcagcctcaaactcctgggctcgagcaatcctcccactttcacctcccaaagtgctgggattataggcatgagcccctgtgcctggtccttatgttttgtttcttaagaagaaagaggccgggcatggtggctcacacctgtaatcccagcactttgtgaggccaaggcgggcggatcacgaggtcaggagatcgagaccatcctggctaacatggtgaaaccccgtctctactaaaaatacaaaaaaattagccgggcctggtggtgggttcctgcagtctcagctactcgggaggctgaggcaggagaatggcgtgaacccaggaggtgagcttgcagtaagctgagaatgtgccattgcactccagcctgggtgagagagctagactccatctcaaaaaaaaaaaaaaaaaaagaagaagaagaagaaagagaaggacggaaaaaaagagggagaagaagagactgtcttagttcatttgtgccactataacaaagtaccacagactggataatttataaaggacagaaatatattttctcacagttctggaggctgggaagtccaaagcacattttctatctggtaaaaacctgttcctcaaagattgagctatataggtatcctcatctgacagaaggtatggaaagacagaaaggggttgagtgctaagtacttacagggcagaagagcagaagagagtaaatcacgtttcctcaagcccttttataaggtctctaatcctacccatgagggctccaccctcatgacttaattaatgctgagaggcagaaccccttaatgctaatcacattggtcattacgtttcaacacatgaaaactgggcggcacattcagaccacagcagggagggaaaggagaagagagaaagggaaaatcttacttctagtcttctcttttgcctcttagaaatcatagattttagacctggaaagaacgttaaaggtcagcttagccatctccacaaacccctttccttttacaaattatatatggatggtgaggaccagtaaggcaaactacaatttctaagcttacacagtctattgaggataaggattcaggtttcctgcctcccggcttggtactttttacattaagtcatcctgtctcccatttagttttataaccttgagcaagtcacccaaccagtcaacaaatatttttaaagacctaacaacaagtaatggaatatccaaccaaaagaaatttaaacaaataaagagcttatttttctctcctaataagaagtcagggggtagacacagtcactggtactagttcagcggtttaatgatgccatcatggacccaaacagttctatctttcagttccatcgtatttattgttggctcttatcaggatgactgttgtcccatggttgcaaaatggtcatgtatctccaggtatcacatatttgttcaatatttcatttaacacttttaaagtcccatgcacaaaatgagttactttgattttacaaccatgatagctgtattctttgtagatgctccatcaagctgaggaaaatcataccctttatagttgataaaggctttttttcaaaattatgaatgggtgttgaattttgccaaatttttttttgcattgactgagatcatacgaatcatatgaattttcttctttattctgtttatgtagtgaatgacattgattgattttcaaatgttgagccaattttgcattcctcaaaaaagaatcccacctggtaatgctatcttgctctttcagatgtcgctggatttgatttgccaattttgtttttgtttttgtttttttgagatggagtctcactctgtcacccaggctgggtgcagtggcgcaatctcagctcactgcaacctccacctcccaggttcaagcaattctcctgtcttaccctcctgagtagctgggattaaaggtgcccaccaccttgcctggctaatttttgtatttttagtagagatggggtttcaccatgttggccaggctggtctcaaactcctgacctcaggtgagccacctgcctcggcctcccaaagtgctgggattacagacatgagtcattacacctgaccttgattggccaatattttgttaaaatttttgcacctatgtaagaaatataggtgtgtgattttctttcctttttatttcttggtatcaggattattctgaattataaattaaaaagtgttctctcttcctttgttctttcaaaagagtttatataaaatcaatattacctttcttaaatgattgataaacatttactagtgaagccatcttgctctggaattttctttttaggaccttaaagatatggggtgattcaaatgttctatttcttcctgtgccagttttgggaagttgtatttttcaaagactttttccatttaatgtaaattatcgaaatgatcagcataaagttattcataatgttttcttattatattttcaatttctgtatatctgtagggatcttcctcttttatgcttgatatttgttattcgtgtttttttgtcctgctcaatctcactaggagtttagcaattttgttaatattttcaaagaaccaacttgtaagttggttaatgtctcatattattttttattatttttttcctcctattcacttcgagtttaattcactttcttattctaatgtcataaggtggaaacttagataattgatttcaaaccttttttctttactaaaataaacttttaaagctataaatttctcttgaaggactgttctgactgcattccacatattttgatgcagtttcattatcattctgtatgccgtgttttctaacgttcttacaaccatgcctggcataaagtacttagtaagtgttccctcctgttagctccagtttttgttttttttttttttgagatggagtcttgctctgtcgcccaggctggagtgcagtggtgcgatcacagctcactgcaagctccgcctcccgggttcacgccattctcctgcctcagcctcctgagtagctgggactacaggcgcctgccaccacgcccagctaattttttgtatttttttttagtagagacagggtttcaccgtgttagccaggatggtctcgatctcctgacctcgtgatccacccgcctcggcctcccaaagtgctgatattacaggcttgagccatcgcgcccagcctagctccagtttttgtttctcttgttaacaagtgagaatgggccccttcagagcctctttgctgtttccactgactgaaatactattccttcatataggcccagaattctaataaattcccattcattgtgcaggtgtgacctcagacagcgttacctcaaagaagctctccctgatgaaccagaccaggatggtcctctcatgtactaagttgaatagtgaccacccccaaaaaattcatgtccacccagaacccatgaatgtgaccttatttggaaataggatctttgcaaatataatcaagttaatatgagatcataagatcacactggatgagggtgagccttgaatctaatatggctggtgtctttatgagaagaaagaaacttggagacagagacacagacacacagagataataccatgtgacaacaggggcagagaccaaagtgatgcatctacaagctgaggaaggccaaggatggccagtagccaccagaagctaggaagaggcaaagaaggatcctcctctagatctttagagagagcacagccctgctgacaccttcatttcaggcttctaccatctagaactggaagacaataaattatcttgctttaagccacccagtttagggcaatttgtcactgcagctctagaatgtaatatgccaagttacacgtttccatactttcctatatttttctttcctagctcttatcagacaattattacatataaattatcaggaaatatggatggtgtgataatacttactagtctggcttttcttctctctctctctgagatggagtctcactctgttgctcaggctggagtccattggcgtgatctcggctcactgcaacctccacctcccgggttcaagcaattctcctgtctcagcctcctgagtagctgggattacaggcacaaaaaagccactatgtccagctagtgtttgtatttttaatagagatggggtttcaccatgttggtcaggctggtcttgaactcctaatttcaggcaatccacctgccttggactcccaaagtgctgggattacaggcatgagccaccatgcccggcctagtctggcattttagtagagccctccttaaggaagactaacataaccccaaccagtgtctccaatggcaaagattttgaaaggcagataatttcgaaggagactgtccttaaaatcacagtatgtcagtggccagctttagcttctcaatgctagccttgggtcacagggttttctagtgtgaaaattatccaaacgagtaatttcttatagcaacagattgtcaaaaaaaagacactgatgcgcaagtcatgtgggagtctgaaacattggttctgctctcctctgcctccagggggtcttggccaagtcactcaacctctctgggttccaggctcttaactgtaaaagaaggtgattggggctacacagtagagtccctttggctctaaccttctgaggcttcatggtttcttccgttaacagtagctgaatccaggaagaggaggtgacccaggcgggtgctggaccaagaaggattctgtgttaagatgtagaactgccagttctgtctatgcttgttttacttgataaatggaatggagtagacgtttctagggctcttgtttttaaaaatcttttaaagtggctggattgctggtcacttcctatctctgggccacagtgcattcacctgtatacaaggtggaagaaaggatggaacccgggattcccaaggtctcttccggctctcaagtgcaaagttctgtgtcttcaaagcagtttattgctaagccagagagctaagagagcttagccttgtactaagtgtaggtcatggggtcaatctcaggaacacccttcgctttatttcttctcataaccattgcgtgtgttggggagggctggggcagtctgcctcccccaacataggcactaacatatgccatcgacgggcaagaatgaaatcctggctctacctctcacgaatcaggtggatctcaagagagactgaataagtgtgagcctccgtttccccatctgtgaaacagggagagttaccggcaaaggtgtaaatgtcaagagttgagcaacaatgcctagtccttaccaggttttcaagcgctattttccataaccgttaggagcgctaaggaaagataaactgcggtgtcctaagtacgctgaggctcgctgacgaccagacgagcaccacgccacagtactgggtgcctccgtgctcccacgtccacatttcccgtgcactgcacactggcgtggccgcgcgggtccacggaacagcccagcgctcggacgccaatcatcccgcatcaggctccgccccccagcgctcaacgcgcccctcggcgtgcgcgctcccgccgccagcgggcgcgctccgggcgcaggcggtgamgtgttgccggcgggggccgggcgggggtgcggctccaggaaaggagcgcggcctccaggaagccggctggccgtgatgctgcccaatggtggtcccccgctcccggggtccccggccggccaagcaggtgaggttgccttccgagcgtgggtgaggggagggcgggcggccgaaggggccggcgagtgggttggagtgcgggggccggcggcgcggcgagcgggccgcgracgagcctttttgccccaggcccccacagccgcctgattagccccgcggaccggttcccgcttcccctgccgcgcggccacatccgagcgccccgggaccaacccctgtgagccctggcggccggcgcgctcccccagcccctggcaggggacacctggcggtcgcgcgcctcgggtgaccgctcgggatccccccctcgaatgggcggagcttgaccgggcagcagggatgctgcacccgggacccagccggccctgcctgccgctttaaatgatgacattcgctcgtcttgtcgttttcgctttgctttgcttttgccagatttcatgttagatttcttcttggaaaaatggagcttattgggcagtaaagtgatgatgcacagcattgtttctgaacttgagtaatgcgcggaccccttttaaaggaacaattctctcatggtctagaatgtgtcccagaacccttagggtgcttcagaccccagttagatgaaccctagtgcagagcgttttcagagaacacttatcacgaaggaaactaaagagatcctttatgattcaggaactttcaggctagaaggtaaactagaggtaatggaagaattctaaattagacactcaaagcccaggctaatttcgcattgcagtctttgttgtctcctttttgtgatgaaaataccaaattatccagctttagagaggcctaaaagagttatattatttgtgttaccatatatttgatgtttttgtatcaggtttgttaattctgtttgacatagtagaattataaaatggaacactaattcgtgtagttgaatcgtttatttctctgtttaccttaacagaggtcttgtagttgttgcatgttgaatctatggcttatattcttctacctctaataggaaatgtgtgactgaggcccttgaggatatagtctaggaaggagacaaaaatgaacatttatctaaggatttatattctctacgtatttactcagcatgtttatttaaaatagactactcatgaataaagagacgattccaattgtaagaaaacatcaggatgtgtaacaggttaaatcttgacaaagaaacatgttgacttgtgccttgaaagaagtgtagtcttgagaggaggacacggtggtggctcggaggaagtgctgttagtaaatgcctgaggcaggcatggagacagcttgtgtgggagagaagagagagacctgctgcactggagctgagagatggtatctggggctgatgagaggataggttggtgagataaggtggaccagttgatggataaaaggtttcaggtgccacacaggaaacttggtgttgatccatggccttccagaaggttcttagctgatcatattttgaaggccgtgttttacacagagttgcttgtaaagtgtggcgtgcacagtgaaggcagaaggtgggtgagtcgccaagagatctgtcttgaggtagtggtgcctgctgtggtcatcttagatatgagggatatctgaggaagaatcgactggcttggagaatgatagaagattgtcaacaccggatgtgggaatcaaagctgagaaccaggtaatccaggtcaatggggattggtggtacccgtcttagacctggagaatttggagggtggtattagagtttgcattagaagatttcaaccctagagttggactagttgagcttgcagtaacagggcttcaatgagcttggaacgtggaactggaacttgaggaaagtcagagttaattcaggaaaagtgaccagaaaaagactacttaaaatgggaaccagaattttgcaaattaatagagggaggaagaggttaagattttatattgaaaaataaaattaaaatgtgtaagataaatattgaacatacagatcataaatgcaactacatacatatcttcttaaagaatgaatcaagttgtcttcatgtatcttttgtcactactgagtaacggtgccacccggcagcctccacatcagcctctcactctcagaaagacagttgtttcttgcaaaacgctgccggaatggttgagagcatctttaatttttccaggttctcttgaatcctttgatattcaaatcattcttttctgaagtacccttccctgtggtacctttgcttattcagaagctgagctctcccagaggctgacttctctgtgattttgtttgcctgtgatttgagttcactaacatctgtttccttgcatcttgtgtttttccaccagaggaaccatttccctttgtggttgatttgcattgttttcgtcgttatctgtagaactgtcagtgagagactgacaaagacattgacacctgactgtaggctttattccaataatgttcagccaagtagggccccactagctgaaatcatgagaattaatgcatctctctggtgataggtctaacacaatttaggcttttttaaaacatgtcagttttatgtggtattactgaatttgcctcccagtgccctggtgcgaagattcttagctagaaggacaattggagtttacatttgaagatcaaattaccatttaactcttaggcaataatccattgtacttttgtcctgagttaaaattacagtgcttcagcagttataagctgtcctattttctctgcttttaaacacaagctttgtaacttaaaatatctgtttgtccttttgatcaaaatcatcacatatctcaaaaaaaaaaaattcctgagacaaacctcagatgacacaaagtttcctaagtgcgctgtgatcattctctcggtcaccttcctcttcgaagtgtgttctttctcaccccatctagaattgwcctcccacctctaggaatcttttcctgctaaagctagccttctctgtgctcttctctgagctcttataacaagaatcccagtaatttaacattgcctttaattagtatcttgactattttctgggcattagtattttctctgtagcaatctgcaaactccatgaaatttggagttgggtttgttactcctcatgtcaccttcgtagtcctgactttyttcctcaaggaccagtttgcctttaaccatgactttaagctgttaaataaaactgtcttttctttggttctcagttcagctatcacacaactatcactgatgttttttttaaatgttcagattggaattcctgtgtcctgataggcttttaagataggctttctcaatatattcggaaaagtatttgatcctggaaacaaggtttcatccgtcaaaggtagcttgttaaaaattgttatttcctctgatgataaaattaatatatgtcctttgaaaaatataggcaagcctagggaagaaaataaagatgatacctgatctcattgcccagaaataactaagcactgttaatattttggtttctttcctaacattttatccccccatgcatggggacattttttcacttaatatatcatgaacttgttttcatgtcaataaatagatctatgtcatcacctttaatagtcacattgtattccattgcataaatgtaccccacagtggacattagtaacagtgttttgctgttccacacaatactatgatgaccatcctatagattttttagtgaattttcctgatgacttcctaaagatgaatttctggaagtgtgatgggtagagcagaggataggcatgcataagtgttcgtgtgtgtcaccccagtacccccagaaggttagtgatgtgcctgtccagagtctcacagcagtactcatcgaccttttccccttcccctgttagccaagtatcaccaggccttcatgtctgtcaatatgatagctgtttttatttctatttatctgaatactgattattttatcagccatttcaatgagatttatttcaataatctcaaattgtctttgctcatttttctgttcagtctttctcttatttctttataataactggctatgtaaaggttatttactctttgtcatgcactttacaagtacttttcccaagttgtgtgtattcatagcagggagggatttttttgtttgttttaagcacacagaagttttaaacttgtgtagctattttataaaaacattaaaatccatttaaacgtctagatcattgatttttttttctttttactttttgtgtaaacttttaaatcacagacattgtttgtcctaaatttggggtacatggtacaatatggacaccatattaaaacttgaactaattaaagtgattttttcccctttgtcaggtaggcattattaatactttttactctctaatatctttgtgtgtatgttttatttcctccactgccttatagattctttaaggtctgggcctatatctaattcatctttgtgtctcccatttccagccatttgtgaaacctgcaatagttactcatgatttgtgtggcaggcactggtcacgggggaaacagaagaataagaggctgtccctgccctagtggggcttgtcatgtaatgaggaasccaaccacacgtataatactttagcccactgctgtgataagcaaatactctggggatatgaggattagggaaactcaccgaggactcatgcttgatttgtgtcagcattgattcttaggaatgcaactgacaacacaaggaagaggttcattctgctaatgccaaggaatgcgaggcatttcagtgatctgtagcttgtgtttcatgtggctggagcctagggtacgtaggaggggtctgtcagggaatgagacagaaagataggccccagatcagtactgtgcaaagagctttctgcgatgatgtcagtgttttatgtgtggactggctaatgcagaagctatatgtggctattaagcacttcaaaggtggctagtacaactgaggaactcaatttttaattttatttaaatttaattactttaaataaccacacatggcaagtggctgcctcattggacagcaccggactaaatcatgagggacctcttttacaccctaaggagttgactgttttctgagtgagagagaaaagttgggggatggggagttatgattccctgtttgttttggaaatgtcactctagtgtaragttcttaacccttttgggtcccagaactctaaaacttgacttcttgccagtccctttcctagggtctgcaaagctacaactgcagcactcaactgagcagaccaaaacctgggcctgggggagctcccattctgggggaagagacaaaaaagagaaacacaagacacgcattatgttagaggacaaggatgggtggattctcacacttgcatcccacctctccctcccaggagctgtgtgaccttagacaagttacttagcctctctgcctcatccataaagtgttgtgataatagtatctgtcttgtaagttgttaggggaatgaagttagtatttgtacaatgtttggaacaaggcctggcacataatgagcactataaaagcatttaataaataaataaatgctaaggagaaaagatcaatcagggaagggaattgctggggagggggtaggcattgcagttattgatcaggtgaccagggaagtcctccttgagaaggtgacattatttgagtaaagacctgaagggaatgaaaaagtgagccatacagattacttcctagtagagggggcaacaagttgagagaccctgagaccagagagtgcctggcatttttgaagaccactcggaacattggtgtggctggaatgcagtgtaaaggaggagagagcagacgatgaggtcagagccttaacaggtgttagatcctgtagggctttgtagattggagtctttggaggatttctgagtacagaagtaatctgatcggggtcctgagcaaggggtgggagtgtggagctatcaatttccaagaaagtatcattgcccgagggtgataaaggcgaggtcactggttgagactgccggtagaagactagttaggctgctctttagagcaggcaagagataagagcctgatctcaggcaaagatgatraggaaagggattttagataagctgaggttaaagaaattaaaggaatctgtaagaaattacatttggggccaggcacagtggctcacgcctgtaatcccagcactttgggaggctgaggccggcagatcaccgggtcaggggctcgagaccagcctggccaacgtggcgaaaccccgtctctactaaaagtacaaaaattcactgggagtggtgacgggcgcctgtagtcccagctactcgggaggctgaggcaggagaatcgctttaacctgggaggaggttgcagtgagctgagattgtgccattgcactccaccagcctgggcgacaagagcaagactctgtctcaaaaaaaaaaaaaaaagaaaagaaaaaaagaaattacatttggaagatgaaggaagagggatcacacgtgaatctggtttccgatttgtgtagcttggtgggatcaagattgggactgcgggggcagagcagattaggagaaaaaggggagaagattgcagttgttaggggtgcagttttagaattttctcatggttctgtgcaacattcagatagagatggctcataggctgttgaaaaagtgtagaagagaagcctggggtggagaaagaaaaatttgagttacctgatcattgaagcctcagtaatgattgtagttagaagagaatgaggctagacagagagcctggaaacataagagtagtcggggttggcagagaacaacgcttaaaggatcctgagcagcagttattccagagctcagaagcagaccagacgagacagctgtcttgagaggtcaagcagctttgtgagaccgaggaaagatagagaccgcttgtcctttggcttcagcagattggaaggaggccctggctaaaggcatctgtctgctctgcaatttgaggcctggaggctggargaggagtgataatggtggagtcggagaactgactagggacaaagtgccttgcacagtactttgtacataaaagggcagtctaatagacatttatcaagtgaatggatatttcaggttyacattcagcttattctgcctttctcctacctccaccccaaatctcccttgtaccataaggtatttaaggcctatttgatatcctgatattttggggtcacagacactttaggttagacagcactaactagtaccagacgattatcatctcttttgatttaggtctatattggacagtatgaaattaacttagaagtgtgttgctcagaataaacccttccaacagcttcagtgcaaggatcatgtatagattatatgtggttggatttaagcamacacttaaagaacgtagatgttttctttgatgatgctatctttgtgatttgtctcacttcctggaacaggagggctctaactccgtgaggaccccagcattatttctataattgtttgtgagaaggactgaatcccagagcattgccttgttgctgacctttcagtatggggaggtaagtgatgggcctaatcaccatgaaacatgaaatcttggtgatgcaaaaacaggtcttgagagaaaaaaaatctaaatcgcaagtgaaaaatgtgaagttgtgctgtgcttctgtttaagaycttttttcttccagggcccagtgaggtaktttaatgcatgaagcactcttcaaggtgaagagtaaagaaattaactgtaaaataatagaatttatcccaaaggcagtgaaatttttttaaatcctaatcatatttctagaatgagcctctcattcttgacataaactgaggggaaaagttcttgattatttgcagaaatgtcttgtgggaatatttctaaaagtacaggacatagaaaactcatttattgactttgttatggggatgttgttaaaatgctgttttctcccattactcaagtcatctgggagaaatttgccttggacttcagtgttgagaaaatttgttcctcctgagctatttgtatatttctggtgtaatgggcaatgagctcagtcgtatttgcagcaggcccagcttacgacatgcctttctccatactgcattcccgtttggtctcatcatccttacactcgatttcatgatcgatttatatatttatgttattgaagttattctcgtaagcagtctctaattctgtatctatgttggagcaaagcagggtaaaattaaaaatctacataatactgtcaagagaaggggaaaacccagaagtgtcgtaaccttcagggcctgattctcattcagatgattttatgataaggggtttgtagctgttgtgtagcatatgcaagatgccagtatacagatacctacagttagggaaatccaggtagctcaagccaaatatcttattttaggatcactttaggtgaaggaagcctcattggagcagattgctttaaaatctttttccttctaatttcaggattggcatctcctgtctttttcctgcttcttggcattttagcatatctccagtagggtgtcctcgaattctgaataccaatttacgccaaattatggtcattagtgtcctggctgctgctgtttcacttttatatttttctgttgtcataatccgaaataagtatgggcgactaaccagagacaagaaatttcaaaggtaagagataaaaacatttgctttctagaccagaagccttaccttctgtcttacctgttttaggctgctggaacagaattccatagactgggtggcttataaacaacagcaatttgtttctaactgttctagaggttgggaaatccacgatcaaggtgccataggttttgtgtgtggtgagggcctgattcctggttctgagatgaggaggtcttcttgctgtttcctcacatgatggaaagggggtgagggggctccctgaagtttctgccctcatgaactaatcatccccctgaggccccacctcctaatagcatcgcattggtgattaggtctccaacatacgaattttggggggccccagacattcagaccataacaccatcatttcatggcttcacgacgtttggctttagattggaatttaaggaactgtaggaactagattctgtgccatgttcatcatggcatgaacagttaaaccatttgaagctagttaactgctaactaccaaatccatatcataagaggtcctggaataattatttatacataagcgtctcgtgtaatatgttttaagctgatttttgagttggtagtttagaaatagaattttgcattttggaatttgtttgaacttctgtaatggagtgtgtgtctgattkagatgatctttatcatcatcacttgttttgttttcttttgactcttcaattattcaacagttgtattgatgttatagtggtgctgctacatagcttagaaattactgacttggtatttgctgcattttctctgttagacttcaggtgatattctttgtctaaatcaaagcatacgtgtgtttctatacaaggtacctggcacgagttaccgacattgaagctacagacaccaataaccccaatgtgaactatgggatcgtggtggactgtggtagcagtgggtctcgagtatttgtttactgctggccaaggcataatggcaatccacatgatctgttggatatcaggcaaatgagggataaaaaccgaaagccagtggtcatgaagataaaaccgggtatgtaaatgagaacatctgcctggtaaccagggtgtgtaccttcattctctgtggcgtctttcatatcgttccctttctacaccatggccctgagtcaaacctcacaccaggacctgatgggtctccttgtttcactttcttttcccttttctgtccattttgcaaagggtgactaacaccttgataaaacatccaaacagacatgtctttttgtctcccatagcattttaaatagtgccttactcatggtatctacgcagatgttgctggttggcattaattatggagagttttttcctatttagtaaccattggtctctatccttaatgacaaggtaatttcagataactcatgaaaatctgtaatatattggcatatatttgtcacttttaaaaattgctggccacatgtagttctagtcatctagattatttggtgagtgtgaccacagaacttagagctaatcataattatgtatagtttttaaagatactgtaatttctaagccagtgtgacatgtaaaagtttaggtttggcttccttattaggtaatttacatcagtgatgctcttttttctgtatcatcaccatttccatggacagcagcttctgtcaggagcatttagaatgggagataccgggagtgccttgaaacaagttttatgtcttgatagttgatcactgatttcaaacagttgaccacagatcttaatagagatgcagcacttttatttcatcttactaatgtattaaaatagtaaaatatcaaatgcaaacaatccaagaaatttatctggtaaattattagagaatattgataaataataattattatagcttattatccccatttcagaaataaaatttaaaagaatattcagtttaacatgagaaaaatacatatcctcatagaagagtctccaaccatgtagaatggtgacccctcgagtcctcattctttacggaataattcagaccccacctcctccttcaggcagccctcaacaagttgattatcctttgatgtatgggcagctaggaaccagcatattactcagaaaatctaaagtctgtacctcacttttcaggttaaagagagacaacctactgtgtgtctgtataccagcattattttatcagagtacatttccatgaacaaagattaattttttagtgagtgtcttctaagttttagttttatgtatttctaccccttaaatttttatgtatccctaacctagaaacattttcagttaaagtaatattgatcaaataaaaaacttacgagaagactgaaaaaataaagcattttacatttcatctagcttcacgtaccaggtcccatcagtgactaaacagatctcatggaataagatgaaaacttccatgccttggagttgtccttttagaacaaagggtcaactacattatcatcctagagtatacattagaatctcattaaaatcaggcttaacattggtctgtcttgcactatacaaagtgtatgaaatggaaatcaaaatacctttttattgcactactctgtcctgaagcatggacttcsgtgtataacattgcagcaaggctctagaaatttcttaatagggtctggctagtttagggcttcgagtgcattgaaattgaattgtatgtgttgtcaaaaacttacagtttagtcaattttttgctaattcctttgatgaatcacttaatctttttgggtttgtaattttctaatgtgtgaaataaggtatttttagacttctaaagcgcccctcatttttaatattgtaggctaaatgacacctagaaatattcatttgtgtactcattcagcagatacatgctgggcacctgccatttgctaggcactgtgttaggtgctatgaatataagtttgaacagacacattttgtgcccttgagaagcttttagttgtaatgagacaggcaagtaaataggtaattttgatatggtgtaatgaatgtacatctagcaaaaggaagtaagcatggaatttaacaagagttgtctwcagggttctgttagggtgacttccatggaggctggagccaagtgggtgtgcaggaattaaccaggtgaaaaggggtagggaggtggatggagaagactcttcttggtggtggaggagcagggccctaaggccacagtaaggtgcattatggaaatgttagttcagtgtagctgaaggcaatggaaggaacatgggaagagataagggtgggtgagttatgcagagcagggtgttctagagttgagccttacctggaggacattgagccacaaaagaattggaagcctgaagaggcatcctttgggtagggaatggtggggagatggtcaggatcagagggtgggatgtgctgtggcaggctggcagagggcgtgtccaaagggatgaggagtaaagtcatgtgagaggaaccaaggagaggcgatctatgaaacccaggttgtgtgttrggatgagggagagggacttcatctaagaccctggcttgggctgctgggtgcccagcgctgatggcctcggagggaggtaaccagcagtgagagcaggtttgtagtgaaagttgagttcagattttgccatgatgcattgggggtggctgtgaggacaagcaagggcagtgtctggtggacagttaccccacgctcacctggaggctaatgagtgctgcatggctggtggcacagttcggagttcatggcatgctgatggtgatagcagcctcaggagggactgagctcacctgaggagagggggagcacgtttctcgagggcaggcaagagcccatgcgcatggcagtgacacacagcagatgctcagtcaggtctgtgtgctttgatgaagaagaaaaggacatagcactgaatagtgccaccaacatttaagtaaggtctgcagaagaagttgctagaaggataggaaaaactaaggaagtgtaatgtgtagcatgatttccctaaaattagccactctgaagaaacatcacatgttayagctaaaatatctgcttcttaactaaagtatcctgtttctctaggcatttcagaatttgctacctctccagagaaagtcagtgattacatttctccacttttgaactttgctgcagagcatgtgccacgggcaaaacacaaagagacacctctctacattctctgcacggctggaatgagaatcctccccgaaaggtgatcctccacagaagggcaagggtgagggtgggttcctggaggggagagggggtgttcttctcccccttcctccttctcctctccatcatcatcatcatcattgaaaggaaaatattcaaaattctttcttcaagtctgtaacagtaccagaactattcctttagccagaatccaccaaatagcctttaattgacttaggactataggcaacggtaaaggtgtcatttttaaaaacctaatctattttacgtagttaaggaatgcttgcagttgtagttttacatctagaaatcacataattcacacaacttgttcattttgaaaattcattcctaatataatctttccaacgaatttcttttttaaaaaaattaactgtttcatacaagatataccagatccctggttttgttttttgtttgtttatttttttccttttctaaacagaagataccaagctgtaatcttttgatttgtaaatgtttttattactttacagccagcagaaagctattctggaagaccttctgaccgatatcccygtgcactttgactttctgttttctgactctcatgcagaagtaatttctgggaaacaagaaggttggtatattggtcttcagttkaaaatttgggaagctgttcctttaaatcctccccattttcaccaatgtaccctttgttatactcctattgtcttaacatttgggaaataatagccttgmaatattacaatttttaaattactaaatcagtttcttatatgactagtctttgttgccctaacattaagccactgaaagataaccgtttgtcttcaccacatgtagtgacatagcttgatataaactcactttgatagaaaaggcttgtgtgccttgcctaagttgtgtggcttcctgggacgttratcattattgagctgttggagcttcttctcgactttgatacactgagaaatatcaaatctttgttctattttcaaagaaatgattctccttgagaatgaaatgtcaagtcaatgaaattatttggggtatagcttgctaraaatgtataccaaaaagtatttcaaaagccgtctgtcatttcagcattaatacttcctatgtgaaagagactgtagagaatacagaaatggggtgaaatttacacattgctattcagctgcttacagacaattgagctacacagttagctgttctatgagggttttaggtaccagaaaaaagatgaggaaaaaatatcacaggagttcttaagagggaggcatttttttttttccagctagggccatgatggagaaagtgacatctgaactgcacctcaagggaagggatagttctaaatagaacatgccagagcatgggaagggtggggctctgagggaggggcaggaagcacacaccaggcagaagaaaggacttgactcaggacaggttggaaagagggcactgtggacagagaaacacaaatgttttagtttgactgggtggtggcccttctggaaggagtggcgggaatgttaacagttggctggctcttgaattgtcagtccaggaatttggacttctttctgtagatgagtccaatagcagagagtagagcaggttgcagcagaggaataggggcagggatggattagatggactacccaaggtgacaatgaaacccaggtgtagggaatgtgaaaatagaatcagacttggcagctgagtgaatggagggataaaggaaagagcagaagataccttgaatttttttttttttttgagatggagtctcgctctgtcaccaggctggagtgcagtggcacgatcttgactcactgcaacctccacctcccgggttgaagtgattctcctgcctcagcttcccgaatagctgggactacaggcgccgccaccatgcccaactaatttttgtatttttagtagagacggggtttcaccatgttggccaggatggtctcaatctcttgacctcatgatctgcctgcctcggcctcacaaagtgctgggattacaggcatgagccattgcacccagctgataccttgaatttttaaaaccttggatttgacaggtttaacatcataaaagtgaaaattatagtattttgaaacataaatttcaaaagaaaactggcacctagcgtattgtatttccaacctgtgtagatggtataaaactataaacattaaagttgagagttcttggaaagccatttggagtaataaaaacatcagtagcaaggtgttatttcagatgattttacaggttatcagggagtgaaataagtgagacgtttgcacagactgcgcagataggagttacacaaaatgttttaaaactttttcttctcttcaccctgtaaaatgtctataggtgtgtatgcttggattggcattaattttgtccttggacgatttgagcatattgaagatggtaagtgtcatggttccaacaaatgtatctagttggaaattggtgcttttctgtttaatccaaaggctgaaaaaagagctaagctttgtgacactcctaagcgtgtaggagtagaatgagagcagctgcagttgaacgtaattcaacttgattttagttgggaggagtagactgggtttgcctgaatatgcttgaaatagaccatgaaaagaaggtgactcttcagaagagcccagttctctggattagttctgttccagtgaacactttctgttctttctagatgatgaggccrttgtggaagttaacattcctggaagtgaaagcagcgaagccattgtccgtaaaaggacagcgggcattctcgacatgggcggcgtgtcgactcagatagcgtacgaagtccccaaaactgtaagctttgcgtcctcacagcaggtcattatctgtacaaatttccttctgtttggtttggttttcatttaacgtgtgtccatcgttcttgttttgttttctgagtctgaacacatctttactgtgctggctgaggtgccgcctctcaacccaggagaaaggagacaggacgaacaaggcagacctcagctgagccgcttgtgtgtgttcattgaaatcagctggtttgttttctgaacgtagagtttttctttggtatatacgcagtcgyatgcttgagtttcagtttatattttctcttcaatcacgtcttttctcaacaggttttatgaaatgtaaaataataacatctgattttttaagttagaattgggggaaattcttttttttaatggttcagactttgagcttccttggggaagattgaggtttgtatccactgcttccacatctttcaactggtggtttactcgaactgttctccaccctgttctgtgccctctcagttgctgcctgggcagccttgtctagagaaccccggcacggtttccagatgtatttctgaattgctacacgtctttattactccatttgtgttcagctgtagattaacaccaaagcctagctttctggattttcccctcaaaggtgggcggcagcatagcgtggccggcgggggacggttcaaagtgagaccgtggagctagacaggcctgggtttcttcatcatcctcctcctcactagttgtgtgaccttgtgcaagtcatgtaccttctttaagctggtttcttcatctgtaaacgtgaacaaaagtacctacaacatggggttattagaaggtttaaatgagataatgcatccagtatatctaatgcactgccaggcagctagtatgttctcaataaatgttactgacatctttattaagttccttggaaaaatgctttgtaaattcaagtattacaatttgtttttcctacctcccattccagacatgcctctagagactgttacactctttgtaaaaaatcatgtttttccctctcaatataaagtaaaaaatacatagaaataacgtttggaataaatactgaaaaatcaagattaaaaatttcccatggattcatcacctaaaaaagccattgttagccttttagtgaatttctttttttttctactcatagttttaaaaaatatggttgttataatcttagtttatatgatttttgtcctttatttaacagtgcatgagcatgttcctccataagctattgattactgtaactaaccttcccttgctattatatatttagatgacatctagttttttctgtcacagaatgacaaaggacatctttgcatatagaaacatttccatgtttaggtgtatttccacagcataggattccagaaataaattatgtcagagggtatgaactattttgctgactttctctttcaaaaagtcataacagtatcacaaatttgcagcccatctgaaatttcctaaatcagaattgtcatattgaattatgagtgatgcttagaagggtccttgggaagtgcagaagcagacatttttgtcccttttasatgagactatttttagacttttctttttagtaggaggctaaagtagcttaagctattaaggtttgttatgcttatgtctgcaggaagaagtagctaaaaacttgttagctgaatttaacttgggatgtgatgttcaccaaactgagcatgtgtatcgagtctaygtggccacgtttcttgggtttggtggcaatgctgctcgacagagatacgaagacagaatatttgccaacaccattcaaaagaacaggtaaagcacctttcactacttggcagtcatttgcaaacctaggtctctcctcataaaaaacagacccaggcaaagtgggaagaactcaattagcaaaagtgtgttgcactgttagctttttattccccsactagctgagcagggagaagagatgaaagcacaccagggtcctgcctttggccctctgtcccaccgtgccctgaaggaggtgtgtgcgtgcgctctctcacccgcatctcaactgatggattagaaatttcaccatcaagctatagaatagtttggagccctgggtggtgctattcatgattcagagtccttgggaaacccagtatctggagcactcgtggtgtcctggaggcctcaggtagtgtgttctcttgttgctgaggagattgaaatatgtgatgttctggagactctgtggatgaagcagccagtgcagctagttagtggataagaaccatcgtgaagggaattattcaagagaaataaattatctagaagagtcagagttagtggcttttgaatttagcaatgaagctttaaaaaatgagtgtatgaagaattgtggtatagaaaatatataaaacaaaacagcactctattggtttaaattgactgtataagtgtaagtatatagcacttatttatttgaaatttgtaagaacataaaagctatttggataaataaaaaaatctgaatctggggttatgtaagctatcctatttattactgtgttttatttgtttattttgatgaaacaattttgagggaaaaaaatcctagttcatagagctaagagattgtatacttccttgattaatgtaatcttaataaacctgtgaaggcctgaacttgaaaaaagaccaagttggagctattcagtacatttaccacaaagtcatgtgtgtaaataggaaaagcaataaaaaccttttcctgtgtctcttccaaaagttaactgaatagttttaattataagattggtagtcccatgattttgtatttttaattggtatttagcacattttggtataatcatttttatagtagtcttaaactagaaatattttatagacaacatttgtaacatattttttccgaaaccttaatttttactcattggttttaatgtcagaaagctttatataatggatagtttagtggtacttcttaatttagatataggacaactaaaaataatagcatgaaatatatatttgactactcttggacttttatagtaattacaggtgtttcatatgtcatgaattgagcattgaagtacacatttatctcttcgccatttgtagtggtgattaatttttttaaattaagcgaacatttttatggcaaagaccttaatttattacattcaactgcatgatgagtaaccctgatctgaggaatacacaacttgtgagttgagtgaaaagtgaaaacttgactgtcggtgatgaatattgaattctgaccatgcttaaccctttaacagttcaacacctgtcaggcccctgtgatttcacagtatccaacaccaacatcacttgagattttgtgagctcttctctgtttcttgttgcttgaaggcatgcacacacaataggatgacagatgttaactcccagaaatttcattagcaagtaataagcctagtgcctttcagttaacaaaattaatgtttattttctacagggcatctcagagcccattgtacaatggaaactgctgtctgctgcagttgggacccatagctgatcaaggaaagaaataagttgaaacagaatgataaaaatagagccaagccttagacattctgtcttaacttctgtattcatttgctaatcttttcctctgaaccaaggtctgtttttagactccatcctttctttggcatgcactgcacccctcattgagataccagtttgtctttgtttaaagaatactgaggacttaaaagagatttgcaaggcaatttgataccaaatccttctagatgtttgctaatttttcccagttttaaaaatcctacccacacctagtttgataattttctagtaacttttctaaagcatctaacctgctttgcccaggaccggatcttgtcacagtcacgttccttccatctgtattaggtaaaaccacaagcactagtgcaaaaatggggctggtaacacagttgccttgtgcccagcagctgggaacatcaggccttgttgccaggatcgtcgrctaatcgggtaggttatccaactggactctggtagcctgtctgctgcaggcaagtttgtatcctgactctccaagaaagtctcaagtgtgtattttcctaactaattatctcggaacccttttctgttccacagacacggtcctgcaggtctcatgtcccacagagcgtattttgagaaacactggtttgcagccacttcctgaaaacacagttttctgtaggactcacgatgaagtttcttgttttgccataggctcctgggtrracagactggtctgactcctgatatgccrtacttggacccctgcctacccctagacattaaagatgaaatccagcaaaatggacaaaccatatacctacgagggactggagactttgacctgtgtcgagagactatccagcctttcatgaataaaacaaaygagacccagacttccctcaatggggtctaccagcccccaattcacttccagaacagtgaattctatggcttctccgaattctactactgcaccgaggatgtgttacgaatggggggagactacaatgctgctaaatttactaaagctgcaaaggtacccttgagagacgccgtctgctctgcatgctyttgagagaccagtgtggacrgtgacgggttatgtcctcctttcacattgacagggaaagacggagtatagaaggctgcactgcagcatgttgggatcctgttccctttgcttggagggaggttgaatagtcacagcagaagtaaaaaatgtactgtacgctgacttctgcaccactccattagctaccctggtcatcagttagctccaaattacagtcttttatgtcatttttgtgctttgctgcatgtgacaattctcctactagccttccccctccctgacctgccaggatactcctgttcttgtgttctctctgccttcctgacaccccttaaacttaggtgatgccagacttccacacttggcccctgatcttcaggttcttggatggtctcatccatattcagggtttgctgctgcctctcaagaagaggctccaatcctgacccctgcccggttgcctgstagattccacaactccagacaaacccaccatcctctctccattctgttcctgttcttctctcggttaatggcatcgccaaccatccagtccccttccctgcagcctaggagtcatggacttctccctctaaccatttcatctctccctatacaccccagtgtaatcagtcacaagtgtggtattttatcttccaagtatttctcaaacccatctcgaagcgcagagcactgtatgctgtaatcatgtcagacagctggcttccctcacgctctccgcgacttctctgtgtccatgtccatgttcctgaagtgcctatgccgagcccgttccccaggccaagtgctttttccttgtgctccctgtcacacacccaggcccatctcccacctctcagcagtgtcttcatcctttaaatagaggtcgggatggtagccacctcgaggagttaagtattacattgagaagacacacttacacaatgctcaataaaagttattataacaaataacttcaagaaaagtgggatctctttcccttctgttaaagacaaaaaccttttgcagttattatcccagtagcttgtactgtgtcctccacagatgtaggacttagtttgaagtagctaaaatactgcttcacttttccaaaaatgtatgcccgtaccatgcagtcatggagggagaaactaaacagttttggagaggttggttgtggacagcaaagctctctttaacaataccctggacagaattttaaggcaaggcattgtgtttgcgaatcagtaagtattccctgagtgtttgtgtgtcttgccatttgttgtataagttaagcttgtgtgtttcctaatgggaaggatatgcttgttacaaatataaatttggtaaaccatttttaaagtgagaattttaataagcctttactagtgatctattttggtgaatttgttttcaggattaytgtgcaacaaagtggtccattttgcgggaacgctttgaccgaggactgtacgcctctcatgctgacctccacaggcttaagtaagtactagaaggtcaagcccagggcactcttaagaaccataatgcagtgttggccccactggcttgccacaccctggcctcagtccagcttcttctcactcactgttcttcccatctaccctgggcccctttcaaacgggacaaatacttgtgcccagacatattccgtatcttttttgttttggtcacttttactgtctcttacccctgaaattcccctgttcatacctttgcttgttcaagtcctgcccagacatcagagtccagccagaggctgtccctttccagtcttcctctgtcccctcaatcagacttcatccctttctctgagtctcaagaattcatcctacctcgccaatgcatttatcatgttctgctttttctgttgctttttaaaaatcccctttcattgtaagtcacttaagtgcagacactgtatcttactaattattgtatcttattacttgcttagcacagtgcttggcaaaaaataaacctctaataaatatttagagtcatagaatatcagagctgaagagaaccttcctaccatctcattttataataaactgaggtacaaagaggttggaacctgttcagtattcattcaaggagtacatggtgaaatgccagctggaaaagaaacctatctcagggatatatgacattatgccgagaccgggttcatgcactgattgatttgacaggtgaactgctccatgttgtgggaccagggatgtgaagcaagtacatcaaccttgaaacrcgcgcagttggtttgggagagccggcctgaggaagcccctgccccaaggctgcccacagagggaaggattgtgtgtgtgtgtgtgtgtgtgccatcttgacagagtgagtcagtctgacttgcctttgtgcttgccgtttgtaggtatcagtgcttcaaatcggcctggatgtttgaggtgtttcataggggcttttcgtttcctgtcaactataaaagcttaaagactgccttgcaagtttacgacaaggaggttcagtggacccttggagccatcctctacaggacccgctttctaccrttaaggtagggctgtgaatttgggaacgagaatcaaaaagatgcttttctgcagttacagcacctcatggcagctgtggtctgtggctgtttggggcattgctgttagagccggccacggcagaattgtagggacagtgacgtttgcttttggtcttgccccctccccacaagtgcttcctcccttctcaccctrccatcccgtaatacacagcactcctgtcctactgccctgtgtttggttattctcaactgtctgttccccagccccggcaaaagggtcagttccggggttcttaacctttatgactcaggcctcttctccaaatactgtttaaatgcatgtataaatacataggattacagaagaaaccatcatattgaaataataccaaaatattacagaaaacaagtttgtgatactgtaatatgtgttcttctctattaacacattaaataacaggatctggcagcagaattagcactttctgtaatttcagtgtagtcaatgagcgtcaatgatattttgaggcattgatgataccataatgggacatgaaagatctgtgattttcgttagtaacaaagttgyaggtgctgccaacgctaatgatagtttgttgtctgcattcatggtcaaagaaatgctacatctcagtcagcgcttgggtagaacaaagatgtgcgtttttccccattcacgtttgcagatctgctgtcagttgacctgtgctaagaacctgagttacctgatagatgagacatttgctcttccccccaccccctccatttaattgagcatttctcagcaacccttttaactgggttaactgtaaaaatggtgagtcatgggtgttactgatcacaagcatgcagtttgtttacatgttgacttctttgtatcagcgaaaccttcacggctcttctaaattcctctgattttggttgcccaaattataatgaccgacttcagagtatactttcacatgttatctcactgatacttagaagccccctgcattgggctgttccgttctccatttcagaggtagggttgcagttcctamagtgcagctctggggcctgggtcccgccgtccccctgtgcaccctttccacccctttccttgcttactgtcctgtttgttgtttggtgttcacatgggcagagacatccagcaggaggccttccgagccagtcacacccactggcggggcgtttcctttgtctacaaccactacctgttctctggctgcttcctggtggtgctgctggccatcctgctgtacctgctgcggctgcggcgcatccacaggcgcactccccggagcagctcggccgccgccctctggatggaggagggccttcccgcccagaatgccccrgggaccttgtgatccagctcacagctccacgaagactcaaaaggaaaagccatttttgcctcagggtttctcctctttattttcctgtggttttgttttttctttcccttttttgttcctccaaacaaaaacaaaatgcaggccgagcgcggtggctcacgcctgtaatcccagcactttgggaggccgaggcgggcggatcatgaggtcaggagatcgagaccatcctggctaacacggtgaaaccccgtctctactaaaaatacaaaaaattagctgggtgtggtggcgggcgcccgtagtcccagctactcaggaggctgaggcaggagaatggcatgaacctgggaggcagagcttgcagtgagccragatcacaccactgcactccagcctgggcgacagagtgagactccgtctcaaaaaaaaaaaaatgcattgtttataagccctgctgtctagaagtattgcgtttagccattttgagtacagcattaaattgaggagtggggaagagggaaattcacttgatttttgctgcacaggatatytgccaaaaataaatgagatttctggggtttctctaaggaatgttaaatttaaacacatgcactttgatactggagggaggtggaaagatgcattctgtcagtggagaggggactgaatagtgatgctttcatagaaccaaaaaacttactgcctgaaatgataatcctcttttttctctatcttgaaagctctaacctgaagagggtgatttttttttttatttattgttcaggtctgttactgtatatgttttctttgcaaatttaaattttttaaaccatttatatccaaaacagagaaacatgggcaccaggagataaccatttataaaagtgatagtgaactatcgactacagctttgtgygagtgtgtgaaaaatcccaagaaaccagcgtgaggggaggcaatgctggttctttaaaaacacacacttcagaatttactggtacattttatttagaaaaatcctcgttactgttatcttttcctgaccgcaggtaattacgctccttattccatatttcagtggcattagaacactgtggttttgaaagaattggaaattcctagtttcaccagtttcggttttattggaactagagcacatgcccacttcttgctcagtattcctcagtgtttctgcttaatcgtgcctcagtttcttccagcttccaattggtgtttcccccaccccccttaattaaaagtcatctcagcttttaatcgtactgggagaccccatgcacagcctgccgagtcctcttcctaaccgcattgactgaggctgttgctggcagcaccactgtaaatccagaagggaagagtctgcatccaatacaggaaataaattcacattttgaaggaaaaaattcgacaatttaagccaaaatctaaaaaggacaattggattggcatatgtgagattggtgttttttcacctatttatttagttgagaagtttggggaattctcgtacagtttttttaggtggagtttgttttgtgygagtgtctgtgtgtgctgttccctaactccagaacagttaaattcctgtagttggtagcagattagtacccagaagtggggttgttgctataacagataactgaggatattataaaagtggctttggaactaggtactgggcagaggctgggagagtttggagaaacaggagagaaaaggcctgtattgccatgaactgagcattaggggcagttctgctgagggatcagaagagaagaccaagggaattctgtcccagttgtggctcaractgcctcaggtgcagcytaacctgcgtctctggaaggtaaaatgcatctgatccttgaggcaagagctgtgggggcatggctccctcacctggatttcaaagcgtgttaccagcagcctggggacccaggctctgcctctggatttacctgcatcgtatttgcgcttcgtggtcaaagttgttaagaaaggggtgagcttctggctmcctaataagttggtcttggccacctgcctgcgacacttcctggaggagccatggattattggtggaggctkcagggagctggcgatggagccactggtgtcagcagcagagagggaagaaaggaaaggaaggggccacaaatggttgaagtgggcaggtgggcacccagggagttaggggaccccgccttccagctctgggcatagaagagttagtcacatacctgaggatcctgaaacaagggctgagaaaacctcattgctccagctgagaggtagtagtggatttgccatttttaaacagttgcctaagaaaaaacgttgaagaatatgcagcagacactatatgtggcctgtaaagcctagaatatttactaaaatatttacagaaaaagtttgctggtccttgtgagaacaatgcagttcaaaaaaggatacagacagaagcatcctcttaaatcaggaatgtagtttccatttgtgggcacgaaaagatggacaagagaagtaaccaaacttcaatcttaaaatatttgttgcaccagaatttcacttcggatttttccgtctagattattttcaagatgagttttgaaacaaaccaagaaacctgcccctcacccaaaattgtttaaaaagagaccactcaagggagttcattatgccrtatggagatgtctgcagtcgcagcaaatcacattccagagaaggtctcgcgtaggtgaagacagccaggtgctttctctaagagatacagggtgggtgagagacaagccagggaggatcttaattcaagagaagaattcataccaagagctgaccaagaaggcagtaaattctgtgtacttgtagcagaagaaattggactaggaacttgcccaaagctttatcaaagaaaagcattgtgttcaatcttggtagaaacatgccagcaataagtgcttatgttccatagccatatcatgggcttctcacttttaaacctcctccaggggatgttctcagacatttcacaatccctctggggacattacagtagaagagaaacacatggaactgtaccagtgctttttgcccatgttcatcctaagctccggctttaggcagtgctttctgacctgggcggagtgaagacgctgctggtggctgaggccagtaacatggggcccctgcccagccaccctgaaggctgggtaggtccctcttttcaccaccagttttccacayctgtgtactctagattaacaaactctggataaacagatatttacattttaaactcaggcctacacagagtagttttccttataaggagcatgtatcacttagcaagaaactaaaaatggcaaatgagtttttcatcctttaagaaaaraatcagctttagaattctctgcggtcagttgtgtgcaatgcaacaaaactacctttcagtaaattacttagttatttatttcagtgttttgtttcttttgatactaagtttccctttcaataatgaatgatgtgaccaaccaaggagaatttgtttgttctgtactaaaattatattttacagttaggaattataaaaagcaagggagcatctttaaatgttttttgtttaagcgatgtcttccatccaaagtaagaataatactctcggaaggtccttttggtgtcatgtcacttgctgtatgtggcagccttacagtgccacacttgggtactgaaaaatcaataaaacgaaagttcatcatcccatggcccgtagactgtgtgggcttgcttccttgtcatctttgaatcttcttactcattagaatgatgagttgaacttgagtccaaattcagtgaaatacattgtctgagtctgacgcacactctttgcatgtgttgtgttgggtgtgcatacagtgaagcacaattgtgtggggttgtggagagggcgtccacactctctgcagctcagaaagcagatatttcacaagtagtgaccaacccacgacgttaagccattcaccaacaataattgccactctgagatgactgtttataaggtcaccattttaagtacctacttgtatatagacaaggaaaagtaataaaattaaccaatttttatgtatttaatagtaacagcaaatgctgactttatgttacactgttttgcagttcgatctaagcttagaacctttggcttatttccagaaaattatgactgtcattattaatgttacgtgttaccaatatggaggatgacattagacgctcagcatgtttctcagccgttggagaatacatagatgttctcctggagcaggaaggtgggcctgagccataacctgaaaatagatgatagagacagatgggaagggaaggggaccagctgttaggaccaacaaaaataaaggcctgagacatgccggagaggagagggaagcgcaaaaacaaaatgagagaacagagccagcaaagtgagctcaagggaggtcctcaagccattgatcgctaggaaaacaggacacagcattaagatagaactgtcgtaaataatttttgaggcagtgcaatgactatagggctttttgcctgactttaaatacgttaaaatatctaagatgttaaaagacatctaaatttttattccacttggtggaagagaagtcagtgcctatttccaacactaaccatgttgacaggtctgaaaagccatggttctgtgtttttgttttcagtctgtttccatttgtcctatgaattggcatgtgccctgtgggtttttttggtttttttgagatccggaaatgctaatggtttgcacagagggggtcgtgaggtgcaggtcacctctgtcagagtcacagtgtcttcttttggaaacgtcatgaaaagacaaaggagtgcccggctaatcccaaagcacgccttggcagagtggatctgcctggagcatccatccgtggcagcatgaaaggcaatcctgtgagagtcttcctggccccacctcgtctgggagcatgtgggcctgtgatcccacctcctcctaacaaaagaagagtgtgtctgttgatgtgttttattttgcttttagccaggctagtccccctgcccttgcgcagtccagcctctttctattaatagatctattaaggttgactgagacctgctgcaggggacgctaggggcactttggccttcgatctttgcctttcacccttgacactgtttggcaggtgaacgacatccgggctccagacttcatggccacttcaacatttctgtcaacagcctgtgtctgtttcatgtaagaggcccaaacaagaaaatcaaggcttaagaaggatttctgccttgagtaaaggactgaaacctcctcacagaacacgatggtgacaggcacaaaagacagacttcttgtttaagtaggtgaactccaaagacgagagaaaaggagtttttttcctcccgttcaaccagtcatcaaataaacatctcaggcatctggtgttttgtcaagggattgggattccagtggcccctgtgtgactggaaggggaaaggtttgtcggtggcaacgccatcgaaacacaaaggagcagctttagaatccccagtgtgggtcttctcttgtgttatttctacaacgtccttgtgccagctgttcttgctgttctctcaggcttctaattgggagtgtgaatactacctttcaccctttttgccttcatgagaatcagagtttgaagtggacagttctgaaaatattaatcatcttttttttttttttttttttttttgagacggagtctcactctgtcgcccaggctggagtgcagtggcgcgatctcggctcactgcaagctccgcctcccgggttcacgccattctcctgcctcagcctccctagtagctgggactacaggcgcctgccaccacacccagctaattttttgtatttttaatagagacggggtttcaccgtgttagccaggatggtctcgatctcctgacctcgtgatccacctgcctcggcctcccaaagtgctaggattacaggcgtgagtcaccgcaccgggcctaatcaccttattcttgcctgtcattacacaagccttaaactccagggaccagacttagcactttcttttcctaagattgctttttctcccacttggcccaagctttaatacccagattttagactcaaaacacttaaaacatttggtgggctctcctcagccttgtaaagttctttgatactggtcatggcagcacaagagaattttctggaagttcctggctgtttaatgttcaaattacacgtttaaattctctcccacctcccgtggccctgttttccatcagtgtatctatttctggcccaaatgtccttgaacatggaccatgacaggtcctgtgtttactttccgtgtttctacatttataatccagtaaagaagacaccgagtagtacatagtattttgtaaatatttgtaaactaatgaaaatctggtttctttcacaaatcacctctttaggtttctaaaatttatgaaagaaatcttttaaaatctattctaggccgggtgcagtggcttacgcctgtaatcccagcactttgagaggccaaggcaggcggatcacgaggtcaggagtttgagaccagcctggccaacatagtgaaaccctgtctctactaaaaatacaaaaattagctgggcaaggtggcgggcgcctgtagtcccagctactcaggaggctgaggcaggagaatcacttgaacccaggaggcggagtttgcagtgagccaagattgtgctactgcactccagtctaggcgacagagcaagactctgtctaaaatatatatatattttattctcaatttttgctgttctttccagatgtgcagagttgtgtgtggttttaaaaccatatgcaatgtgccgtgaagggcgggatggaacccaggcctctgagtctcagttctctgttcacttccctccaccagagtttgttaagggagtgttgcattttaaagctttatttagaaaaacttaggaaaaccaagtttacctcaagtggtttccttttttcgcaacctgttcagccttgacagaaaggaaaaagaaatcccagaattaggtagtaataatagaggcaaagtgagattgatattttctgaagccctgcttacagaaaataattcctgcatatttattttattctaaacatagcttcagattgtttttcattctaagttgtccttaaaagtcactttttaaacctcacaagaagcaccaaatgtaagggggaaaggatggatttgactacatctaaagtaagactttctgttcatcaaagctaacagatggcagactaagaaggtatttgcagtgactgaaattgaaaagggattaaaatgtacaaagtttcatgcaaaacaacaagaaaaaggaaatccaaaagaaaaaaccggccatggatattaataggtgattcacagcaggggaaacccaaatggtgaacaagagataaactaagctgaagaaatgcaaatgtaaattaagacccactaccttatgcccctcagaattgccagacttcaagtgctggcagtgatgcggggcctggacttcaatattgctggtggtggtgcaaactgcaatgcgtaccccagaagggaagctggcagcttaaaagttagcagcgtgtgtgccctttgattcagagagccacttgcgcgtggctctccggagagatttctacctgggtccatgaatggacttacggaaggattccttggtaatgattctgagtgactgtgttgatggaggcaagcaaggtcttggacaagtcaaaggcggcaggtgcgtaccatggaatactgtatagccatgagagacagacctagaactatgaacagcaagcgggtggctcttaaaaatagtgttgaatactgaaagcaagacatgagaattgttgtataatgccattatgttaatgtagggcatacggcactgtatgtcctatgaggatgtgcatattttgattcaaatacattaaaatggacgttatggggacacagattatttatgaaaggaggagaaaagataaaactgatttccttgttttagggtgacctcacatcccagtgagcccctcaattcagggccagggaggttgattggttaccccaccccaacccaacccaggctgttttcagcacggcagcctgataagctgtgattcagaccttgaagttgttaggcaaaagctctccactcggctctgtatttgactcaggaagaactgaagtctttataatggcctagacagccctgcaccgtggcctcccactccacacctctctgaccgcagtcctcatttctccgagactccgctccagccaccctggcctcagggccctctcaggactttccatccccctcaccctgcttcactttcccccatgatgcttatgaccttagatctagtacactctgttttcattacgttctatgtacgactctccctattaccctactagaacatgagccagggggcagggggcttttgtctgtgtgttttcatgttgtatccccaggcacaggatctgataggcggtagacattcaataaatatctgtggaatgaatgaacaaggcaggatccttaaagcgagggggaatgaccaggctgagaactgagagagcatgctaaactccacagtctggccccagggatgggggcaggaaagatggcaccacctccttgctttattagagggaaagaaggtgcttcttgtgcagaaccgtcatcataacagaaagatagcttattacacgccaggcactgttctagctctttgttagcttacataatccctgtattagttcgttttcacactgctataaagaacttcccaagacggggtaattgataaaggaaagaggtttaattgactcacagatcagcatggctggggaggcgtcaggaaacttacaatcacggcggaaggtgaagagggggaaccaagacaccttggcaggtggcaggagagagaattaatgcagaaggaactaccaaacacttataaaaccatcagatctcctgagaacactatcacgagaacagcacaggggaaaccactctcatgattcaattacccccacctggtctcccccttgacatgtggggattgtggggattataattcaagatgagatttgggtggggacacaaagcctaaccatgtcagtccccaaaatgacaccatgaggaggtgctttgattaccgtcactttacaggtggagaaacagatgtggaaaaggcacacaacttgcccaaggtaccgaactagccagtggtggggctgggatttgaacgcaggcagcctggctccattctgtactctagagctgcactgtccagtatgacggccactagccacatgaaacaggccaatctaaactgagatgagctgtaagtataaaatatacaccagatttcaggccgggcacagtggctcatgcctgtaatcccagcactttgggaggccaaggcgggcggatcacgaggtcaggagattgagaccatcctggcaaatatggtgaaaccccgtctgtactaaaaatacaaaaattagccaggcatggtggtgggcgcctgtagtcccagctactcgggaggctgaggcaggagaatcgcttgaacccgggaggcagaggttgcagtaagctgagatctccccactgcactgcagcctggcaacagagtgagactctgtctcaaaaaaatatatatctatatctgtctgtctatatatagatatagacacaccagatttcaaagacttcatgtaaaaaaaatatgaaatatctcagtttctttacattgggtacatgagacatgacaatattttaggtatattgagttaaataaaatattattggattaacatcacctgtttccttctacctttttaatgcgtacactagacaactctaaattgcctgtgtggctcacagtatatttccgtcagacggagctgctctcggtacttgcttctcaaagtgtggtccttgaatcagcagcatcaacatcact

SEQ ID NO: 93245 - DNA, 44417 bp, Homo sapiens
  misc_feature (1)...(44417): n = A,T,C or G
tctgcggtctttgcttttccatataaatttgaaaaacagtatgccaactttctcacaaaaaaacttgggagtttggcaggaattgcactgagcctatggatcacatctcctcttccaggttccaggaaaccttccctcctcactagccccattaggctctctgtcccctctggtttcacactatccccaccccattctgtgggggtgatctggcccccttgactggcctgaataccgcaaaccacaagggtatgttcctttcaaaagtctccttcatgtctcttgcgtgtgtccagaccaagatctgactatgacgaccctgaaagctagatctgagtgacacagtcctcctgtctccactctcccctctacagagcccagagtgttgtcttaggaatccttggtagggctcttcctctaatcccctactcagtctatgtaacccttaaacaaacttaggccagatcatatccctaggtctattcaaaccctccccatggttccccagcttgtccaaagaaaacccacgtcctcatcatggtcttcgagacccaactccatctgcaaccaccccactccatctgcaacccctcacctcacccctcctcattgcctctgtgactccatctcctctattctacacactcactcgaccgcagacactctggcctccctgctgttcttcaggtatgccagacacagtcctggttcaagaactttgcatttgctgttccccctttctgaaacatacttcccctagttatgccctgtcttgctccttcacttcgttcagatctccgctcaaatagtatcttctcagtgaagcctcccctgaccacccaatataaaattgcattgtcccctacctatactcccaccttcctctccgtttgattttcttccaaccacaacagttgttgccatctaacatactgtctattctttattgtgttaatgtctatgtccctccctaaaatgggacctcatgtgggcagagctctttacctgttttgatcaacagcacctagaacaaatgtctaggacactgtgggtgttgaataaatatttgttgaataaaagaactgagagagatgagactcatgcccagcccagactctttttttttttttttttttttttttttgagacagagtctcgctctgtccccagtctggagtgcagtggcatgatctcagctcactgcaacctctgcctcccgggtacaagcgattcccctgcctcagcctcccaagtagctgggattacaggtgcccgccaccatgcctggctaatgtttgtattttttagtagagatggagtttcaccatgttggcaaagctgatcttgaactcctgacctcaggtgatctgtttgcctctgcctctgcctcccaaagtgcagcccagactcatgtatattcacttgttgagactttgggtggtcccctccccagtccaggcctgggtttctacattggtaaaatggggaagggtgtgtgtgtttttaagggcccatccaactctgctgggtgtgatggggaggctgtcttgagaaaagggtgtgctgccccctcgtgatgaggcagactcttccccaggaccatcaagtcttaggcttctaactcccaaccctgcctggaaatacatgttaggagggcactccctgccccggagtcaccctttctgctgtctcacctccaccaacccatccccgccctcagcattcaaggcctgtgaaggtcctcttggtctttgatgcctttcacaccaattgcccttcatgtcactgtgaccctgtgttatgggctaaatgtgccccctccattactcctcatttcatgtttgaagtcctaacctccagtacctcagaatgtgactgagtttaaaggcagggtcaccaggcccagggataagatggccattaacaagccaaagagagaggcctcagaagaaaccaactctactaataccttatctcagacctctagcctccagaactttgaggaaatacatttctgcttaacctactcagtatgtggtactttcctatggccactctagcaaatgaatacaccctggaactcacagaatactttatttcttttgttgtagttcaactccagaagcaccatgtggggacaaggtgttcccattccacctcgggagtagaggccaggggaaggaaaggcagtagggccaaagctatcactgtaggaagctcatgagatagggacccatctgcccagctctcctgaatcctggagcctcgccagagctccctcttgcatctgcaattccacctgcctggaatgcccatctctataggtcttctctgtcttgcaaggcccaatttagggcttcctacttctccccttcctctctcacttcctgttccagcccatactgaactgcaacagcttaatcctgaccccttgctggcctcaagtttgggtcctgggctrtctgtgtcctgtggccaagcagccgcctccttctttgctcagtaatgctatgatgtagtctcccaattcccagcctgctctggactcagctgttgtgcctaggtcttgcagctccctcatggctgaccactgcctcaccatcagaaagccccaaggtaggctgctttatgcttttgtattttacttactacaaattgtgttcgggcagttttgcaggttgtaggccttcccatactttctttcttgtgtttgttttgagacagagtcttgctctgtcacccaggctggagtgcagtcgtgcaatcttggctcactgcaacctccacctcccaggttcaagcgattgtcttgcctcagcctccctagtagctgggactacagccacacgccaccacacccagctaatttttgtatttttagtagaggtggagtttcactatattagccaggttggtcttgaactcctgacctcaagtgatccgcccgccttggcctccaaaagtgctgggattacaggcgtgagccaccatgcccagctttgcccaaaatttctctatctctgtccaggtgacctcaagatggtcttccaggctgggcgcagtggctcttgtctgtaatcccagcactttgggaggctgagacaggcagattgcttgagcctaggagttcaagaccagcctgggcaacatggcaaaaacccatctctacaaaaaatacaagaaaaaattagccaggcctggtggcacacgcctgtactccagccactagggaggctgaggttggagaattgagtgagctcaggaggccaaggctgcagtgagccgacatcacaccattgcactctggcctgggcaaacagagcaagactctgtctcaaagaaaaaaaagtcttccagaaacaagctcttctaagatgctggaagaactggcaaaatttttctttctctttaaataaattatttgcaaggtcttatattttattttttttaaactgtggtaaaatatacctaacaaagtttacaatttttcttttttttttttgagacagagtttcgctctttgttgcccaggctggagtgcaatggcacaaatcttggctcaccgcgacctccgcttcccgggttcagcgattctcctgcctcagcctcccgagtagctgggattacaggcatgcaccaccaggcccggctaattttgcatttttagtagagatggggtttctccctgttggtcaggctggtcttgaactcccaaatcaggcgatccactcgccttggcctcccaaagtgctggaattacaggtgtgagctaccgtgcccagccacaaagtttacaatttcaagcatacagttcagtggcattaaattgttcagattgttatacagccattaaacagtaactctccattctcccctcccctagcccaacagacaccattctactttctgtctccataactctgactaactaggtatctcagataagcagaatacagtatttgtccttttgcaactggcttatttcacttagcataatgtcttcagggttcattcatgttgcagcatgtaacagaatttcattcctttttaaggctgaataatattccattgtatgtacacacatcatctttattcatgcatccatccatcactgcatggattgcttctcttttggctactgtgaaatggtactgctatgaacattcatgtaatttcattttcttctgctctaactccaactggaatgaagctaggcccttgactaagtcttgaaagggtttgaggtctcacaacaaagkgacctgggctctaccttgtgggtgaagcctgtcttagaatcccagatcccacccacatcccacggtctccataatttttctttttcttttcttttttttttttttaacacatggtttcacttttgtcgcccaggctggagtacaatggcacaatcacggctcactgcaacctctgcctcccgggctcaaggttcctcccgcctcagcctcctgagtagctgggactacaggcgtacatgagccaccatgtcctgctaatttttatattttttgtagggacggggtttggccatgtgggctaggctggtcttgaactcccgggcttaagcgatccgcccgcctcggcctcccaaagtgatgggattacaagcgtgaaccaccgcacccggcatcgtggtctccacatttcatccagaacgagtcaaaggccttgacctcgagcttaacacggacctgaacctttgctcttcccttgttttcccttatcagtaaacagccccacagccacccacctgcacaagccagaagcytggaaatcatattcgacgtcctcatgcccttacatccatccattccaagttctgatacttttgtctccaaaatattcctcaaatatttctcaaagtgggcaaaatatttctttgctcactttttacttccctctgctccaagccacaatcacctgtctcctggaagactacaaaaggctcactgatctcccagctcgcacttttgcactcactatctccaggccattctctgttatttctattgttactattattattttgagacggagtctcgctctgtcgctcaggctggagagcagtggcaagatctaggctcaccgcaatctccgcctcccaggtcaagcgattgaacctccagcctcagcctcccgagtagcctattatttatttctaaaagtaggtgatacagccatatgatttaacaattcctgctctataggtcccctctccagaggcaacaggtgctctccattccgtggtctccttccagatactgtgggcgtccctgggtgctcacctggccgtataccttcccccacccacttccccacagggcccggggcctcctcactccgcttgagaccctccatccaggcgctccctccctatcgtccgtctcccttgggcactgcccggcctcccaggctgggctgagtaggccagtctccggtcagtgattctgttccaaagctcgaaagccttcgcagcactgggactgaaacccccagctctcagccccgactccttcaggccaggtgctccctccgcaccctctctaaggcccgttttcgcgtcatctctttccagcggcccgcccgccacgtcatctctaccacagcaccagtcctccacggctcttgacaatacgtgggagggcaagttcataggtgaggtctcatgctcttcctaggagggaggagcgcggcgggcgggacccgcagctgggcttggcccgggagcggggaataagctcgctccgcgcctctcagtttagtggatgaagactactatcccagaagccgtttcgcctcgggctggcgagctcctccccgccctactccctccgcgcgaagaagactgagcatgcgcaacagggacagcgcctgcgcaaaagactacgcgagcgggtggctgggttcactgcaactcccggcaggccgctggcatttttcattccctcccgtgaccagtgacttccggcacgaaggggcggggctgggctcgtggctgagccagcagctgcagcagctacgggagtggccgggtggccggcgggtgccagccgccatggaggccgtgccccgcatgcccatgatctggctggacctgaaggaggccggtgactttcacttccagccagctgtgaagaaggtgagcttgccttccatcttcccccctatccgccgcgtatctccgtcgtctgcaagcgcgtgacgcccccctgcgcgcccatcacctcctcaggcccggtcgcagggtccggtgaggccaggaggggccttcgccggttttcctcagcctgtcccacaccccggcgcccgcaggccattcttctcctccccgatagccccgtgctagcacctgcatcttcatctgaacccggttcccgacttctgccccgagtcatccgctgttcccactgaggcagcacacttcctccttctgacgctcggacccagttctgccccgcccctcctccatgccaggaccgccccgcgcgggagcggtgggcggccctgaccgtgcggattcttttgctgcgcccggccctcggtgcgctgtcaagtccacgcccgcctgggacagacactggggatggctcaggggcgtgtgtttaagacgtgagccccggtggcccagggagatgcccgacccctgcggtgagggtttgttttacaattgctgcgattctgtatggtctcccattcgggagtctctttggaccaaacaatacaatcccacgacatttttaggagggttactgcttttcgtaaccgactggagggcataaacagtgttgtagagctcagagaaatcttactgtgttggaagaacagacgggcaggtttggcgttgactaaggcaaggaacttctgtggagaggttcaggtgtggtgattgaacacaggtgccctccgagacatccgctgtattggtagcactgagggctagagcagaaatgaaaaggaacaaccaggaggccgtcgcaggtggggggccttgtgggcttagcacagcagatgccagagtaagccccaatctagatggtgcaccacttagcgagacgcttgggaagacaaataggaaaaagaaaatgggtttggaagtagtttcccaagaagctgtctcccctctaatcgccatacaccattgccttagttcagacagtgtttgagtccatcatctagcctcttggggccaggaaatgagggtaattgatccaaaattctagaattttgttaacggttatccagacgttgctctcttcttcatctgctgtttctttttcctacctttttttttttttttgagacggagtttcgctcttgttgcccaggctggagtgcaatggcacgatctcggctcaccgcaacgtcagcctcccgggtttaagcgattctcctgcctcagccttccaagtagctggaattacaggcatgcgccaccatgcccggctaattttgtatttttattagagatggggttttgccatgttggtcagactggtctcgaactcctgacatcaggtgatccgcttgcctcggcctcccaaagtgctgggattacaggccttcatctgctgtttcatacaaatacaattggatgaatttttytaagacacaacagaactcctgttttctttttcttttcttttttttttttttttttttttttttgagacggagtctcactctgtcacccaggctggagtgcagtggcgcaatctcagctcactgcaagctccgcctcccgggttcacgccattctcctgcctcagcctcccaagtagctgggactacaggcacccgccaccacccctgcctaattttttgtatttttagtggagagggggtttcatcgtgttagccaggatagtctcgatctcccgacccgtgatccacccaccttggcctcccaaagtgctgggattataggcatgagccaccgcgcctggccaaaactcctgttttctgttttacagaatagatccggtatcttttttttggagacggagtcttggaatagagccagtatctttagttttccattagagttcttccagacttatcccacttctttcagcatttattgagtccccactgtgtgcttcatctactgtgtgcatctgatagaggtaccctagattctgttctcagtcacttgctgtttccttaccatactctgtttcctcttctgtgccgttggtcatggaattcctcctgcctagaagaggtctcattttgccctgtggggtggtgaggtgcccttcttcaatctccgtgaattccattttcttgtctcccatccaactttcaaggtctacttaagctctcctttctgcagagcctttcttaatctttctacctggattaatctttctcttctcttaattccttaactcttttcatcctttccctggtgacagttatgtatgctgtgttttaacccccctgttcaagtgtgtgttacctgagaagcatctctgtgttccccagagcctaacagtgtaccctctacatagttggcagtcagaaaaatagttctcaaatgattgaattacagctgagcggaaatttagagatggtgaccataaatatatgggaatgcagtagataaaatcttggcccagaaactcctaggaagtatttttgtttgaacttagcctttgctgctctgacgattcacaccgacccaaagggtattgtgtgaccagtgacttccctccatgcacctgggcctccaggagaggagttgctcattagccctttagcccgaggtggtatcagatatgaaacaattaytcctatagacactggaggagactgtgcagacaccactgcagcctggggactcttcccaacctgcacccccttccccaactgcagagccccttctctgccttctgccactggcacccttgtcctgctttatgcttgctctgagctgtgggaatctctgccagtgaattggagctgagggttagaatttaatttagaatagaagggtgaaaattggttctgtttacatcaactggttaagtactatgctgaaccttgataagcagacaagtaagagacagccttttttttttttcaaggaattcataaaggaaatttaaaaattatagtgatgacattaagagtagaagtatttgtaggccgggtgcggtggctcacgcctgtaatcccagcactttgggaggccgaggcgggcagatcacgaggtcaggagatcaagaccatcctggctaacacggtgaaaccccatctctactaaaaatacaaaaaattagccaggcatagtggcgggtgcctgtagtcgggaggctgaggcaggagaatggcgtgaacctgggaggcggagcttgcagtgagccaggatcgtgccactgcactccagcctgggtgatagagcgagactgtctcaaaaaaaaaaaaaaaaaaaagagtagaagtatttgcagtgtatagaaataccagcctgaggaggggccatcagggaaggcttgccagagatggattttaaaggatgaataggagttttccagacaggtaaaggggttcgttgtttgagagggctgggcttttgacaaatctttcatggtggctagtattgattttcactcccagtagacaagccttccattatggcataatgtgaaatagaagccagaaaaacaggatggttttgaactgcagtggcaaactttaggttaggatattggacccgtgtgaatttttttttttttttagatggagttttgctttcgttgcccaggctggagtgcaatggcaccatcttggctcaccacaacctctgcctcccgggttcaagcgattctcctgcctcagcctcccaagtagctaggattacaggcatgtgccaccacgcctggctaattttgtatttttagtagagacggggtttctccatgttagtcaggctggtcttgaacccccgacctcaggtgatctgcctgcctcggcctcccaaagtgctgggattacaggtatgagccgccacacccagccagacccacgtaattttttagtggggaaatgctgctggccttgcatcttcttaacttgtgctttggaggccagagtgctgattcactggaaactgatgatggatgactcttgtcctctttatcagtgagtgatttggcctcaggtatttctgtttgaagttctttattctttctggcccaaacacttgcccttaaccagctgtacttgagctcaagtccagcttacttggactgagctgttacgttcatccctgattcattcattgaacaaatagttattgagtgcctgtcatgtgccagccctgggtacagtggtgacaaaaacctgtgtcttggctgggagcagtggttctaacctgtaatcccagcactttgggaggctgaggcaggtggattgcttgagtccaggagtttgagaccagcctggccaatatgatgaaaccccatctctactaaaaatacaaaaattagctgggcatggtggtgcgtgccttgtaggcccagctacttaggaggctgaggtgggaggatcacttgaacccagaggtggatgttacagtgagccaagatcacaccactgtactctagtcagggcgacagagtgagaccctgtctccaaaaaaacaccacaaaaccctgtcttcatgaaacttacctcctagtaatctacacagtaaccctcatcctcaagtgcaggtgtacatctggctggtagccaccctgcctgtcacttggcttctcttcatctcccatcctcccactctggctgagttgatctctaaatctctactttcccatcaggctgctcatggcctgtccccagcttgcttcagcctgtctctctaacttcactccccagtcctctcctatgagaactttcagcttctcttccttccacatctggtcactgcccttgctcaggcccttactggaattcccttcctcctgtttatcacatgggttgaactgtacgtcattagggtcctctcagccacccagcaagtgtttgggccagaaacaagaaagaacttttccctcctctgaattcagactgtcttgctgtccaccactgggttagcctgcaccacagagtgcacgctggtttttttttctttttttttggagacagagtctcgctctgtcacccaggctggggtataaatggtgcaatcttggctcactgcaacctctgcctcctgggttcaagcagttcttgtgcctcagcctcccgagtagctgggattacaggggtgtaccaccacgcccaaccaatttttgtatttttaatagagatggggtttcgccgtgttggctaggctggtctcgaactcctgacctcaagtgatctgcccacctcggtctcccaaagtgttgggattacaggcatgagctaccgtgcccagcccacagtgcacactcttgttgccttttttttactgttcattttattcacatccgggtagaagcctggtttttcaggcttatggaattttttccccttccagattttccatgggatggctggctcttgaaaaactagcttgcacatgtatgtacatacacagacacatacatagaaaggtaaataagaggactagaggcctaaaaggcctctggctgctcagcagtgaggggcatgggacattgcctgttacctgtggtggtgacctgtcttatctcttgtcacagatttggagtcacccagttgcctgagcctgtctgttcacttgtatttgcagcggaacagctccaggcacagatgacctggattgtccattattctctgacttgaatctcatacaccagaggcctatatccatttcagttagagtttagaccagattctttcctttactcaggacgtaataaaatatttgtatatagggagtgcttaacaagcattggttgaatgacctagtctagttctaggaccttctgggagaggtaacctgagtcttcctcactgtgttgttcagacaggcaaggggccattcagaaaagatgtgggaacgaggccttgagtattattgtagggattagacaaggggaggatgaaggtatgtttttatccccagtactcttggcctatggcggttttctttcaggcttgctgacatggaccaaggagctgaagatttcacttggcaatacgccattctctgaatataattagtctcatttgaaatttagtagctgaacatatactgtattaattaacaatactggtcaggcacgttggctcatgcctgtcatcccagcactttgggaggccaaggcaggaggatcagtcaagaccaggagtttgagactaacctgggcaacaaagcaagaccctgtctctacaaaaaaaaaaaaaaaaaaaagaaaggtcaggcgtggtgtggtggcacacacctgtagtccctgctactcaggaggctgaggtggggggtatggcttaagcccaggaggtcsaggctgtggtgaaccaagatctcgccactccagcctgggtgtcagagaccctgtctcaaaaaaaaaaaaaaagtttgtttcttagagtagcccaaggaatgccctacatttgagtcaactctggaactggagaaaaaagaaacataatgtaactggtgaataaaggtaaaactaacacatgtgatgccttttaattgccttttcttcttgtcttattgctttaattagcatgatgaaattccaaatgttaaattaagagcaaagcatacatagaagaatgagaacatactagtacaagagaaggtgacacagagggattaatattaggtctggagtcaggaaatctgtcttggggtcctagcactatcattgcttatctgtggtttgccctttctctaatctgcaaaatcatggcaggaccaggatggttgtttccagtgatctcacctagctacaaaattctctactgtttggtgctcagtaaaatagcagagtagcatcatggaaatagcatagctattggaatcagaccttggtttaggtcccctctcattcctttaatagctgaatgatcttgagctgtcacaaagattacataactaatgtagtcctcacttttcttacctgaaacatggaactaataatatacctcataagcttctgagaatcaaaattaatgcttctaagttcttttttatttttatttttttagagatggggtcttgctgtaacacccaggctggagtgcaaaggcacgatcttggcacactgcagcctctgcctccaggtctcaagtggtccgtccacctcatcctcctgaatagctgggaccacaggcacgcaccactctgctaattttgcttatttttttttagagataaggtctcactgtgttgcgcaggctggtctcaaacacctgggcttaagtaggtatataagtatatacacctactatgtacccacaaaaattaatggggtacttgatatggccaaacaggtatagtaatcacatcagggtaaatggagtatccattaccacaagcatttatcctttctttgtgttacagacaatccaattatacttttatttttaaatgtaataaattattgctgactatagttaccctgttttgctgtcactactagatctttttttttttttttttttgagacagagtttcgccttgtcacgcaggctagagtacagtggcacaatctcggctcaccacaacctccgcctcccgtgttcaagcgtttctactgcctcagcctcccgagtagctgggattacaggcacctgccatcatgtccagctaatttttgtctttttagtagagtctgggttttgccatgttggacagggtggtctcgaactcctgacctcagatgatccacccgccttggcctcccaaagtgctgcgattgcaggtgtgagccaccacgcccagcctcaaatactagattgtattcattctatctaactatatttttgtactcattaaccattcccactccactcccccaccccactcccactacccttcccagcctctggtattcatcattctactgtcggtttccatgaattcagtggttttaatttttagctcccacaaaaaagtgagaacatgcagagtttgtcgttctaatgcttgttaagttcttagtacaggtcttggcctattgtaaacaatattttcacctgagcatcttccttccctgtttgggaaataactcgaatccttatgacagctctgagctagacgtagcaagtgatattaaccccattttacacatgaaaaaagccaagcctaggctgggcatggtgactcatgcctgtaatcccagcgctttgggatgccgaggtgggaggatagctggaggccaggagttcgagaccagcctgggcaccatagcaagacccctgtctctacaaaataaaaataaaaattagctggggccaggcatggtagctcacgcctgtaatcccagcactttgggaggccaaggcgggtggatcacgaagtcaagggttcgggaccagggcctggcgcagtggctcacgcctgtaatccccgcactttgggaggccgaggcgggtggatcacgagatcaggagatcaagaccatcctggctaacacggtgaatccccgtctccactaaaaatacaaacaattagccaggcgtggtggcgggtgcctgtagtcccagctgctcaggaggctgaggcaggagaatggcgtgaacccgggggggtggagcttgcagtgagctgagatggcaccactgcactccagcctgggtaacagagcgagactccgtctcaaaaaaaaaaaaaaaaaaaaaaaggagttcgagatcagcctagccaacatggcaaaaccccatctctactaaaaatacaaaaattagctgggtatggctgcatgcacctgtagtcccagctacttgggaggcttaggcaggagaattgcttgaacccaggaggtggaggttgcagtaagccgagatggcgccattgcactccagcctgggtaacagagcgagactccgtctcaaaaaaaaaaaaaaaaaaaaatagctgggcatggtggcacacagctgtagtcctagccacacaagaggctgaggtgggaggatcacttggagtttgaagcttcattgagctatgatagtaccactgcactccagcctgcctgacagagcaagacaatttaaaaaaacaaaaaacaaaaaccaagcccagatttcacagcaactcaggggcactgtttcccacttgtaatctggtaactcctttcttttctttttcccctcggtggctgtgatccctggacgtgccctcactgagagctctccacgggtcttttattccttcagaaaaggatccccagctacttcaaagcctggctgtttttggaggttctctggtcttcttcctgttagttgtgtaggtactggggtcctgtcagggcctctggttctttctcctcgtctgctgctgggcctgccttctcagcctccattggagcttcatacttcccgctagactgttccgagttctgcagagtcccagaccatagcgaaatggggacaaggtctctgtcccttactccaggaacttcacccagcctctttcttcttttttagtggaggagtgatcagcagtcacagaggattttgttagggttttaaaaacatccttttgcttctaacaggctgcaaataataataataacataaatatcctggctgctccactgactcactgtgtggccagggattcattttctgtgcctgtttttcagagttgtttgtaagaaccatatttttaaaaaatagaaatgctctgggaggctgatgtgggtcaactgcttgagcccaggagtttaagaccagactgggcaacatagtgagactcccatctctataaaataaaaaaaagtttgggcgtgatggctcatgtctgtaatcccaacactttgggagtctgaggcagaaggattgcttgaggctagaagttccagaccagcctgggcaatatagcaagacactacctctacagaaaattagctgagtatggtggtatgtgcctgtagttccggcttcttggaaggctgaggcaggagaattacttggacccaggagtttgagactgcagtgagctatggttgcagtaccactgtaactccagcctgggcaacagaacaagaccttgtctcgaaaataaaataaaacaataaaaaataaactaaaaacaatttaaatagaaatggaatggtctaatatggaaagaacatgggctctggagcccaaatgcctgggtttcagtcatatccccatcagttattagcaccgtgaccttggtgaataccctaactctttgcctcagtttcctcatttcctcatctgtaaagtggtgatgataatagtgtctacctcttagggttgttctaaggatggagtgattactaggcactcagcacagtgcctgacctgtggtaggttctcagttaagcatctgctgctgatcttataggaggacggagatgagattcagatagaatgtgacctctaggcatgatttgctaggggtgggagcagcatctttctgtcaccattgtgtgaacagcagggtcagatgttcctagtgatatcacgggaagccttgtttctaggatgtaggagtctcctgtccatctgattcctttggcctctatcccacgagacctctgagctacacttttactcattttctctaacctaagggtgggcaaaacctcttactgcaagggagttaaccacagaacattctctcatatagtcaagttttacctcatagcttaggccacattttaaaaaatattttagttaattaattatttttgagatagtgtcacactctcacccaggctggagtgcagtggcacaatcatggttcactgcaaccttgaactcctggtgtcaagcagtcctctcacctcaacctcccaactggccaagagtataggcgcacaccaccacacgtggctaattcttgtgctttttgtagaaatggggttttgccatgttgcccaggcttgtcttgaactcctgggctcaaacgatcggcccaccttggcctcccaaactgctgggattacaggcatgagccactgtgcctggcctatttttattttttaatacagacagggtctcactctgacaccccagctgaagtaaggtggtgccatcatagctcactgcagcttcaaactcctgagcttaagcagtcctgcctcagcctcccaactagctgagaccacaggcatgcaccaccactcctggctaatttttaaattttttttcgtagagatgggggtctcgccatattgcccaggctggtctggaactcctagcctcaagtgatcctctcaccccagcctaccaaagtgctgggattatagtcatgagccatcatgcccaacccaaggccactttttgtagttgtgtttttgttgttgttgttgtcataattatttttgagggagggagtggagagggggtggagttggatagatcagagtgaagattgttaaatgcctgtcagctccctaaagttcttggtaaatccttatgtttgtgcatagttgaaaatttctagggggatttaattcatggcttttatcatattctcaaaggacccacaaaaggctaaataaaaaccactgataggggaaagtggtattcaggtaccatttagctcttcagcaactcttaagacatttgttttccaaatttcaaacatatagaaaaattggaagaataattcagtgctcacccaaattctcactatctagtatttttgttttgttttgtttttagagatgggatttactctttgttgcccaggctggacttgaactgctaggctcaagtgatcctcctgcctcagcctctggagtagctgagactacagatgtgcgctgcacctggctgattcatttttaaatttttgtagagatgggatttattgttatgttgcccagtctggccttgaactcytggggtcaagtgatcctctggcctcggcctcccaaagtgctggaagtacaggtgtgaaccactgcacccagtgtgttacctagttttgtttgtttgttttgtttttttaagatggagtcttgctgtgtggccaaggctggagtgcagtgttgtaatctcagctcactgcaacctccccctcctgagttcaagcgattctcctgtctcagcctcccgagaagttgggattacaggtgcccaccaccatgcctggctaatttttgtgtttttagtagagatggggtttcaccatgttggtcaggctggtctcgaactcctgacctcaagtgatccacctgccttggcctcccaaagtgttgggattacaggcataagccactgtgcccggctacctagttttgatggatgtatttcaccttatttgttttctctccagatagatagatagatagagagagatcccacaagccctttgaaagtaagttttggacatcacttttcccggacacatctcagcatgtgtttcctaagagtgaggacattctacacaatcacaatgttattatcatacctaagaaaatctacaataattttcccctatcttttatgacttttccttttttttgcagactcagatccagctggggttctcatattgcatttagttgtgttctgtccctttaatcacttatttatttgtttatttattattattattattatttttggaaacagactggagtgtgcacacagctcaccacagcctcaacctcccaggctgattctcccacctctccctcttgagtagctgggactacaggcgtgggctaccatacccagctaatttttttttttttttttaatttgtagagatagggtctcatgttgcccaggctgctctggaactcctgggctcaacagtcctctgacctcagccacccaaagtgctgggattacagacttgagccaccatatccaacctgtttaatcatttttaatctagaatagtccactgctcaaccccctccttttacatgacattaattttttgaagagagtgggttcattgttgccccattttctgaatttttctgagtgtttccttttcgtgttcatctgtcctctgcatttcctgtaaaagcaatcatttgctgagtatacaacacatctgataaggcccctaccattccttaatgcttattgtttgaggctggggtcactggcatgaccctgccgtcggcacacagtatgttggaggcatgtttggaatgtgagcggaagagcagctaatgttcaaggcagtgacatttcggctgagtcttagtagagaaagtagggacaatgtagataggcattgatacctgagagcagcaattcccaagtactattggctggttgtccctgggaggtgccagaggaaaatccttgaaggttgtggggagcaggttgtttatttttgtagagacgggtcttgctcttttgcccaggctgatctctaattcctgacctgaagtgatcctcccaccttggccacccaaagtgttgggattacacgcttgagccacctcacccggccaggaacaggttgtgcagggtcataaactctgtgccaaaattagatttggtcctagaggctttgggaagctactgcacacattctttttagattatatatcatttcctatcatctcactgtcctgagataagcatgttttggtctatcttctccctaagggtgtgtgtgtgtttcagaaggatttaaagctggaagtgacctcagagttgtgctagaaataacaattctggccacttggtaagggacggatttgaaggggtgggttgtccaggacagaggtggcatggggagagagaaaagagcttatggacacagggactttcaggagctgaaaccaacagaagaaccagggttagactcagaggtttgggaaagggttgcttgatgctgtaattagctcagctgtcgcctccctgccatctgttcctcttctccctttgctcaccaggcagacagaagctgtcacccaggcttcccggttcccatgtggctgattccttagctatgcatcctgggtcctgggaagggacctcaggaaagatgggtgggccacacacatggtgtgagtgagtgtgctcccagacagagcaggctgcctcatctcagcctttctcagccacctctctctaccttgcaaaccttggtcatggccttaaggagccctgtgaggtgggtatcagtgctcatagtgtttgtggcgtgagtggatctggcctcccagattgctagccaagacaccagcagcaagtactgcaacagggacagttgcagttgccttagtctggtgatctgagttgaacagggggccctttgggctaagcctgtgcctccaggtgggtgtgtatgctcactgtccaagacagtctgctctggaggtggtgagtgccactgtggacaggcactccagtgctctctctgatgtgggtagtgacctccccttctcaccttctcccacctgggccattctcctcacacagctgcaagtctttcctcacagatgaggacactgcagatcacatrtttctatgctgtcctttcccaggccaggagaatgggttggtgagagaggctttctgttcccactcttgtttggtgcctcttgcctgcagttgctatcagcttagggttatggtagtcaccccacaacgcagcagggcccaatcttctagggaggcttgagttcgtgaccctttctggaatccttattaggaccccatttcagtccgctgagttccttggcttcctgagctggcagactcctggactttgtagagagactgcagcgttaggaggacctgccagagtgttggtgcagggtcamggctctcgtggtcagcattttggtgctgcctgttcaggaggcgaagttcctggtggtccaggagacacgcttatggttgtaggtctgcacttaatcctgagtcctggttggtgcttgcccaggactcagagggcaaggcgggggtcttctctgccactggcttatgttcttctctctctgtagtttgtcctgaagaattatggagagaacccagaagcctacaatgaagaactgaagaagctggagttgctcagacaggtaggaggatagtattatctttttatgcatgggtagacaggattggtttgatagggagataaagaaactgcctaggctgggcatggtggctcaacgcctataatcccaccactttgggaggccgaggtgggcagatcatttgaggtcaggagtttgagaccagcctggccaacatggtgaaaccccatctctactaaaaatacaaaaattaggcaggtgtggtgtcatgtgcctgtagttccggctactcaggagtctgaagcaggataattgcttcaacccaggaggtggaggttgcagtgagctgagatcatgccactgcactccagcctgggtgatagagcgagactccatctcaaaaacaacaaaaaagaaaccacctggccctttctagcttttgatgtaaagtgaaagacagctggatgtgtgactcatgcctatgatcccagcactttgggaggccaaggcaggaggattggttcctcctggagttcaggcccaggagtttgagaccagcctcaacatagtgaggccctgtctctatagaaaacaaaaaaaattagccaggcatgatggtgcacagctatgtccccagctacgcaggagtctgaggagggaagatcacttgagcccaggaggttgggactgcagtgagccaaccatgttcataccactgtactccagcctgagtgacaaagtgagaccctgactgtttagaaaacaaaacaaaagtgaaagatgtgtgactcttcctttcacttaaacacttaagaggccattgtaggttattaattggcctaatttcaatattattgtgtctcagggaatagggagcctgaggagagggagagaggcaggaaaaggccagccagtgaagcagtgagaacacacggaacatttataagtctgccgtcttctatgggtgcaattcatggcaccaaaaacaattataatagtaacatcaaagatcactgatcactgatcaccataacagatatataataaaaaagtttgaaatattgtgagaattactaaaatgtgacacagagtcatgaaatgagcacatgctgctggaaaaatggtgccgacaggcctgtgtgatgcagaattgtcacaaaccttcagtctgtaaaaaacacagcacctgtgaagtgcaataaaatgaggtatgctgtatttttttcctgattattgtatgtactattggataacaacatgttttcccttatgtttttgttagaagggtaagagtctgcactggcatggctgaacttgagtaccagtaatgtagatacatgccatagaaatcagtagctgttagtgttttcttgtctatcatggaccacataccaatccttgcaataacccagcagtactagcaactattgccagtatactacccatcagtaaatttttggatacattttcatttagtctactgagtgaagatattttcttttttctttttctgagacctagtcttactctgtcacccaggctggagtgcaatggcgcgatctcagctcactgcaacctctacctcccaggttcaagtgattctcctgtctcagcctcctaagtagctgggactacaggcgcccaccaccacgcccggctaattttttgtatttttagtagagacaggatttcaacatgttggccaggctggtctcgacctcctgacctcaggtaatccacctgtctcggcttcccaaattgctgggattacaggtgtgagccaccgcgccccgcctggtgaagatattttctatgtcagttattcaaaattagtacaaggccaggtgcagtggctcacgcctgtaatgctatcactttgggaggctgaggcaggtggatcacttgaaatcaggagttcgagaccagcctggccaacatggcgaaaccccctctctacgaaaaatacaaaaattagtcgggcatggtagcagcgcatgcctgtaatcccagctactagggaggctaaggcaggaaaattacttgaacccaggaggtggaggttgcagtgagccaagatcgcacccctgcatccagcctgggcaacagagtgagactgtctcaaaaaagaaaagctagaaattattacacttagtaaggaaggcacgtgaaaaactgagataggccaaaagctaggcctcttgcaccagatcaccaagttaggaatgcaaagaaaaaattcttgaaggaaattaaaaaagaatcgaatgatgtcatatctctggatatcagattctcccccttccccgggatttgctgggtttttttgtgtgtttttgattgttgtaggctacccctgtgccaagaatcagcctgaaatgtaaacttaaagttttttttttttttttcccgagacagggtttcgctctgtcgtccaggcaggagtgcagtggcacaatcacggctcactgcagcctccatctccccagttcaaaccatcctcccactgcagcccccaagtagctgggactacaagtgcacaccaccgcatccagccaatttttaaattttttgtagagatggggttcccctgtgttgcccaggctggtctcaaactcctgggctcaagtgatcttctggccccagcctcccaaagtgttgggattaaaggcatgagccgcagcacccggccttgtaaacttaaggtcttcacaggtcttttctgagcctgtaccattccctgcacatgtgcagactttctcatttgccctatatatgtggttgcttttgaacatcttactctttagtgtctgcctcccaaaggaggaaaaagagaaaaatgaagaagggaaaagatgccaggcctttagatcccttggaagttccttcagctagaggtgaagaagcttacagccgtggagggaggtgcaatagtggaggagctgcctctttctctgtacctctgtgatcagaagcagcaatcagcaagatctcctgtatttggaggacagagtcctttttgtccatgctggctcccacaagctgctcctggaactggtgctgggggtgggggatgggtggctgctactatggtaggggctgaaattgaccaaaattaatggcagtgagctgtactgtcaaagcctttgcctagaagttgcaagcctttaatagactccagagttaagtcagattctgccagtgcagcttgtcttggtggggagaccaagcttcttcttatgctgtcttctcagaaccctcctcataagttgaatctttaaaaagggtttatttgaacaaagtttgaaaactagtgagataatcttagcccctggggcaaccgtcattttgcacacacaggcacacactacacacaaggacgcaacacaccctagaaggagcattaccaccaatctccaaagcatcctctgagacatatcctccaaagcataaggcaggcaacctgcacagagcaatgggctgggtagagcagcccctgagagagctgtgagccagcagccttcagacctgtgcttttccagtgcgaaaaaagctcacacatggccatctggggtagccacttccccttcctgggacttggtttaatttatcccagcaatgtgggagttggactagatcactgttttttttgtttttgtttttaaagacagagtctcactctgtcacccaggctggggtgcagtctatcttggctcattgcaacgtctgcctcctggattcaagcgatcctcctacctcagcctcctgagtacctgggacaagtatgcaccaccatgcctggctaatttttgtattttttgtagacatggagtctcgtatattccccaggctggtcttaaactactggcctcaagcaatcctctgcctcagcctccgaaaatgctgggattacaggcgtgagtcaccacgcctagtctagatcactgttccttatacttgtgaaaccccagaacaaattttcttacataggacgttgataataatctttcagtgaaaaagttattggaagctttaggcagtcctctttccctgatctgagcctcagtttcctcatctgtaaaaccagggtttgaatagttgtttctaggaagactttcctttttaaactctgaaataaattcttggctctgtgattacagggaataaaactgacaggtgcaggggatgctatgggggcatcacagcatcaagctctctctcagactcctctgtgcggctctgcgcagctcgtctgagagtctgacagaccaggctagaaccacagggggctgcattcttgggtggattaaagggtacaggtgatctcttggatctggagsggagactgcttccattgtttcccaaagatggttttaggaagtacaagacaaattttattttattatttatttatttttgagacagagtttcactcctattgcccagggtggagtgcaatggcacaacctcggctcaccacaacctctgcctccagggttcaagcgattctcctgcctcagcctcccgagtagctgggattacaggcactcgccatcacgcccagctatattttgtatttttagtagagacagggtttctccatgttggccagactggtctcaaactctcaacctcaggtgatccacccgccttggcctcccaaagtgctgggattataggtgtgagccacagcacccggcttttattttattttattttatttattttgttttattattttattttttgagatggagtctcactctgttgcccaggctggagtgcagtggcgcaatctcggcttactgcaagctccgcctcccgggttcacgccattcttctgcctcagcctcccaagtagctgggactacaggtgcccgtcaccatgcctggctaatttttgtatttttagtagagacagggtttcaccttgttagccagggtggtcttgatctcctgacctcgtgatccgcctgcctcggcctcccaaactgctgggattacaggcgtgagccactgcgtccggccttttattttattttttgagatagggtctcactctgttgcccaggctgaagtgcagtggcatgatcatggctcactgcagcctccacctcccaggctcaatcacttctcccccttcccaagcctgtagtcctgagtagctgggactacaggtatgcatcaccgcacctggccartttttgtattttttgtagaggcggagtctcgccatgttcttcaggctggtctcaaaatcctgggctcaagtgatcctcccactttggcctcccaaagtgctgggattataggcatgagccaccatgcccggccaagatttttcaatacttttatatgtgctattttagtgagtattgaaaaaaactgtgtggctagcgcatsacacctgtgattttagagctgttattgcttaggatgtggctcttaattttaaaaatggattgtttaaagaaaaatgttaagtacaagtggtatttggatatggcagaggtcatgatggaggggtatgataagaatgactagatttgagaagcattggcctaatgctgtgagctgcagctgtgacatgccttatcctkgcactgggcattctagaagcctcactaccagggagattatcatccctgtttaaagaagagactgagtttcagagtctcccaagacactgctgggaagtggtgtagagtacaactggtgcctgacttttctgttccactgtccccagggtgtatgtaccccatctgagagcatccctgctggcagctcagagccgagctcccagagtggagtgtcctggaggatttcttctggctaagtcctagtgagaggctctggtcctctctgcagggggctgagggcagacaggtgtcaagccatccccctcactgtgcacctgctccttggagggtgtattgtttgcttttctgtttgtttaagcagagggttcatttttttgttgttttccccccaaaataatagctctgttgtttatcataaatattgaaaatgtttaatataaatacataaacaatatgaagaattaaatacatgtctgtcagatgtatacatatttatctatttatttattattattattattatttgagaccgagtctcactctgtcacccaggctggagtgcagtggtgcaacctcagctcactgcaacttctgctccccggattcaagtgattctcctgcctcagcctcctgagtagctggaattacaggtgcgcaccatcatgcctggctactttttgtgtttttagtagatacggggtttcaccacgttgcccaggctggtctcgaattcctgggctcaagcgatccacccgcctcagcctcccaaagtgttgggattataggcgtgagccacctcgcccagccatatctatctatttatatagaataagataaattacttaaatcctgtcattcagcgataatcacggttaacattatggtgtacagtcttctgaattttctttttgtttatgtacctatttgtgggtttttttgttttttcttttgagacagagtttttctcttgttgcccagcctggagtgcaatggcatgatctcagctcactgcaacctccgcctcccagattcaaacgattctcttgcctaagcctcccgagtagctgggattacaggcacacaccaccacacccagctaatttttgtatttttagtagagacggggtttcaccatgttggccaggctggcatcgaactcctgaccttaggtgatccatccgccttggcctcccaaagtgctaggattatgggcgtgagccaccttgcctggcctgtgtacccatttggatatcagtatttgtatgatcccatttgttacattctttttttttttttttgagacggagtctcgctgtcgcccaggctggagtgcagtggcgcgatttcggctcactgcaggctccgccccccgggggttcacgccattctcctgcttcagcctccctagtagctgggtctacaggtgcctgccaccacgtccggctaattttttgtatttttagtagagacggggtttcaccgtgttagccaggatggtctcgatctcctgacctcgtgatcctcccgcctcggcctccgaaagtgctgggattacaggcgtgagccactgcacctggccacattcttttcttttttttttcccccaatagcatgccataggcatcttaacatatgagtaactagagactcttgtctttagttttcatggctgcagcatattctcttgtgaggcgccttgacataattaatttaaaacagtcccctttagtgggaattttggtgggtatccagttttaccttttgctttttttgagagacagggtcttgcttcatcacccaggctggaaaacagtggcacaaccatagctcactgcagccttaacctcccaggctcaatcgatcttttcccgtcggcctcccaaggagctgggaccaaaggcaccatcacgcctagataatttttaaaattcttttttgttgagacagggtcttgctacattgcccagactggtatctaactcctggcctcaagcgatcctcccaccttggcctcccaaaatgctgggaccacatgtgtgagcccctgcacctgacctggagtccagtttttgaccctggtaataatgctgtgatgaatatccttgcgttcatatccaagcatttgctttcctggaagtctgttactgtaaacttttagatacagaactgtaggtcatgctgagtgtggcagctcacacctttaatcccatcactttgggaggtagagatgggaggatcacttgagcccaggagtttgagaacagcctgggcaacatggcaaaaccctgtctctattaaattcaaaaaactgtgggccaaaagttaagtagagtaaaaaacttaaaacatgttgcaaactgcttttcagatgtttgagatgggctgggcacagtggctcatgcctgtaatcccagcactttgagaggctgaggcgggtggatcacaaggtcaagtgttcgagaccagcctggccaaaatggggaaaccccgcctctactaaaaatacaaaattagccaggcatggtggcgtgtgcctgtagtctcagctaattgggaggctgaggcaggagaattgcttgaacccaggaggttgcagtgaatactgcattccagcctgggtgacagaatgagactcttttttttttttttttttaaaaaaggaaaaactatgtgggatagattcagtcggccagctgccagccctggcttgtggaatgttttgttgaacgactataggtatagccatggactttttgggatcccttggtgtgtgcagtcggccagctgtgatgcattttcctggcatttgtgagttagctggcctgcgtgtccactgccccatatgacaacaggcctgcttctcccatcctgccccccagaatgctgtccgtgtcccacgagactttgagggctgtagtgtcctccgcaagtacctcggccagcttcattacctgcagagtcgggtccccatgggctygggccaggaggccgctgtccctgtcacctggtgagagccgcaggcagggctggaggatcccacggggagtctgggtggtgggggtgctcctcccctcccttcccccttctccttgctgcataggatggggaatggcctcatatggtccccccaggcctccccacatccccacaatggggtgtttagtccccttacctaatctcagggccctggctagctcctgccctcgagataactggggtgccatgtctgcaggacagagatcttctcaggcaagtctgtggcccatgaggacatcaagtacgagcaggcctgtattctctacaaccttggtgagctgcctgatcccttcccccggccctactccccagtcctgccagcctagctttcagctcttcagatggccacaaaggcagtgggctgataaagggaggactccaggattcccgcccctccactgacctccccacagccctgccagctcctccactgttttctgggctgggcccgtggggagcctctgctggggcgaggctctactgggctggctgccacacagagttgccactgtgtgctctgtctgggagagagggcctttcttctttgactggacagcccctccccactgtggttttgggctgcttcaggcaggaggagagtgtggctggcctcagcttaccctgctagtcagccttagcctggctcaagggagaagcttggggagccccagagttctgtgcaaacatccctgaagcttcaagattggaccccttggacaggagcccttccatcctctgccaaatgcagagcaggagactgagggctgggcaggacttctgagtttccctgttccctccagcttgggtgtccttggactcgttgccctggttctcagagccatgttgtcctgaytgtggataacagcagtgccccctctgtctcaccttcacatgggtgtgagcagccccaggcccctaacactgtcycctccctccccaggagcgctgcactccatgctgggggccatggacaagcgggtgtctgaggaggtgaggagaggggcagtagtggaacatgtggacataccagggaggggcagcctcccaagtatggatgaatcctgacccatggagtggacacaggccatcctcccactccctcccagggcatgaaggtctcctgtacccatttccagtgcgcagccggcgccttcgcctacctacgggagcacttccctcaagcctacagcgtcgacatgagccgccagatccttacgctcaacgtcaacctcatgctggtgaggaggcgccctggttggagtggagttgaatccagggaaggggatggccagggagggggcagttgggcctggatcctggaccaaggcagtgagggacaagcaaggggccttggctttgttgaatcaggagcacsgtggtgctgcttggagtgggggcagctgggggagagggcagtgaagagggatccctcagtctgcccctggggaaggataaagggaaggggaagcgggaggccttgggtgagcgagggagtgcacctcacgtgtcgccccagggccaggctcaggagtgcctcctggagaagtcgatgttggacaacaggaagagctttctggtggcccgcatcagtgcacaggtagggacggggctgaggggaggccttcactttactgctgactcccccactcattgggccccaccctgttctcaggtggtagattactacaaggaggcatgccgggccttggagaaccccgacactgcctcactgctgggycggatccagaaggactggaagaaacttgtgcagatgaagatctactacttcgcagccgtggctcatgtgagggcctggggccccagggcggggcagggcrgggctgagtggccacagctcaggaagcaagtcgtggcgtctcttcttctttcccagctgcacatgggaaagcaggccgaggagcagcagaagttcggggagcgggtgagctacagcgaggaggggactggggaccaatggcagccttcagtgagatgccggtgtgctcccgctccttacacaccagggggtggccttctctgtctcaccctggccatcaccctgctggaggcctggtgtcttaagtgttgtcccatctgtgcagccctcgtccctcggggtctgaggaggtggggcaggctccctacagagcaggtggctggggcagggtgtggcgccaccttgctgctgttggctggggtggtgcccggctgcctcctgagctgcttgtcatctgatggacaggcagggccgggtgggaggcaggaggagaaagggtccaagcagaggaggacagagcaggctttcctgccaccctccacaggttgcatacttccagagcgccctggacaagctcaatgaagccatcaagttggccaaggtaaagctgaggaaggcctggctgccctgagggtataggagcaagcccggtaggactgagggggtgtcctggtgccagccttggttagtgmtaaggccccacccctgtccctaaccccacagggccagcctgacactgtgcaagacgcgcttcgcttcactatggatgtcattgggggaaagtgagtctgtgggggtggccctggttccctctttttgtgaagggtcttgtccctctgctggcatctacatgggaagtaggttctggatccccactgacaccccgtgactgcccactccccctgctcctgatccccaggtacaattctgccaagaaggacaacgacttcatttaccatgaggctgtcccagcattggacacycttcagcctgtaaaaggtcggggagctgagaggtgggggcagaggtgacggtggggtggggacaggacacaggaggctgcctcaaggactctgcgtgggcctgatctccacaattcccacccccccaggagcccccttggtgaagcccttgccagtgaaccccacagacccagctgttacaggccctgacatctttgccaaactggtacccatggctgcccacgaggcctcgtcactgtacaggtgggtggagggtggcacagagggaggtggggtgtcttgagatgtgggtcttcagcaaatgctctgtcgcttctgcagtgaggagaaggccaagctgctccgggagatgatggccaagattgaggacaagaatgaggtcctggagtgagtgtgggacttgggcagggaggcggaggcaggcagcacttcccgggcctctgggggccccagggctgcctatgctgggagaggaatgaaatgtccattccaaacaggtttcccaatgctgccttcccgccyggggtggtggggctagtgtgtaaggcaggagtcatgtcttgggaggaggaggtgccttctgttccactgtttccagcagtgccctgggcatgttctgtgagaccaggccagacctggtagtaggggtccgaggtcacaatttgctctctgctgagacctcagattgagtggtgaggcttgccctagcggctcctttgacatggtcagagttggatcagcacccagcacccacctggccctgttgctccccacagccagttcatggattcaatgcagttggatcccgagacggtggacaaccttgatgcctacagccacatcccaccccagctcatggagaagtgcgcggctctcagcgtccggcccgacactgtcaggaaccttgtacagtccatgcaaggtgagtaaggggcagagcaagcaggtggaagggagtgtggaggtcatctgctgtggcctcctccgtgtccctggtcactgaggatggaggctgcacccctctaggccctggcttgggcatccacacccactcctctgaatcagcatacctcttgcaccctgctcagtgtgcgctgggcctcacttaagccctgacctgagggggcggttctgtctcttgggggaggggcccatgggtgcccggtcagcctgcctcaggggctgcctgtacaatccacaaccccagtgctgtcaggtgtgttcacggatgtggaggcttccctgaaggacatcagagatctgttggaggaggatgagctgctagagcagaagtttcaggaggcggtgggccaggcaggggccatctccatcacctccaaggctgagctggcagaggtgaggcgagaatgggccaagtacatggaagtccatgagaaggcctccttcaccaacagtgagctgcaccgtgccatgaacctgcacgtcggcaacctgcgcctgctcagcgggccgcttgaccaggtccgggctgccctgcccacacyggccctctccccaggtgagccccaccagaccccattgggagactcgagctgggggtttctctggcctcactgaccactgctgcccacagaggacaaggccgtgctgcaaaacctaaagcgcatcctggctaaggtgcaggagatgcgggaccagcgcgtgtccctggagcagcagctgcgtgagcttatccagaaagatgacatcactgcctcgctggtcaccacagaccactcagagatgaaggtgggctgggtgagcagggtagaggggctctggctccgggccccacccttaggagtcgaggccctgagtgtccgtccctggcccccaccccttcctcagaagttgttcgaggagcagctgaaaaagtatgaccagctgaaggtgtacctggagcagaacctggccgcccaggaccgtgtcctctgtgcactgacagaggccaacgtgcagtacgcagccgtgcggcgggtactcagcgacttggaccaaaagtcagtgcccagtcctctgctctttcccggagccacctggagcccagccccatggttcacctggagctggcccttctgcccaccaggtggaactccacgctgcagaccctggtggcctcgtatgaagcctatgaggacctgatgaagaagtcgcaggagggcagggacttctacgcagatctggagagcaaggtggctgctctgctggagcgcacgcagtccacctgccaggcccgcgaggctgcccgccagcagctcctggacaggtttgtgtggccctggggctgtggtgcggctcgggtccagacaggctggggtgatgggagcctggccccactttttccttgcctgtygcacagggagctgaagaagaagccgccgccacggcccacagccccaaagccgctgctgccccgcagggaggagagtgaggcagtggaagcaggagacccccctgaggagctgcgcagcctcccccctgacatggtggctggcccacgactgcctgacaccttcctgggaagtgccaccccgctccactttcctcccagccccttccccagctccacaggcccaggaccccactatctctcaggccccttgccccctggtacctactcgggccccacccagctgatacagcccagggccccagggccccatgcaatgcccgtagcacctgggcctgccctctacccagcccctgcctacacaccggagctgggccttgtgccccgatcctccccacagcatggcgtggtgagcagtccctatgtgggggtagggccggccccaccagttgcaggtctcccctcggccccacctcctcaattctcaggccccgagttggccatggcggttcggccagccaccaccacagtagatagcatccaggcgcccatccccagccacacagccccacggccaaaccccacccctgctcctcccccgccctgcttccctgtgcccccaccgcagccactgcccacgccttacacctaccctgcaggggctaagcaacccatcccrgcacagcaccacttctcttctgggatccccgcaggttttccagccccaaggattgggccccagccccagccccatcctcagccccatccttcacaagcgtttgggcctcagcccccacagcagccccttccactccagcatccacatctcttcccaccccaggccccaggactcctacccccacaatccccctacccctatgcccctcagcctggggtcctggggcagccgccaccccccctacacacccagctctacccaggtcccgctcaagaccctctgccagcccactcaggggctctgcctttccccagccctgggccccctcagcctccccatcccccactggcatatggtcctgccccttctaccagacccatgggcccccaggcagcccctcttaccattcgagggccctcgtctgctggccagtccacccctagtccccacctggtgccttcacctgccccatctccagggcctggtccrgtacccyctcgccccccagcagcagaaccacccccttgcctgcgccgaggcgccgcagctgcagacctgctctcctccagcccggagagccagcatggcggcactcagtctcctgggggtgggcagcccctgctgcagcccaccaaggtggatgcagctgagggtcgtcggccgcaggccctgcggctgattgagcgggacccctatgarcatcctgagaggctgcggcagttgcagcaggagctggaggcctttcggggtcagctgggggatgtgggagctctggacactgtctggcgagagctgcaagatgcgcaggaacatgatgcccgaggccgttccatcgccattgcccgctgctactcactgaagaaccggcaccaggatgtcatgccctatgacagtaaccgtgtggtgctgcgctcaggcaaggatgactacatcaatgccagctgcgtggaggggctctccccatactgccccccgctagtggcaacccaggccccactgcctggcacagctgctgacttctggctcatggtccatgagcagaaagtgtcagtcattgtcatgctggtttctgaggctgagatggagaaggtgagaagagggggtgggtgcccacgagggcagtgtgggrtggcagggcaggggatcctggaaaaccaggtctgtcttggcttatctgtccctcagcaaaaagtggcacgctacttccccaccgagaggggccagcccatggtgcacggtgccctgagcctggcattgagcagcgtccgcagcaccgaaacccatgtggagcgcgtgctgagcctgcagttccgagaccagagcctcaagcgctctcttgtgcacctgcacttccccacttggcctgagttgtgagtccactgctctggatggtggttgggggtctaagtgctgtccagtccttggtgctgggagggatgagagcctcaggtcaggcctggctcataggctcttcctggccccatcctgtcccacagaggcctgcccgacagccccagcaacttgctgcgcttcatccaggaggtgcacgcacattacctgcatcagcggccgctgcacacgcccatcattgtgcactgcaggtagagggtgggcctgagggtctctcctctatgggctcttggcctagcctcataccccggcctyataaccccttcttggcacagctctggtgtgggccgcacgggagcctttgcactgctctatgcagctgtgcaggaggtggaggctgggaacggaatccctgagctgcctcagctggtgcggcgcatgcggcagcagagaaagcacatgctgcaggagaaggtgaggatctgggcagatggggctgggatgggccttctgtcccagggtgacgggcccctgcccagctgacctggccaaatgcacctgtgcagctgcacctcaggttctgctatgaggcagtggtgagacacgtggagcaggtcctgcagcgccatggtgtgcctcctccatgcaaacccttggccagtgcaagcatcagccagaaggtgaggaaggttccgtggaagctgctgggagagccacagccttgggactccctctcctcactcactctgtcttctcagaaccaccttcctcaggactcccaggacctggtcctcggtggggatgtgcccatcagctccatccaggccaccattgccaagctcagcattcggcctcctggggggttggagtccccggttgccagcttgccaggccctgcagagcccccaggcctcccgccagccagcctcccagagtctaccccaatcccatcttcctccccaccccccctttcctccccactacctgaggctccccagcctaaggaggagccgccagtgcctgaagcccccagctcggggcccccctcctcctccctggaattgctggcctccttgaccccagaggccttctccctggacagctccctgcggggcaaacagcggatgagcaagcataactttctgcaggcccataacgggcaagggctgcgggccacccggccctctgacgaccccctcagccttctggatccactctggacactcaacaagacctgaacaggttttgcctacctggtccttacactacatcatcatcatctcatgcccacctgcccacacccagcagagcttctcagtgggcacagtctcttactcccatttctgctgcctttggccctgcctggcccagcctgcacccctgtggggtggaaatgtactgcaggctytgggtcaggttctgctcctttatgggacccgacatttttcagctctttgctattgaaataataaaccaccctgttctgtggcccgtgtctgagtctgcccattgctgcctcagctccagtagcactgccaggaacttaacttacttagcaccttttgtggatgacaggatggtaccaaactgccacactaccaggacagttctttaagggccctgcagttctggcttgctcatcctccccatgccacactgtatgtatgtttcctcagcagctctgaggagggtccaggcagagtgtgtgcacaaacaattccaagagacacaagtagctcccaaagtgcctgacagatgatgatatggttttttaaaaaagtttaatattattacagtcaggaggcagcggctggaagatactcggctctttcccccaagtccaggttcagtgcattggcccccacacagcaccccagcctcctgcctgggcaaggaggccctgcgctcagtccagcttctccagcacagagggcacatacaccaggctgagctcactgccaaagttgcagacaatggcagcgttgtccagcaccaggatctggcgggcaggctgggcctcactgttcttccccaggtagactgtctgtaacaggtccccgtagtttaggtcccaaaaggagacacagccctggccgccagtcaccagcaggttgtctgagatgacacccaagcttgcaccacagcccaggtcctggaggcaaggacatgacaagctcagtcctgagtccttccctaaaatcccaagaatcctatgatccccatcccctctacctgctgaatggagtagaacttgatgcctgtgctgcggtcccagatgctgatgaggtcatcyaggccactgctgatgacacaggaggtggtacaggtaagggaggtgacatccccacggtgagcaaacacatggctgacccggctgccagtcagtacatcccacaggcagatggccccatcttgtcctccactggccagcaccatggtctggggaaacaggccaggggagtggggtcaccatggtgtaatacctctgtcaacagtggtgtccctgtgccccagtgggtggggccctgactgcttcctggaaggcccctggggaccagctcccaggagtcagcaaacatgggccacagactctgtaccccctaccccacctgcaggccgcttacctggtcaatgtacacggtcgtgatggcycctgagtggccctgaagggtgaagaggcagcacgagtcctccagacggaacacctgggacagggatgggcctcaggttctggtctctgggattttccaagttatactttggctgggaaatgccctctgttcttcatcaggactcttccagcctctccctgacgaatgcatcaggctcccaccccgtgccgggccactccagcacccaagagacaagacaatactcactctcagtgtgtggtcttggctcccagtcaccaagcgcccagcagcggctttcagggctgtgatgggtttttggtgtgcacagggcactgtgtgggtcaggtgacaggccactgtgtcgctgctgctgtacactggagaggcaggggaactgccccgccctggggtccctgaggacaaaaggccaagtgaagaatctctgagaaagcaatgggtagacggcccctgcccgtcccaccaagtgtgaacacctgcccaccccaggccctccgacctctaaactgcagggggctgagggcagtgtgggtctccaaggagaagaaatcaagggaaccgttgagccgtgcagccacaatcctggaagagaagaacagctgccaggggcctctcccttagagccccagccctggggctgagcatgtggacatgagagttaagggccagttcaagaaggcacaggagggacatggccaagaggaaagcacatggtgccagaacagatgctggagccagagggcaactccaaatattaaccaccttgtgcctcagtttcttcatccgtaaaatggggataagagtacccacctcacagggtggtcatgagaatcaagtgagctaacgtgtaaggtggtacctggtgaatatcacgtaagtttgtaaattaaaaacaagcagagggctccatgtagcctggagctgaagggagggctgctgaggggaaacaggatgcagggtgggctatgttgggtgttgcggaagcctgcattctccacataaaagcagcttcaacccaagcacagctcacatcaattcctttttccataaagaaacaaggattttctttgctctccaaaattcctaggtacagtctgacaggcagggatgggtatatttgcccagtaaccccaaagcctcaaagcagatggggttcaaaatcttactgcagggaaaggcaatgcatgtctgcctacaacctctgcccatgaatttgaagggcctgcaccagagctggggaagccagttttatgattggaagtgggtggacaaggagagaccacagtcaccaggaaccctgatggtcaggttgagacatcggggctttccttaaagctaaaacaagcagcaaaggagaatttccaagaagcatggaggggcctggtgaaattggccaggctggaggggaggatgtcagccaaagcccatgcagaacctgtggtgacaggaatgacggcagcagcccactggcagaaatcaacatcactaagggcaagggaygccccctccccaaggaaaaagactccagctctaggtcagatggtgctgccaccaacagtcaaggagccttggaggaggagccagtgtgggacaggcaggcaaaggcgtccggcagaaggcacctggccactgggtggagacccaggttcaccagcttggaggtggggccagaacccaggtggctgagactccccaaggagtgtgcatgcagacggagtactggggacgcccacagccaacaggcttgctgaggaggccaagcacgacagaggcagggagagcagagaacagctgccagcggccaaggagaagagagggttctgcaagcgcactctgtaactaaaaatgcaaccaagataccccaaaggctcaatattgacaagctaatcagagaaactggcttcattgagaagggcgagaaaggataggagtatatcactccccactgtcactgcttaaggccctgggaggtcaccatgtgccatgccctattccaagcacgtcacacccctaacgcttttttttttttttttttttgagacggagtctcgctctgtcgcccaggctggagtgcagtggcgggatctcggctcactgcaagctccgcctcccgggttcacgccattctcctgcctcagcctcccaagtagctgggactacaggcgcccgccactacgcccggctaattttttgtatttttagtagagacggggtttcaccgttttagccgggatggtctcgatctcctgacctcgtgatccgcccgcctcggcctcccaaagtgctgggattacaggcgtgagccaccgcgcccggccacccctaacgcttttaattgttaccttcccatccaagtggactgccctctgctcacaggtgtggagctgggcaccaagaaggtcaatcgaatcatacagtacagcagttgaagagaaccagaactcaagactcaagagagtatggcctagccaacaaaggctggggacatctggggctgaggcaggccacgctcaccttttgtccaagaacaccagagcggtaatgccygaggagacctcctcgctgctgcagcacagcaccccttcaatggcgtcccacacctacgagtccagaggctgtgagcacctgccagccagaaaggcccacaatcccyggggcggacagccgctctgcccacctttagcccctctgcccacctccagccggccgctgctccgccccaccacgatgaggttgccctgcagctccaagctccagatggaaccctcggcactgggggcccaggcgagggaaggggagcctttctcgggggagccaccctcgtcctcaggggcctgggacagcaccggcccaggcgagggtgggcgcagggctggtgtgcagacggccgccagcccctcctcctggtacacccgctgcaccaggcagctgaagtcatagcctggggagtcccgagagcggccacagaccgcccggtgccggggctcgggctgagtgggctgtgaggaccgaggctgcgctgaaaagttggtgtcaattaagcaggtgaggtcaggctggtccccgaagagggaaggcggcggagggccccgggggcggtgtctcaggggagggctgtccccaggctcctctggaccagccttcccaccatctgaaagtcgttcccagctctcctgagcctcaagcccgctgcccacgccactgtcccggcgctgcctgctgggggccaggagggcggagtgagagggggcacgggggaggggggtgagagggggcgggggacgggggtgagagggggcgtgggagtgagaaggggcaagggaaaagggggtggggggagagggtggtgcggggtggggnnnnnnnnnnnnnnnnnnnnnnnnnnnnnnnnnnnnnnnnnnnnnnnnnnnnnnnnnnnnnnnnnnnnnnnnnnnnnnnnnnnnnnnnnnnnnnnnnnnnnnnnnnnnnnnnnnnnnnnnnnnnnnnnnnnnnnnnnnnnnnnnnnnnnnnnnnnnnntgggggcacaaaggaggaaagggcagccgcacctaccctgggcgcggaatgcgcgttaggcaatccccggtctgcgcgtcccacacgcagatgtggcctgccaggcagcagctcaccagcagcatgccgtcgctggccaggcactcgatgtcctgcagaagcccggtgttggtatgggccaggctccggccctcccctacccggccactgtgcccctgctcaccatgaggtggccgcgcagcacaagcggcacgatctccgtctcgggtggcgcatagccgtagtcgtcgcagggcagctccccgcgcctccgccgcccgggcccaccacccagctgcccgtagttgcgcgggcatagcacgcggtagaggcagagcagcagcagcaccaagacgatgccggtggccaggcccagcgccgccaccctgcacgggagggcggactgctgtgagacacacctcacagcctgtcccctcccctcctccctctcccctactcttgcctacccgtccccctccccgcactctttcccaccccaccccacccagcagccttacttgtacagcgtgacgtctccatgggcctgcaccccacctgggcccttgggtcctgcttcccagtgcccagcaggtatgggccccggtgggggccaggcactgcggccgtcctgagggtgccggccctccagagcctccctcgggttcaggcggagcgtgactgggatgacgggcagcaggctgatgtacctggattcggacagtgggcagcctcagcggggggcctcccagggcttcctcctgctgtgctcgccagccagtcctctccctcctccccaggcaggcctcagctccaccggccagactctcccagcatggggggttggggacagaggtaggtccctccccagcccagcttagcagccaacttgctgtcccagataccagcacccaaacagccctggtggccgtgtggggtatctccctccccactcctggcacaggtgggtgggtctcattctggtgagggctggcagccaccagtgactcctcagagcaacctgggactcctctcttgggttatagctgcctaaaccaccagttcccacctcacaaccttatgaactgttttaattatttgcataattcaaacctgtgggcctcctgcattggggaaaggggatggtgagttgacaccatcgagtgaggtggcacctggcacggcccagctcacctcttggccagtgtgatgttgtaatagctgaagagcgtcggccagtggcggaaggacaatttcctccaaagttcctcatcctcaggcccccaggt

SEQ ID NO: 93246 - DNA, 49513 bp, Homo sapiens
  misc_feature (1)...(49513): n = A,T,C or G
tcaaattcgaaaatctggggtcacaagaatgaggcatgaatttaataaaacaattagtttttcaccactaaccccagggaccaggaaaattatcctctgtagtagtaagaaattcaaaggtatagttaagaaatataaaccttatttttctccactgtaattcaattatcaaactctaaggatgtttctagtatagctctaattttgcaatagtgcactgggagaaagccaatctgtaaagcaagtttctatgtcattggaacagatcaaggtccaaagtgtctctctctctctctttctctctaatgttcttgtttaatggaatgcactttcaaatgtaatttatgccttgctttatggatcacaaagatattttgttaaatatgccagatgataaatacttacaaattgtttatcaactcttataccatcaccccaagaagaaaatgagctaagattttctttagcagcaaaggtgattatctcatccagaagtagctgggtgaaaattcacaaagcaaatgttattgactgcctatcagtctctgagtatgaaaactatttccctctgagtaatcaaagaaaatccctgagatttcttgctgctcttttctgtcttccagataggcctagtggtgggggttgggaggaggtgggatttgccctcaatctgtagactccacccaatctgaggcatggattgaggcaaccagccagcagagtccaggaagctggcataaccaggcctaaccaggaaggatgcagtgtctcttctggcttctgcaatctttggatctgacctcttttatgaagtttgccctgggatggcaggactaaccctcgcatcacagcaggagctcccaagagatattttttaccaatccttctcttttcatgctcgtacccagtaccaaagtctctcatgttttctttccttcttttgctcttaagaatcccaaaatccctggggccaggaaggccttgggcttggatcttcaggcagaagtgggctgttttcacaataacctgtcacaaaacaatgaagtctttctcacccactcaatatttccaagctccagctccaatcccagaccatgtgttctgaaaattccatcttgaaagagaggtagttgatgcatacaaggttttatccacctaaaatataagaaggaaaaaaatattaaggataatagtgtttgttatgagtggggtgttttacaaacatttcttttatccttacaacaatcttgtgaggtattgccatttctcagttgagaaatctgagatctgagataagcaacttgttcaggattatactaatattatctggttgattgagcccatttactctccccacctccacccccaccccaaaattcccttcctcactctctctctgtcttttcctccgtgtttccaactctcattttctagatcaaagttcaaaataatgaaaacagtgggtaattagcttgtgaatagatacaggcttagctccattgcactctaagcacctgatttatatttatgtgcttttgtccgtctccacagacaagttccacaggtttaaaaaatatgctgtgtttgagaccagcctggccaacatggtgaaactccgtctctacttaaaaaaatacaaaaattagccaggtgtggtggcaggcacctacaaccccagctacttgggaggctgaggcaatggagaatcgcttcaaccgggagggtggtggttgcagtgagccaagatggtgccacttcactccagcctgagcgaaagagcgaaactccgtctagaaaaaagggggggctttgttcatttctgtttataatatctggaagatcgcctggcatgtaggcatgtataaggctttcaataaatacttgttgaatgaattaacggacaagcagatgagtgaaatagaaaagtctacaaatagacctaaatacataagggaatgcaaatgatagagttcatattttaaatcagcagaaaacatggattattgcaatgaactgaatgtttatgtccccctgaaaattcatatgttgagaaaccctaactcccaatgatacagaagggctggactcctgggtaaaccccacccttaagcttgaaacctcaaccctaagtgaagacaactgaccctgtttttctgcccaaatgttgcctttttggcttgcccctgcctctatcttatgcccatgaaagacttcagctggcatggcaacacaagcagctgagcatcagtgatataagtggctgagcgtcaataatacaagtggctgaggagcaaatagagaaacaactgagtgtcagagactacaggtagacatgactaacttcagaccttgtggcttcagagaggggaccagctgaagatggctgggcttcagggagtgatcatctttccatcccctttccagtttccctttccactgagagccggcaccgctcaataaagtcttccatattcatcacctttcaaacagttcatgtgacctgattcttcctggatgctgggcaagaacccaggtgccgagagggcaggggctgccaccctgaccctccamtaagctggttggcacttggccatcctggatgcagagctgaaagagcattggttgaatacacttgaacaccactacagggttcgcacggagcctgctcccaccagagaggaatgcccagcggattccagcattcagttcactcaagtttccacacttggttgcttgcatactctctcccacaaggagtggccagcgatgggttgaatgaaacgagccactccagttcctgcctgcaaagggggtcaagagcactgtcccgtctcatcaagggtattaaaaggtggagttggccaggcgcagtggctcacaccagcaatcccagcactttgggagacctaggtgggcggatcacccgaggtcgggagttcaagaccagcctgaccaacatggagaaacccagtgtctactaaaaatacaaaattagctgggcgtggtggtgcatgcctgtaatcccagctacgccagaggttgtggcagaagaatctcttgaacccaggaggtggaggttgcgcagagcagatgcttctttctcttgattgaaagaaaggaaggatgggcatgtagatatatttgagagaggagatgggaagttgaagaagtttgcagcaaattgagataagcacaggatggctagttttgaaagaaaataaataaagctcttgaattaaaaatgtgattcatggcccacatagttttagttcataagctgacactcaacaatattaacattaaattatagattaatttgactaaatattttccctttgataaagacacctatcacccaaggaatgtactttacagaagtaataactttcagtttcatgtggagtttaagcaaatacattcaggtttctatggaaataatgttaaacctatgtactcaaataaagctaaaagtgttgtgttttgtttttttctgtttgtttgtttctgagacagggtctcactctgtcacccaggctggactgcaatggcgcaatctcggctcacagcagccttgacctcctgggctcaggtgatctttgcacctcagcctcctgagtagcggggactgcaggcataggccaccaagcctggctaatttttggtagatatagggttttgccatgtttcccagagcctggcctagaacttctggactcaagcaatccacctgctttggcctcccaaagtattgggattacaggagtgagccaccgtgtctggccttaaaagattgttaaatggagaccaggtggaattactatggcaaagggcatgtattgccagcaaaatcttcccatgaaggcttatcttaccctaaatacaaatcagctatgaagaggaataattctgtattatgcaagcaaaatggtttagcaatcatccttgtgacattgtccaagatctatattacagaattacagatgcttagatttctttagtctaagactgtaatgcactaaaacttatgcaacacttctatatttgattagataagttttgctttgcaccaggggaaataaataaatactttttctaatgagctctgtatacaatgactataaaaaaaaaaaaaaggagagccctagaagataaattttataacttttcttttactttgagcagtttttccttataaatgtgtatgattaatattttggtcatattatattataggtatggctcatagagaagcaatttagaagcagattagggtttgaagttggaagcttaaacaaatccattcttaatcctgacaataaagtttactgtcaaaattgttggttacagatacttaaattgctatttatttttttaaagaaaatgttccaaaacataaaacagtaactagttttgagaccattgtcctctataagggaaaagaaaatatttcagacacatttaacagatgccaatttcagtttctcaattatgtcatcaaggtattcttcaaaccaaatataaaaatatatatataatttctaatcactcactttttatacatttataaacaggcagatacagatacagatacagacacaggcagttatttgggttaaagaagctggcattttcatggggtttagaaaggaccgtgtagtccatgacatttactaccaggtatcagaggaaaagcataagcagttccttttcttgaacatttgccttctaattgaataggcattggaatacacaaagtagagggtttttttaaaggatttgttctttcttttatctactacaaaatatgagtatttctcaatgatgacaataataattaccatttatcgaatgtttattgtattcctgtctttgtgccaaccacctgacctccgttatctgaaaaatctttccaacaaccctatgacatagatattgttattcttcatttacaggtgagtaaatggaggtttacatttgtatggaacatgttctgctacttgagataatgggaataggagcctaggagggctaaaagcaaggagccagcaagtctagacacattccagaggacattatgtcagtcatgcaagccctgcctcagctttcttcccaaccctcagccttttttcccaacagtatataaataatgtggtgttcctttcaatacaggtgtctctaatgctagtttgttccattcttggtgaagttaatttgaatcacatttggttagcatgtttatcagtttttttctactgagtttccttttgtgaagtaagaacaaatatgtttatgaatgtagagttagctgtgctaaaattaaatgaaaagtcaagcaaactacccagatagtttaagccaatcacccaggatttcatgaaccctttgagccatttatgtttcccttgagggatatttcacatcttttacctgagagttctacagggcatgcttttattagttgaaatgtcactgagggcgagagtaattgttcaacggatgtacttgaacttggacatttaagaattaacagaacgggctgggcgcagtggctcacgcctgtaatcccagcactttgggaggccgaggcgggaggatcacgaggtcaggagaccgagacctttctggctaacacggtgaaatcctgtctctactaaatcctgtgtcggattaattcgttctacttgctattaccaataaatagcatgggctcccagagctatgcctggctaactctatcaccttcaagggtttgctcaaactattcagcctactttaagtaaatcaatttccaaggttacaaaataaacttcacgtacatttttatggttaggtatttgcgcgtatttgggggctccatagctttcatccgttactcaaagcgcttcaggacgctaaaaaggctcagagctgcttcgataaacaagaaagaatgctgcaagcaaaggcagcagtttcgctgtaaaatcctattgctgacagccaagacgggcgtattccctcgcgaccagcctgtggcgtggttggggctccggaagggcgcgcgcgagcgcttttttgggaggacaccacaggtggacgcctcagctgatcgtcctccctcccggggaccctgccccgagtcgccgagtagccgcagagtcgcctccgtcsccccgccgcccctgtgtttcggacatggccgcacgccttctccgagggtccctacgcgtcctgggcggccaccgtgcgccgcgccagctgcccgccgcgcggtgagtgccagccgggacttccgcggctgcaggccgggaggctgtggggtggggcagcgagtcactcctgtcgctggcttgaagcagggcggtgcgcgcgcggctgggagtgctccccaactccggcgccgggctagagctggcctcctttcctggatcccgcggactgggtgcaaccagcatctgggcggaggaaaaaggggtgtcagccgtgcmgccccgagaacagaccgccgagcccacgtcggggaaagccgaaagatttctccagaagttcattccggagccccaatccaacccgtctagttcagcggcctgcagtgggacccgggagcctgcgttttgggaggaggtggtcaccccctgggccsggctgcaggagcgcgggctgcgatctgtgtcccagttcgagctgtgaacccggcgttccccacggcttagactcgccgcgcggtagtgaacttgggacccggactcagtgcccgggctgcggcgcggaccagaattgtccaggacaaactgggctagaaatgacctggcgagggttccatcaaacaaggaaattagctttagatatatcaacaaatctaactaaatacagaggattaatgaagacagagtctaagtagttcagtgactactaaggtggtgtttataatatgatcaaaagtttcagatactgtctgatgcataaaatctattcactgggtaaacaaattggaagcatggagaattcattatttaataagggtgaaggaactggcaaatttgcgaatgacagcattggtgtaagctactctaattttatttgagagctatgaaacaaaatgcctacttttcctggggagatttgggaagacgtcactgagaaggtgacttttctttaggatacatacttaactcttccttggaacattataagacagtgatcctcaaacttttttttttttttttttttttttgaracagagtctcactctgtcgcccaggctggagtgcagtggcgcgatcttggctcactgmtgcaacctccgcctcccgtgttcaagcaattctcctgcctcagctttcctgagtagctgggactacaggcaygcaccaccacacccggctgatctttttagtagagacgggggtttcaccatattgaccaggctgggctcaaactcctgacctcgtgatctgcccgcctcggtctcccaaagtgctgcctcaaaactttttgataacagggctcccttatgctcttaaacaggacctcaaaggacttttgtttatgtaggttatatctatccgtctgtcgttatcgaaaggtatctacataactgagaaactttacagatatttagtttatttaaaagttacaataagaagctcattacatgttaacataaataacagtttttatgaaaaataacttttcctaaacagaaaaaaagtgaaaagagtgacattgttttacatttttacaactcccttaatgtctggcataatagaagataaccagataactatatctgcttctgttttatccattggcgtaagttagtttgattgaagcatggcaagaaaatctaccctcaaatagagaacactggaaaaagggagacctgagagaccctctgaatgggctggggggctacagttttgttgtaacagcttttttacctttaatgtgcaaaggaatcacctgggaatcttgttaaaatacagcttctgattcagtgggtctgggatggggcctgagattgtgtatttataaccagcttctaggtgtgtggaaggtgctggtggagattgtctcccttttaaaatgtaggagactttaaaaaaacaataatagcctagccaataagattagttgcagtttattgccttagagaaaaaaatgccaatttttccattacagatttcttcatctttagactgagaaatacatgttgcaataaacttgctgccaagtgttttgattttcttccctctgcatattctctcttgaccacctttgactgacctgaaagtctttattcgtttggcatttcttttgctttcctatgtctttatatattttacttaaaaatattgcagagatttccttaacacagtacaggctattcaattttaagatccagtaagactcgattttaaattctggctctattgtttactcattatgttgacaaatgattcggtgtcttacagccccagtttcctaatctcagcatatttttttcctgagggaaactctcaagtatggaaaatctatatggacaaatacgtgctttataattttatctctactagcaagaaaaaggagccgatcatttccattatagggataaagtagatgttagtttatttgatgcaacaggacaatggtcaaggtcccctgcatgtcctggtcccctgttatctcttcttcctagaatctctggcctcatctactcttctcagcccactctggctacaattgcctccttgctctttctagaacacatcagacaccattcagacatacagcctttgctctagttgttcttttgtcctaaaattcttttattctagaggtatgcctggctaactctatcaccttcaagggtttgctcaaatctcacctttctggtttaacctaccctgactgcagcacttttttttcttttccttttttttttttttttgtttgtttgtttgtttttagtgacaaggctcactatgttgcccagactggtttcaaactcctcagctcaagcaatcctcaggcctcggcctcccaaagtgctgggattacaggtgtgagccaccaagccccgcctactacattatttcatacggcaacctctgtctctgcctccccccaggcacatactcctgatcccttctctacttttctttctccataatacttaccaccttctaaggtattatacaatttgcatatttatagtttattgtttattcagtttccctttgttagaatgtaagcttaaaagccaagatctttgtcctcatcttagtcctttgttcgttattgtatcccaagttactagaacagtgcctggcacagaattggcactcagtaaatatttgctaactaaatgaatgaataagccacaaaaaaaatgatacttagggaaaacttagaaataggttgtaatagcgactgggcacaatagctcatgcctgtagtctcagccctttggaagctgagatgggtgtatcacttgaggtcaggagttcaaaaccaacctggtcaacatggtgaaaccccgtctctactaaaaatacaaaacttagctgggtatgtgtggcaggcgcctgcaatctcagctactacagaggctgaggcagaagaatggcttgaaccgggaaggcgaaggttgcagtgagccaagattgcatcactgcattccagcctgggcgacagagccagactccatctcaaacaaaaaaaaaaaaaaaggaaagaaacatgtaatagtaaaaagttatttttttaaaaaccctttaagtctactttgattaattacatgaaatagatcttttctggataaggactagaaaagaaaaggcagagtccaactaaggaagaaatacactaaattagaatttaatgcaaaatagaaaaagcatcctttggcaagatttgaatatatgataagttttttagatgtgaacttgaaaatgtacaaaatgatgcatagattttcaaaatttctttcaggggtacttcaagggtaaaaaaggctgaagaccactgaactaaaggagctacaaaactgtctcatttgaagcttggtgtgggagggatgggagtaggtcttaaataattccattttacagaatctttatcagagattgatgggtatttttatctccacccagattggctttgtaatgtggcgattacatcaacatggtttgcatcttatacacctgcaatttgaaattgtgtgattctggttaaaatactaattttggaggctttgcattattttaaacattgtatatgatatgaaaatttatcagtattactctaccgtactatttgaattttacataatgtgatccatatgtcacctgacaatactacatttcacctcaagtcagacctgtggttagttctaggcatcatcttctttaaggatttggagatggagaccgagttgaataatgataaggtacttcttaattccagctacatgaggtagatcccatcaaaagtggtggcgcccaaatttgaacccagctttgtcataattcaaactctttctacttgcctctcaagtttctctgtgaaagaaatccatgttgttcagtggcactaatttggatatgaagagtaacaattcacttacttttcctattgcatatatatatttttaagatgttctcattccggaggggaagaacgtctagaaaytccttctgctaaaaaattaacagatataggaattcgaagaatcttttctccagagcatgacattttccggaaaagtgtaaggaagtttttccaagaagaagtgattcctcatcactcagagtaagtggcacattttcctctaatgtaatgtatactaggggtattataggaccatttcctagaatgccatatattgctatacagaaaacatagtatgttcagggctttattaacatttttactgctcttcactgtagtactataagatcccaggattcttagagctttttaaatgaattttaaaatgtactatacacaaataagaaaatttgaaaatttacaacttagtctaagagtagtgtttttgaaaaccatgggtaagtggtaacaaaatactagtcaatttcatagtctttctttttctgcttcatgaattaattaaactgtaaaaacccaaaaagtcagcacaatgcaaaccttggtaagcaattggttacctctggatagttcttgattaactaattattattattttattgaccagaaacttatctatttctattacaataagattttgcttcatttccaaaattcactcaatgctagtacagatgctcctcaatttagtatggggttacaagttgaaaatatcataagtcaaaaatgcattgttattatgttaacactgttactatgttattataaaaacaaaaaaattctcggcaccgttattatgttagaagcagaaattagaagattagtaaaatgaagagagaaatggttcaggaacatcataggtttgtgaggttttacacacctagcctactaaaccccatagtttaggccagcctacattaaacatgctcaaaacaattacataagcctacagttaggcaaaatcatctaacacaatgtctactttgtagtaaagtattaaataactcatgtaatatattaaatatatttaatatatgttaaagtgaaaaacaaaatggttatatggatacttgaagtaagcatgttttcgactgaatgtgtattgcttttgcaccatcataagtaaaaaaattgtaagttgaactgtcataaagtacagagacatccgtactttaaaacatttagaatggtttttaaatagcattaaaagtaacttccattaggtttttactaataccttcttggtaagaatgaccaaaataagctaaactcagaagccagaagccatgactagtcttcggtgaaaagcaactagcttctgttttttgaggacttgtttgtttgtttgtgtgtttgtgtgttttttaagacatggtctcactctgttgccaaggctggagtgcaggggcatgatcatagctcactgcagccttgaacttctgggctcaagcgatcctcctgccttagcctcccaaagtgctgggattacaggtgtgaaccaccacatcgggcttcaactagcttcttaaagacaaaagagacattgtacactttgctctggtaggatctcttgtttatttctcactgcttttaaattttattccagaaaaaatgttaagaaggctttgaaataaaataataggagctgacaaattttaagtcaataataaaaatatttccaaagctactttaagcaagaactgtattcaaaacacacatgataatccaagtcttaaaaatttttgtagtgtcagtatcttcaaataccccatatctcactataatccacttaaaaatacaaaaattctcagatattttttcactatctccaactagccatctgtttcctcattctgccattctcatttttaaagaagaaaagctgaggttgcctaccttacacaaatatctaattttttcagaagttaatttgatatagagccatggtgtaaggtgcttctgctctcctgttcttcctatttaaactgtaatgaggttccctactttgtcagcttttgtatgcttgtaccataagttcagcactttaaggaaatatgccaaggagaattgccttttacaatacaggttaggcaaattcccatgacaacatgccataactaagcttgtatgtaagagtacctgctgagcaaaactacatcaatgaatatcagtgggtataattttcaagtccaataaatagtcaagatgggggaagacaatggcaaatataaataagaggagagggctgggtgcagtggctcatacctgtaatcctagcgctttgggaggctaaggtttgaggactgcttgaggccaagagttcacgaccagcatgggcaacataataagaccccgtctctacaaaaaaaaatttttttttaattagcctggccttgtggcaggtacctgaagtcttagctgctcaagaggctgaggtgggaggattgcttgaacccaggattttgaggctgcagtgatccatgattgtgccactgcacaccagcctgggtgacagtcctgtctcaaaaaaaaaaaaaaaaaaaagcagaaaaaaggaggaacagaagtgataaaagagtcagaggcaaatagaagcatatggctaatgtaaataactacctttaagaatgcatttctacacaaaatcattcataagttcaaagttgtggccatttaaataatatttaaaaattatctgaatttaaaatatttgttatttgcagatgggagaaagctggagaagtaagtagggaggtttgggaaaaagctggaaaacaaggactgcttggtgtcaatattgcagagcatcttggtggaattggaggggatctgtactccgcagctattgtctgggaggagcagtaagtatggagacttttaaggttgagtcttgttttgtaaacacaccactcacctttctgaaatgaccaaacaaacaaacaaacaaacaaatgttttctaatcttggaagattgaaaattcagtgtaaaatgtaaaagattataccgctcatgcactcttgcacattttttgaatgtgggataataagaaaatccttttaagttgctgaaataggtgctattgaaaattaaagagatagtttttttttcctgtcaatgcttatggttacttttcccccttagaaaagatatttgaaagagaacagcagagtagaaatatacttccatcaaatatattagaaatttaatatacaagaacaaataaagattgcagttgaaaaatgggcaaagaatttgaagcaataattcatcaaaaaagaaatgcaaatatgtttttttaaatgagaaaagttcatccttagtaacaatcaaatgcaaattaaactgatctggaagtatcattttgagcatctataaaattagtgaaaatgaaaaatcctaatacccagtgctgacaagattgcagtgaaagtgacatacactattggtggcattataaattagaacaataaattttggggggattaaaaaggtgaaaacatattttaaaaaatatgttcctgctctttgacatagaatgccactttggggaatttatcctaaggaaataatttaataggaaaaatagatgctgtgttcagaaatcattgtcatgttaggtcacagttctccaaatgctgaagcaatctaaatgtccagcagtgggagaatggataagtaaattatggtacataaacaacttggaatattttgcagctatttaagattaaaatatatgtaaaaaaataggattttgttgtgtcatataatttatttttaaattttaaatttttatttgtgtgtgtgtatgtgtgtcataattttaaaagaaaatagcaaagtacaaaattcactccatgactccatgttttgttttgttttgttttttggtccttttttttctttttttctattttttgcttttttattttttatttttgttcttttgtttctttgttttaccaagactccgtcttattagaatatatccttatggcaaaggtaattagaggaatacagttattattccactgtgttagaggaatacaactgcaggtgattcatattttaaaatattttatctctcaattaaataagtgttcattgaactctggtagaccactgttattgtgttggaaccagaaattttaaaattagtaaaaacaaaaagagaaaacactcaggaatgtcataggtttgtgatgagataggccactaccaaacaatttgataggaccttaatacattgttgttataatagtcgttttttattgctattttatgctctaatttttcttcttttttcattctaagagcttattcaaattgttcaggcccaggttttagtattcattcaggtattgtcatgtcctatattacaaaccatggctcagaagaacagattaagcactttattccccagatgactgcaggcaaatgtattggtgcaatagcaatgacagagcctggagctggaaggtaagttaatatttagttggytttggattcttggaagcagtgccttaacattttcttagtacttggttaatacatagactgagctatatgctaggaggaaggcaaagatgaacacgggataattcatgacctcaagtcggaaaataacaataaagcggattataatgtaagctatgtttgagatattaacatagttttatgcaaagaaaatggtagtgtgtaagttgaattttcaccataatgaattttaggtgtaggatgagattcacatgtaaatgccaagcagtttgttacagaggtatatttggaattctggagacaaggatggagtagcaataggttttaaaagtctttcatttataagagttgatacaataggaatgaataagatcacatattcagttatttgctggttatttcataagtgtcttcagtgtgccaggtatacagtagtgaacaaaacagatgtggcctctgtgcttattgaggagaagggcaagggcaagaaataagcaagtatatatatttgtagctataaattatgataagtactgtgaaggaaatgaagtactgtgaaggaaacaaagtagtgtgctgtagactaatggtatgtttgtgtttggtgggatagggaaaaacgaatttagatgtgaatgctaacaaaggcctataaaaagtggttgtatttaaactgagatttgacaaatgagaagaaaccagttttataagaatgggagaaagagcttccacagagtgggacctgatcctcaagaggaaaaatgaaacacaaaaaagggaccaaggaggaaaatctgggcattatatttcatttggaactgtacaaaagaagatggagcaagagagacagaaggattgagagttttaaagaaatctagacatgagtaggaagagaagtcagttggaaaggctgtaggaaaggagaaagwagttagtaatgtcaaggccaccgtgatgttgagaatggagaagaggttttggcaggcctgatgatcctttgtgatttcagtggggtggaggggcagaagttaccttttatgggagtgaggtggttgttgagaaaacagaggcagagaacacaaagtaatctttctcagagctgagtggtaaaaggaaatgtagagagggggcagtggtttgaggctaactggtaagggaaattatttatgttaaagacagcagcaacttgtgggtcaacagaaagcaaatagtgcaaagaaagaacttaaagatgccaaagaagtgtaagtgaaaatccaggaattgtttttgcggaggtcaggccctccttttttattgtaagattttcttttctgacagtgttatttatttttaaatctcttaatattctatagcatgacttgcaatatgtttacattgtatttatctttttaagatataaatccctaattataggtcaatactaacaattttgtcaaagattaaaggtttctgttcacttctgttgcctacaagtgtgatctaaacaagtagaaatttaaccttgttccttaaaatttgcttttaatttcattctctaagataactacctgactgactgccaatattcagattgagttgtattagctctgtggttagcatgttccacttccagctcattgcatattagctctcaaaaagaggctatagaataaatgaaatcttgatttatctctaatttatacatgcaaacaaaggttcatgtgatttttgtttaaagtctctggccttatctgtggttaagtgtawataattaagaaggaaacctgagaatgaagatggagaaaataagcagatttctttctttctttctttctttttytttctttctttctttctttctttctttctttctttctttctttctttctttctttcttttttggaaggtcattgaaagtcatgaraggatatagtaaataagtcaggtatttagagagatgagcaaagagcccatgtgggtaagagaatataagaacagagaaaagccacagatgaagaagagtaatagagtgttgaggaattacggaattatggcatgaaattggcatgaaatagggaaaaacacgtgggaagaaaagaagatagaagatggaatatggttcattttgcctgccctcagagatggattgagcactgtctatatttttggtttgatttggcctccacagaaaaaaatgttgcaattgttgaaaaacatccagagtttcactggccctttccccttccatggaggaaagcttcattatatataattatgtatctttgtatgttgtattactttagcattttataaatgctttcatgtttattttattattttttaaagaaatagagatggggtctcgctatatttcccaggctggtctgaaactcatggactcaagcattcctcctgcctcagcctctcaacatgctaagattataggtgtgagccactgcacctgatctcatgttgattttattatatggctattataataagatatatggaatatagagatatgatttctgtataagaaggaaacagaaaataataaatgaagtattttgaccaagttcatagagcaaattgttgacatctttggagccagagtgttctgacaccagctgtgtgatcttgggtaaaaatctctgagcttcaatgtctcttatcaatgaaattgagaaaatgatactgaagaagattattgtgagggtctaacttgttggctttactaagtagtatactttttcatttttaatatttcatatataacattcaaaaatttaggaaaaatttacaaactgagctatgtcattacctttatttcctttgatatgtccctgtatagaagaattttttttttttaaacagtctcgctcttgtcacccaggctggagtgcaatggcgcgatctcggctcactgcaacctccacctcctaggctcaagctattctcctgcctcagcctcccaagtaactgggattacaggcgcccgccaccatgcccagctaatttttgtatttgtagtagagacagggattcagcaggttggccaggctggtcttggactcctgacctcaggtgatccgcctgtcttggcctcccaaagtgctgggattacaggcatgagccaccacacccagctatagaagaattgttttaataaactatgtacagacattagttaccgatactttatacatacttatgatgaaaaatatgatgttagaatacaatagcattcaggctgggcacagtctcttgtttatagtggaggtcggtcatataggcaccctctgcctggcatgtaccaaaagttcagatccctaaaaggaaagcaggtattcagcataagccaaattgtttgcgcaaacagttcagacagtaagccactcttatgagtactgggaatggtgggaactctcctgaaatccagattctcagatgttagccacggacaatgttgtaacaggcctttctaaggatagcagtctcaggcctgctatattaattcttttctgtatacttggcattttaataatataatttaacaaatgtttattgagtgcccgttatgtacaaagcagcatgctaggcaccaagcatataaatatgatcttgatacaccacatgttctcaaaaaacttgagtcagataagtgtggtaggtgggaaagataattcctttttattataattgaaattcaaagtaaatggctctaagagagtatatttgttgctttatggcgtctgtgacaaattagcagagacttggtggcttgagacacagaaatttattctcttacagttctgaaggctaaaagtccagaatcagtattgttgggcccaaatcaaggtatcaggagggccacactttctacagaggttataggggaggatccactcctttcctcttctatttcttggtggctgttggcgttccttgccttgttgcctcgtcactgcagtctttgcctttgtggtcacattgccttctcttctgtctatgaaatctctctttacctctcttttataaggacattcatgtttgcatttagggctcatccagataattcatgatagtctctctatcacaacatccttaaattaatcacatctgcaagattctttttccatgtaaggtacaacagcctctagggtataggacctgatatctttagggtcattattcagcctaatacagagagtgatttaaaaaaaaaaaaaatgcaaccaggtgcggtggctcacgcctgtaatcccaacactttcggaggccaaggtgtgcagatcaactgaggtcaggagttcaagaccagcctggccaacatggtgaaaccatgtctctactaataatacaaaaaacttagccaggcatggtggcatacgcctgtaatcccagatactggggaggctgaggcaggagaatcacttgaactggggaggcagaggttgcaatgaaccaagattgtgccattgcactccagcctgggcaacaagagaaaaactcggtctcaaaaaaaaaaaaaaaaatgctgaggggcataaaataaaaacaccactgtatttattactcagtttttgcattgctataaaaaatacctgaaactgggtaatttataaagaaaagaggtttaagtggttcacagttccaccagctgtataggaagcatggcttgggaggcctcaggaaacttacagtcatggcagaaggcagaggggaagcagtcatgtcctacatggccagagaaggaggaagagagagaagggagatgtgctacatacacacttttaaacaaccaaatctcatgataagtaactcactgtcacaagaacagcaaggggaaagtccttccccatgatccaatcagcccaccaggccccctcctccaacactgaagatcataattgaacatgagatttgggtagggacacagagccaaaccatatcacccacataaagaagacaaattggaaaaattacacaagtaatgtggactgtttatacactctgctgtttattataggatattaataaaaattgggacctaagtgttttaacaataggggattatttcttaaaattatggtaaatccatgatgatgctctattcagctaataagaagtcattagatattgttaacagatcaaaatcatattatatggttccagttttataaaaatgcatatatatgtatagttatgtccatagaaaaatattggaaagatatacctttaaaatgttcattccaggagataaaattatttttaaaattatttttctcctttggactgctgtgttcttaatattttatttactaatatttgtttctcttatatttagaaaaataatctattctacacttagagcaggtttgttagaaaaaaatggcatttgagacatactcttttttttttagacaaattctcactgtgttacccagactagagtgcagtggcctgatcatgcctcactgcagcttcaacctctcaggcccaagtgatcctctcacttctgcctcccaagtagctgagaccacaggcgtgtgccaccacacccaactaattttttaactttttgtagagatagagtctagctttgttgcccaggctggtctcaaactcccgggctcaagcagtcctccagcctcagtatcccaaggtgctgggattataggcatgagccaccatgccctgcctaatagctaaatttttgatcaatagagacaggggaaggaaccaaggtgtttaaaggcagcaaagtacatggtgacacgtaatctcagggatacagtgaggtttgaaatgttatgtgagtcccactggggtctcgaatgttagttgggctttgttatactactgtataaaacctggctaatttatanaataaatcttaatcatatatttatttgtataagtgctttagaatataatagatcagcatggtttttcagtgcaattgtgtgaacattcttaatactcagcaattttataatggtgtagccagtttgaataatctaatttacatacatacttatatcatttgtataatttaatttttatcatttgatgaattttttatcttttctttcaattacagtgacttacagggaataaaaacaaatgctaaaaaggatggaagtgactggattctcaatggaagcaaggtgtgtaaaaraggacttctatagcccttcttttcagagtcatgccatgggtaacaatgtctcaaagacaactcattaattctattaaatctagggactcaggcaggaattgaatttatctaagttgttttggagacagtaaatttacaacatatattacttaagatctgtggtagcttcttctatatttcattttgcatgccccctcactaatatggcaaaggttgttttagcttccaaacagcccttattaaaccagaaaaagacaaggtgaggctcacattgcccaaatgtgggacaaatattaataatacttaaactttatgttgataaaagattgggggaaaagctttctcatatagatcaagaagaatttcaaaagattctaggagaaggccaggcacagtggctcacacctgtaatcgcagcactttgggaggctgaagcaagagattgcttgagcccagaagtttgagaccaacctaggcaacaaagtgagaccctgtctctataaaagtaaaaactaaaaaaattagctgggcatggtggtgtgccctttggtcccagctactcactcaggaggctgaagagggagaatcacttgagccaaggaggttgagacagagtaagaccccctctcaaagaaaaaaaaaaaagatcctaggagaaaaagatatcagtgatacagtgatagaatttgagagccatttgagaaccattcagttctactaaattaatcaactcactggtagaattggagagcgcttccaattaaggttacaaatgggctcaggatctctgatatcaatgagggcaaatgcatttgatatcactgagggcaagtgatattgcccacctgaaatggtatctggtatatactcagtaaatatttgttgttgactgagtgttacgtgaaggaaagatgttcattttatttactgttctaaaacaatctttctgaaaatatgtgccaaggtctgttgaagaattagtttttataagtttgggctattatctctgtatttacaaaattgaatcactggtgttcttcaaatatactttaataaatatttgtttaaataatttctcctaagaattataattaaacggatgatagctccaacatataatcagttaactcctcacatatagaaggcttgttttgaaaggggagtgggatatttggtcagaagtgaaatgggaaccacattctcttatgcctctagctctctaagcagacctcgtctgctcagccatagggttttgtgggaaccacacaggaaaagtaccactgactctgtttcaaaaactctattagaaatagcaaaaaactgaaagcaagtaaaagtaaaggaatgggtaagcaaatacrgtgcatctgaacgaatgtgcagccattaacactagcaacacaaagtttttaacagtacaggaaataattatacattaagtgaaaaaacaggatatagaatgcaagtataggaacatttttactatattaaaatttaaaaatatgagaaaggaaattatcaatgatagttgtattatgtacttatggagaattatattttcctttttcttthgaactttacattctctatacaatatctgcaatgattttctgttattttataagcatttaatatcctcctaccacccaaaaatgttggccctcattagggataatttcagccctattcaaactttggagtgtcataattaggaaacaaactgagaaagtccacttgcaaggaaaattctcatataactctattagaaagggggatccaccatggtgtttaaactcactttaggtcgcactgttgtagaaatggttcagattttattaatcctttgctataattacttccaataagaacttctggagaactccacttgatttaccaaattgagctcagcatattaaaatgaatagtttttgcccaatgaatttctcctcccttcctttctattccattgtttatttattatctgtagttaaaacatgtatgagaccatttgagagcatactgtagatactaattcctggatgctgtgtgatgcaaaacaaacaaaaaagcactcatagcatttcaactgtggcagctatacagacattaggaactagacagaaaggtaggagcttggtagacttataaggtttttgagcaagggagtcgtgtaatggagcaatactgttgaaaaaatatttttgccaagttgtatagaatttttttgaggaacatctttttcaaaatatatttttaaaacatcctttggcctcctctgtgccaaaaagaattctaagcacttaagatagatatatgaataggaaatggctatgagctcctagtaaggaggcacgttgatgatcttttattattgtgtcacctataaccatactgccaccactatattcatttgctgttgtgtagacaacactaacattatttgcccatttttcattatttgtatgtatcagtgctgtgcattttaggtgatgggagtaaccaacatcattttatacccctactatttcaaagagagagagataaaaacagatcattttggtaaatttgaggtgttgtaggaccgcttaacccagcctggagaatttgagaccttttggccaatctgatgtctaaaccacccaggatgagtacaattcattgcagcagagttgggaaagggcctttcccaagtagcagaaacaagattttcaaagactcataggtcaggaagacctcgcaacgtgatggacagcaagtagtttagtagagctgactgaagaagaggaaattggggaaagtgggacaagcaataagccaggtaaggagaggtaagctagtgccagtttgtgataagttttctatttcctgctaaaggttttgaatttatcctgaagcctattaggagctattcaaaaatttttaagtgtgaaggtgatatgatcagattgcatttagaaaaatctctttgacatcatgatgaatgatacagctgtagagagatcagttgtaggaacttaagaaatgatgagggctggaaataaggtaattacaatagacttgaaaggaagtgaataaattccaaaagtattaagatgggttagaaaaaactagatgctgaattgaatatgaagcaggatgataatgtaatttattgaagcattcattgagatagggaaataggttgataatcaggattggataggagtaggggtgggaaggaatatgtcctgcccatgagtcatcaggtggaactatccagaagcaagtacttattcaggtccaggtcctatcaagaaatgtggcttaccaggagtttgaggctgcaaagagctatggtcacaccactgcactccagcctgggtgagagagaccctgtctctaaaaaaaagaaaagaaacatggcttaaataaagatttggagacatcagcatgtagagggtgactcaagccgtgaaaatgattgagatgaaccaggaaagatgcagaatgagaagataattattaatatttgctctgagtatactgttttctgtatcaatatcatctgataatccctctcatttggcttgtcatttttccctccttaatcatagtttcctatttagaccattttaaaggaagcaggatatcaattacaaaaatcaaaaatagtccttttcaaaaactgataaatctgagaataaataatatagtgccatttacagcagattttctttctttttatttttcttttattttcttttctttttttctagagacagggtctcactctgtcacccaggttggggtgcagtggtacaatcataactcactgtaacctcaaactcctggactcaagcgatcctcctgcctcagcttcctgagtagcttggactatatataggtgcacactaccacatcagctaatttttaatttttttgtctctactattttggcaaggctggtcttgaactcctgagctcaaatgatcctcttgcctcggcctcccaaagtgctggggttacaggtgtgagccaccgggcccggccagattttcttttcttatcagtggcttccttctaaaatacaatttatcatcataatagacaatttggtttcatttttaaagaacataataatctctgtttattattattatgtataatattaatagtgaaaagaaaatctataggtttcattctttgaagcattaagtaatttttcccctgatccttgataacatcatgtgtgaataatcaactttgcagatatttgggtagggtacagagagaggtatcaagcatgtcttgtctgttttagttttctgtaatatactttctcccaatcataacttgcacatagaattgaattatcatggtgcattaataatgtacttggggttttgcaggtgttcatcagtaatgggtcattaagtgatgttgtgattgtagttgcggtcacaaatcatgaagctccctcccctgcccatggtattagcctttttctggtggaaaatggaatgaaaggatttatcaagggacgaaagctacataaaatgggattaaaagcccaggtgagtgataatgtaaatcatattcagatactaattgagtttactgttaatcagataggagacttacatagaggattacatgtggcacaattttatttcctatgctgaattcctaaaatatgcttttctgatgtggtaatgagatttattctcatttataccactctatctttctgatggtcagcaatagaaatgaatcaaggtattttgaatatctgttttagaaatggcaaaattaactgcatggtaacaagccatctatttgtaaaatgcattaaagaaaaatatgaaataaaaataaagtgtggccaggcacagtggctcacacctgtaatcccagcactttgggaggctgaggccagcggatcacctgaggtcaggagttcaagaccagcctggtcaatatggtgaaaccccatctctactaataataaaaaattagctgggtgtggtggcaggcacctgtagtctcagctactcgggaggctgaggcaggagaatcacttgaacccaggaggcagaggttgcagtgagccaagatcacgccactgcactccagcctgggcaacagaatgagactctgtctcaaaaaaaataaaacaaacaaacaaaaaaaacccagaaaatgttctttctatacattaccaaaaatgcatgttttgcttaatatgtattagaaatccttagttccaagtaccttgagaactggacagtattagagctggaatgatagtgtattgcagtaggaaagccacaaggtttagaatcagatggctgtgggttcaaatccctggtttaccacttactagttatgttcattaactactccaacttggcttccaatttgtgttttgtttttttggaaaaaataatattcacttcaatattcactgggttattggaagatttaaatgagaycattctctacattttttgtatggtctcttaggataccgcagaactattctttgaagatatacggttgccagctagtgccctacttggagaagagaataaaggcttctattacatcatgaaagagcttccacaggtcagaagtgtttaaagattccatcttttgactgaataatgaattggaatagaataatatagaaacatgttatttctatattatgcattcaaatttatacatgcaaaacttgtgaaatagctaatcatttgagtattaaagttgtaataaaagtatgagttttatagggtagttaagtaaataactgaactcagtaatatccaatcaaagcttataaagtaagtaggaaaaacagatatttcagttctgtgattccttcttagaatgattttagcttcttaactacaattcaaraacttttagctctttgtaaggaaatgtcttgcaaaacatttgatagtttgccagtttttaaataataactgtgaatcaaagggaaaagtataaaattcagactgaaaagttttagccacatagggtcagtccctaaacagctatggttttaaagtatggttgacaagtgattattgagcctcagatgccagtgtaagggggtactcctgcctagtgactgccatgaaaaacaccagcatgatggaatcaaactgactaaggctacttttacattaataggtagaatttaacttatgtgctttaagatgtttatttccacagatatattgagtcatacagtgtgcagagattaataaattgaaataagcaactggggattgtttttaactcacatgtgagtaaagagaagaaaaattaaattgcatatatataatgaagacagtcattcatgggcatggtgttatgtgactgttgtcccagctactcggaaggctgaggtgggaggatcacttgagccctggaattccaggatgtaatgaactatgattgtgcaactgtactccatttttggcaacagagtgagactttgtctcttaaaaatttaaaaagattataaaaaaataaaggtagtcattcataaaaataaaggatttgctttagaaagtgattagagatatgtcaaaagaatctcataaatctgttttcttataaggagttaagatataaattaatctttatgagtttattataaagataatttataggatttatcgtaattgaaattgtgtgaaaatcacttgcataattagagtaatgtttaagacctaatttttgtgttataggaaaggctgttaattgctgatgtggcaatttcagctastgaattcatgtttgaagaaaccaggaactatgttaaacaaagaaaagcttttggcaaaacagttgctcacctacaggtaagcttgtcactgtggtttagtattagatggtatcagtttactaatctgaaatggcctggggtaaatagaagtttggagttattttcatgtaaggtgatattagaaaccatggaagtggatgagatcactaaggagagatagtagagagtaagacaggagtggtcttaggacacagtccttgaggaagactacaagatttaaaggtagaattcatatttggaattcatattgtctgaaaaggaggagcctgtaagatgactgagaatgaataaacagaaaggagaaagcaaatcaggagagctttgtcacagaagctggaaggaaagagggcttcatggagtagggagtgggatcaattgctgcttaggggaaaaataagacgaagggcaaagagtgttcattgaatacaatgatatggagattatttagtaagagccattaatggaggyggagggtgacacacccgatgagtagatagaaatgaggacgtaaaacaatactgatggtaggcaactctttcctgagtttggctgtgaatggtagttgararaaagggtggtaagsgaagaggggaggggaaggagatttgagattcaagggagatatttgggagttattaattttttgtcgttatttttaggatgggaatgygggtgcatattttaatacctgtatataaagaaaggatttaataaagagggaaaggttgtagataggaaggaaataatcaactgcgtaaggtctttgagaaaggstgagtttgtggatgctgacacatggaaagataggccttcccatcaacaggagagggattccttcatttgcacaggaagaaaggagcaaaggacatctatgagttcagacagatacatcactctgttggtagaaaactacaaaagttctttatagaagacttctatttctttaaataacgtggccaggcacactgactcacgcctgtaatctcagcactttgggaagttgaggcaggcagatcacttgaggtcaggagttcgagactagcgtggccaacatggtgaaaccctgtctctactaaaaatacaaaaattagccaggcatggtggtgcacacctctaatcccagctactcgggaggctgaggcaggagaatcacttgaacccaggaggtagaggttgcagtgagccaagatcgcaccactgcactccatccagcctgggctacagaacaagactccatctcaaaaataaacaaataaataaataaataacaatagagaaagtccttgaaagacaggtgagtgaaggaggcatggaggtgttgcagaagggtgaggsaggtatgaaatatcttcttcagaatgagaaactaaactactttctgctttttgtgtatcaatcagctttatgataagagtttagcttcccaggtacaaacatagagaaaagacagatgattgtgtttacctaggattgagttttcccaggaacttgagggtttttgcaaaagaactcagtatatagtggccgcagtcactaaatatgctaattaaattttagaccctatagtttctttttaaatgaaggaatagtttataattccttcatgtggtcatcaaattggcaaaacatctcaccagcaaaaaacctggagttgggatttgacttaaaaatttttaagtagaatgactggctgaaaggctttgtgaagggaaaggtagaaatgaaacaacttggtggcttttcagaaccagcattctagaaattatgttcaagtgtggtttatgtcctaacacagctacttgaatctccgtagtctagtcgtgttctctctctcaaaaatagtttcctatttgtaaatatataaaatgtatttgatttgcaaaattgtaaaattttgactataaatctttaaaatttataacgtttgtaaatatttataaaatattttcctacttgtgaatatcagagactgcctcatagcgttgttgtgaggattatgttgtagaaaaaactgggttcttgtcacaggaccaggataatttgggcacgcagacacattgtagattgagtagggcagggtttattaaatgaaaaggagaaaggaactctcagcaaagtgaaagaaagtcctgcgagcagttctcctgcctcacagattgaatcctaggtcatcacacaggaacaggagaggctaggctcctctcctctgcaaacagtgtgaacttcccgaggctccaccccgtcctcccagtgcacaggtgggcattattcagaaaggatcagttgggaaagggcaggcttcatctgggaccagcagtcgggtttttcagcctttaggctgtttaggcttgaaggcagggtttcaccagagaccctcggctgtctcctgtctctatcaattagatggggtaatatacataaagcgcttggaatattgcctggcaaagtaagcccacattaaaattagctgttatccttattttattccttacataatgccttgctccattttgtttcaatatgggagamctttttaccatctacttcctcttgctcttgatctagaccctctctttgtcgttttgggaactgtttgctaccggtattgtcatcaaattaactttttccatcctgaaaaaaagtctttacatcctaacttttcttattgacataacaaacctaaaacagttgttctgaatctctaaaaatgaggtacactcaatcaagaaaacatttaacaaaacagtatgacttgacttgattaaattctgatttccttaagagcaaggatgttatactttatattccctttcatttatggatcactgatttacacgtatcagaggttctcagtgaatgccctttcactcaggtgtttagaaatgtcaggaatgaggtggaggtgggtgtgcacagttgactggaggtataacttgtatagtgccctggaggacagtgttgttaaatgtcctgtaattcacatttggattacaactaattgtgtcactcaaaatatcaataatttcccattgagaaaaactgacatatatgattttttcctttttggttcactgaacaaatatatattgattgcctcctaagggtaatgtgttcaactgtaatttgatgggtgtaactctagaaacacatactacgctcctggcaatatgaaggaagtgttaccacttgawatcactctgattttctcaactgtacccaaagtggaatgagtatcatttgcttctgaaatccaaccaccaccacttaaacatcaaaaatgtttactaaaacacttataccaaggccaggcatagtggctcacacctgtaatcccagcacgttgggaggcctaggcaggcagattgcttgagcccaggactttgasaccaacctggacaacgtggcaaaacctcatctctacaaaaaatacaaaaattagccaggtgtggtggtgtgtgtctgtagtctcagctactcaagaggctaaggtgggaggatcgcttgagccctggaggcagatgttgcagtgagctgagatctcactattgtactctagcctgagtgacatagcaagaccctgtctccctgctccccacaaaaatgaatacaaaaacaaaaatatacctttagccttattttggctaaaggtataacagttgaaccaaaagacatgtttccattcctttggaaatctacatttcctgtgtttatgaacttaatactagattacaacaaggatgactatattattacccagattgcctgaatggctcagaaggcatgtaatttgacatttaaccatgaaggaaataggaaagtggtccatattgttttctcataggggaaaaatattcttttaaaatatatatttattgtattttaatagcaaaaaataaataactttaatcattcctttttaaagaagtatcattttattgttgccttctttcaaagttagttccctaaactttcagtaggtggcagtagcattctacttccacaggtcacattattgatagctagtagtattgttttccaagtaagtttatatgttctgagatttctgagatatgtcttctgatcttcctattttatctaaataaatatatttgaataatattttcatatttcaagctaggagtatattcagagatgatgaataaccgatactgtacatacctataccttgtattcaagagctgggtacactatggatctagttattcaattgaaatagaagagctttaaatgttacaatatacttggccacatgtcattttataactatataactattcagtttccattctctttgttatccttgaattttggacattttggggctttctgaccagttgaaatgcatgtcacaaaatttattttctttttagaatagaaacctacgtatggatgtagcaataattattaggatttttaaaatctatgctctccatagtttatgtcgatcttatggttttttgcggaatagacaataaaacagtaaaatccagatgttaaataataatggatattattgcttgactgctccctatctgccagacactgctaagtgaatggtctcattctttttcttcacaaatctatataagtattttaattatttttattttacagttaaggaaattaaggtatagagaggttaagtaacttgccccaaattacacatatattctaattccagaacctacactctttacstatatactgttattactgcccagaagtgcaaagcagatgggccttttttcttttcctatttccttcactcagtgggcaacgaagtgaaaatggaatgttttttctaatctaatgagagctcttggttagtcatttcctgtgtggtatgtgttcttaattctaagggcataaagaattagggagaggaatagagaggaaaaaaataatacttcttcttgacatgtgtctaaaatgggaatatccagtttttaagaccttgagcatgggactaattaactatcaaatagcaaacctagtgtgtttcattttatattttaaccataatatgtgagagcaactgatgctgttgtttaaatgaatactgggctagataacctctccaaggtgttctccatttccataattctaagaattctgtcattcagaactctgaaaaagactccatccagcccacttagtaacttcagaataatttttaatgctagctgcagtattatttattaacaaatataaatgacttaaaaatactgctatgaccttgtcgatcattcactaagagcacttgactagtaatgtgtggtctaatttttagttgcctttgattagaggatgatttcagaaagcataatgcagtgtctgcagtgaaaagcaaagaccaaatctgtttagtaacgctcaacccaatggcaagaatatgtaaatatttaatctttttatcctcagagagtaaattatgtactcttggagacattattctctcagacctctggacttcactgaatgcactgatgcaagaattctaaatcattccattctggtttgaagttttacttcagcttctagaagtttccagcatttacaaaggaatgactcttgtatgagagaatcaggcttagatatctttactctttcatattgtaaagacagtgcataaattcccaaatgtggcatcatgtaggcaaaaaaatatcttgagacttgttggatccacccttattttccaaatraagtgtcatacatagtgtcattgaactaaactaggagtaggcttagaaaccatcttcagggattttcatggaatactcatctgttttcgatatatagattatttgcctatttttttctttttttgttccatctttatattgtctaagagtaaacttcaatgtgtgggttgggagtgggaaactttgtgctgattaaagggtagatatttgacctaaktaaatatatgatgaatagaaatggagatagaaaaaattaagggaaacaataagcggggaagaaagttttgatgtgacccagcatgttcagaactagaggccagaatacagagatggaaggagtggggtgccaaccttctcattgcttagttttggaatcattcgatgccagttacattctctgtttctagaacagggtgaaataaaaccaggggaaagacagtcagttggagttttcatcagcacagtagttatgttgatatacctgtaaggaatctgcccctcagagctttactccacctgatacaccctggtcttgcttggtcctgggtctttttacactcccattctactcttttccagaaatggtaagtatcaaaactgtcccaaccaacaatgacagtgaaagaatcagttttataacttgagaattgctgtagccagcattaaaagcagaccatgtatcttctgagaatgtgtcccaccaccctcctttgagaacacagctgtggctttggacttggtagtacctaggtgggatgtgtttaatttctagtttgagtttcactgcaccacctttgcctgtaactttccatgtatatgctattagccacagtgaagttcttactcatttcacagcagaatgatcagaactgtttctatctgaattttcacaaagaagataggccagctgaccatatctgggccttggacctaagaaatcaactagaatggagtatacttttggagctacccaaagtgggaacccagtatttcaagttcaagccaatttcctgagggaggctcaagagtcagtgccaaagagaacagatatacactccaagttcagagtgtgagagcctagagtcaggaatgaaataaagcttgattgaagcaaggacagtcagcaacaattgagaatggtctaaatagaatgatttccaaaaatgctaatgggttgtccatggccagtaggaggaggtaggtacatagctatattaacattgataatcccagaccattcagtccaagctagagactgctaaacaagctattgagaggtacgggaggtgtattcatccattttcatactgctatgaagaaatacctgagactgggtaatttattaaaaaaaaaaaagaggtttaatggactcacagttccacatggctggggaggcctcataatcatggcggaaggtgaaggaggaacaacagcacatcttacatggtagcaggcaaaacagcgtgtgcaggggaaccactctttataaaaccatcagatctcatgagacttactcactatcacaagaacatcatgggacaaacccacccccatgattcaattatctcccaccacgtccctcccacaacatgtggggattatgggagctacaattcaagataagatttgggtagggacagagccaaaccatatcagaagggataatgtgaagggatgaaagaggatgagggtactggattttgatctctttagtactctgattttattctattgctttctacagatctagattaaatactgtgcaatattaaataataccttatattttgatgtttatgaacatatatagaaaccccttgtccctccagatgttagaagcagagtagcaaaatctgtatacttaatttcattaataaagaaaaaaatcttcaaggatttaatctctggaggaaaaagcaacaggtgttttcaacggctgtacctaaataactgtaccacaagatggtgctcacacattaaagtcatgctgtttttcaagaattttgcctcgtctaaattttacaatctgaaacaagacattgtttatgttttaaactatttttgcatcttttagtacaaatttccttagcactgaaatatagtgagttttaaatttaagctgatttggtaacaaatgccatttttatggaggaaaaaaccaacaattccacttttgtttgccctaaagatcttttattgtataatttctgatatgttaagtgggttgaagtttatatttctaccatgctcacttttttcttttatttcctttaaattcaagacagtgcaacatmaattagcagaattaaaaacacatatatgtgtaacccgagcatttgtggacaactgtctccagctgcatgaagcgaaacgtttggactccgccactgcttgcatggcgaaatattggtatgcatgctacagtaattagagtgcggtgtgtgctcagactgatatggaattctgccaattttaagctcagccttgagggtcttaaaggaagaaatctgtgaaatgaaaaataaaagtgagactccactttaaaaaaaaaatgctaaaaagttccattaagcatatgtataatgtgctaaaaatgtttcaagttggtatttaatttttttatcctaataggcaagcaaagttagtatttaattcttaacttgctattgaaaataaaatattaagagtgggaaaatgaagagtgatattgataggatgactgattcattcattcaagtaatagtttaatttcaaattatctgaagagtggcagtatagtgaggctgaaagggaacagtaaaacttaggagtcttgagatagagtccraattcttttattaaataastataattaaacttaattccatccaggaaaatgtttttgttatctgtgaaatgactaagttggacaggatttttctatttaaggtgctttccaattttaagaaaaaattcaggaagaactggctgtccaatcaaagtttcacaggctctattaagtgaaaggagaataaaaatcctattaagtttagaaagacttcgatttgaattaaagattattagcaatggtgttaaagatgagttgaatgaaaaaacatccctgtatgtcagacttttgtatattttaagattttagaatatacagtctaaatcagattctggaagtagatttggtttcctctttttaaaaacaaacattctcccatatcattagcccaagagtaacttagaataaattcctgtcattattcattaacttgtgttcagttcaatcacaggtagaacaggggaaatattttgtgctttatataatgatcccataataacaaaattgccaggttgaaaaataatgtggaattacttttcagaaacttgcacttttgaggagactttttatatttacatttacaagaagttctttgactagtggcaaaaagtgtaaaaaaaatttacatatttttggaaaaagagaagtttggatagccattgaccttgttatttgaaaacctcaggtttatacacatgctcatatttcacactgaaacacaggaggcaactagttatagcccagtaaatatttcactaaaatacttgccaaatataaaaaattagagaaatccaaatattattgtccccaaagtcttgtctattaataattatattgttaatatattgcttagaaatatcctcacctgtcgtatggtctgagttttaaattattttaaataaaaagaagtatctacccttatttttgctttatgcttcccactattgaaaaataagtagtggggtgctgtagcttgccactgtagtaactcctacttgagaagctgaggtgagaggatcctttgagccctggagttcaagactgtaatgagctatgattgtgccactgtatcccaacctaggccctagagtgggtgagactccatcactaaaacagactcacaaacaaaaagaaagaaagaaaagaaaaataagtagaaaagaattttgaactaatgtatttttatgttaaggtgaataaaatctctatcatgaattttaatgatagaattgtgatattatcagaaaagaatttttctcaagcactgcatgtttatgtatacaaacattatatataatactaatacatacacttcaggaataataatctctatataattttctaatgtttcctatatgatagcatatactttgttagtctgccctcttaggttttcacttttatcttcaatttatttctgaaaagtcagaaccctaaaaaattgcttttttatactgaaattcagaatcgtgatcttcaagtagaaagtgacatcattggagaaaaaatgcatattacaagggcaaaaagaactaggtggctgagtaatttagatcatatagagaatccaaataaattagaacatattcaagtctttactgcatgtttttctagcctcaaatagccaaaatctaatcatctgagttttctaccttttgtttctagcctaacaaaaacctagcaagaaatataattaatgaaaaaggtactcttatatgaaaattctcttgaaatatatttcatatgtaatttttatcttctttgcttagctaatatgccgttctaattgcttaataaatgtgcacatttaaacaattgtaaataattagttttctggttttgaagcacctcatgaaaatccatttcaaacatttcttttctgccttttattttggtcatttagggcatctgagttacaaaatagtgtagcttacgactgtgtacagctccatggaggttggggatacatgtgggagtacccaattgcaaagtaagtatagttttctgatacactcttctttatgatgtgaagaaaaaggaaaatttctttactttgtacatcaaatgtagagggaaaggaggtgtgcaatcttttgaatttttcagctgaatacagacaaaatgtattcaagcaaatggaaacagctttttttttatcaactccctactaggattttatttttcttaaataaagtaaagagaccaataaacaaaagcttgatccttggctttatttgaatccttatgtagaaggacaaatagtattttcaaaaattttttaatttttttattttttattttattttgagacagtctcgctctgtcacccaggttggagtacagtggcatgatctgggttcactgcaacctccaccttccaggttcaaataattcttgtgcctcagtctccagagtagstggaattaacaggtgcgtgccatgacacctggctaatttttttgtatttttagtagaggtgtggttttgccatgttggccaggctggtctcaaacccctggcctcaagtgatctgcctgccttggcatcccaaagtactgggattacaggcgtgagccactgcatccggccaaatactactttttttttaaaaccaaaaaaaaaaaaaagcaatacagaaaaattaactggcatatgaaaaggatctaagttgtcacatatcttaaatatctgattatttgttttgttctaaaaaaattaaaaatcttctttctaaatagatttatttccttcaaattgaaagaaatcaaatatatctttttatcatatatgaatattcttatcagtttgaagcagtactaatttgtaaataggcagtgtccccattcatatttcttcctcaatctccagaatttccttttctcctaacagtcttttgcctcagaagtctccccatagctttttttcctcatcaccctagaaaatatatttttctgattatttagcaatgattttggtttagaaaattttcccaaggaaattttttatttatacagaaaagttcagtttgttctgaatctgagagtaagaatgctataggcttctaaaaatgttttaagattatcttaatataaagtatctaaagggaaaaattatgaaacctacattcaaactggcagcctaatgatttcaaatttatctttttggtaagtataattggaaacatttaatatgcttatagtccttagaaaaaatattttactaaaattacattaagaacagaagctatgtagtggctcaatgtttgtgtggtttagttcacatttaagaaaggcctattaggtggggagaaggcaatcatctaaatggcttaagattagagcgtggcataagccttggtctctgttttctcggagtcaactccttcaagttggtaccaagcaaacaatgtagattgatggcttatttgaaatctctggtttcagtttgagagacttatattctctttaagaaacaataatcacctttcttggccagtttgttagttcaaagattgtatcaatttttaaactagactgctatttctcttcccatatatcgcctaatatcaaaaaagccactgaggccacgtgcggtggctcactcctgtaatcccagcactttgggatgccaaagcgggtggatcacctgaggtcaagagttcaagaccagcctgggcaaaatggcgaaacaccatttctactaaaaatacaaaaaaattagctaggcgtggttgcaggtgcctgtagtcccagctactccagaggcatgagaatcgctctaacccgagaggcggaggttgcagtgagtcgagattgcgccactgcactccagcctgggcgacagagtgagactgtctcaaaaaaaaaaaaacaaacaacaacaacaacaacaaaaaagccacatagacacattggcaatatgtggatgtaatgtatagattttgatttgataaaaaaagaaaaatcttctaattgtgtttcttatatcccccagactaaactacattagtttatatatatgttgctgagggttggtttcatagataagaggtgttttctctgcttttttattttgtttttttgtttttgtcttctttaataactggtcttcagcatgtgggtttatttaataagtcttactcattaggctcgagcccgtgaggagtgagatttaagccttgtcattttaagatttctctgccatgctgggaagagctgccttagatgtagaacttcactgcagtgtggttaaacatttctgctgccgcctttcactgttaattttagttgatgactaaatttaattagtaacatataaaaggtctactaatctctgctttactccattggaacttctttaatgtaaaaagaagcctagcccatttacaaatatatatatatatatctaaacgcattgggactgctgaagtaggcttacagtaggtaagtgctcaaaatgcaggtgctagattttgtagagaatagcaaaatccgttcagaaaaaaatgtttgaaaacataaatatctcaagcttttaaagctttcagcagaaagttctgagattgtaaatttcctttgtaacaccgtaaatcatatcagtaaatatttactgagtgtccatttctttgtaaggaaccctgatgaatatggagaagaataagtccaaaagtggtatgttcctagagagctggcacatttaatttgtcttaaaaatcaaatttaaacaaaacaaaacaccaagattatacttgagaaaaaaaaaagaaaagcctttgagtgtgtctaccaggaaagtccaaagttcaataactagctctaagtgctttggccaatgaaagtgttgcaatatacaaaaaagatatttgaaaaagaggcagaatacctacatcctcattccagtctgccaatgatgtgttgttrgtgaccattaaatagcaaccattaattaggaaatatattaacttctctctactttagttcctttaccagggaaacagtattaacatttatccctccccaatcccagagctgagaggataaaatgagatgagaaaagataaaaacaactgtacagtggtacggttgttatcatgactatcaaaagtgaacttatgatatttgggttttttttttctttggtgtgggtatagcaatggactcagccacttagtattttaactccacacattgctgaagtgactattaaccatttccaaaaaacaagttacttgttaactttctgggaaataatatttgctaaagcattagtttatattcctgatagtgatagtggttgtgggaatgctagaaaatatgtatcttttttcttttgttttctataaaaccagtggatttcaactttttaggaaacattaaagataaaaagaaactaagacatcctgtgcatttcctaatctaaaacagactttttaagagtgttatcatatgtgctgaattttacaaaattaaatcagatgaaacatactcattatttttattttgaatttgtaatctctttaatcaaattaatacaaagctatacagattattaacatcttaatagttttttttactattattccaatttaggatgaatgccatattgaaaaaataagtaatttatgaaggacttttattgtttgtacttcactaattgaatagtttatgagttacctggtaagacaaaatttacagtttctaatatattttatttattcattcaatcatctgatttatccagagcttatgtggatgccagagttcagccaatctatggtggtacaaatgaaataatgaaggagctgattgcaagagagattgtctttgacaagtagacatctgcccacatcctggagtcctattacagctaatctcgttttaaatctgctcaagataaaatgtaacttggaaagcgaggaaacactaaacatgtttttacctgctctctctatagagaaggaaataaaatataaatataagattaacacagtggaaggacaaatctttgaagccaaaattctagttttccaatataaggtttaacttacagttttttatgtagccaaaggtaaacggttttctgaatcttgcctaggtgtttcatttatctctaaaattctaaaaagcataaatcattcaaatcttcaaaccaaggcagaaataattttatgtcgctmtagtataaaaacattaataagatagcacattgacttttaaagggaaaagtaaatataacttagcatgtaaactcatttcggctaccatttgctccaaattccctagaacagtggtttttaccactgtactccaaccccgtttttaagcaatggaactctttcttcaaacaaaagcttatgcagaacatctctgtgaaacgctgctgagtgagaactgctttcattgaagctggaagccatcataccttactgccttgaaacccctaggactcagctaagtatttgcctaaccctgaccagggaatgccttggttctgtcaattgctgacatctgagaacacagaataatccatcatttttaatttcaagatattggtacattttataggtatcaaagcaatggcttttcttttgcaacagttaatgtatttattaacttaataattactttatgtcttctataaaccaggctgttaatacaatgatgacaaacaaaactggcaagatcactaaaaaataagtgaataaacaaataagtagtaaaataaggtaagaagtaaatatgtaaaagagataatttcaagcataagtgcaatgtaaataataaagtaagcatttaaaattcaaaagtgaggaaatgacatttgatttaagacttaaaagtaattacaaaaaataaaccattaatttaaagtagctttaacatggaaacagatgtattcttactcaacttagaacacaaacattttatttggtattgttgatattaaacattgttttttaatacaaccattacaactggagagaggagagggaagaaaaaatattttgataccagtctttttaaaattttttttattgtactttattttttaagatggagtctcgctctgtcattcaaggagtgcaatggcgtgatctctgctcacagcaacctccgcctcccaggttcaagcaattctcctgtctcagcctcctgagtagctgggattacaggcacgcaccaccacacctggctaatttttgtatttttagtagagatggggtttcgccatgttggtcaggctggtctcgaactcttggcctcgtgttctgcccacctcggcctcccaaagtgctgtgattacaggtgtgagccactgcacccggcctttttattatactttaagctctgggatatatgtgcagaacatgcaggtttgttacataggtatacacatgccatggtggtttgctgcacccatcaacccgtcatctacattgggtattttctcctaatgctatccctcccctacccccctaccctccacaggccctggtgtgtgatgttcccttccccgtatccatgtgttctcatttttcaactctcacttatgaatgagaacatgcagtgtttggttttctgttcctgtgttagtttgctgagaatgatggtttccagcttcatccatatccccacaaagaacatgaacgcatcctttttatggctgcatagtattccatggtgtatatgtgccacattttctttatccagtctatcattaatgggcatttgtgttggttccaagtctttgctattgtgaacagtgctgcaataaacatacgtgtgcatgtgtctttatagtagagtgatttataatcctttgggtatatacccagtaatgagattgctgggtcaaatggtatttctggttctagatccttgaggaatcgccacactgtcttccacaatggttgaactaatttacacccccaccaacagtgtaaaagcgttcctatttctcaacatcttctccagcatctgttgttttctgacgttttaatgattggtattctaactggcgtgagatggtatcttattgtggtttagatttgcatttctctaatgaccagtgatgatgagctttttttcatatgtttgttggccacataaatgtcttcttttgagaagtgtctgttcatctccctcacccactttttgttggagttgttttttatcttctaaatttgtttaaattccttgtatactctggatattagcccttcatcagatggatagattgcaaaaatattctcccattctgttggttgcctgttcacgctgatgatagtttcttttgatgtgcagaagctctttagcttaattagatcccatttgtcaattttggctttgttgcagttgcttttggtgttttagtcatgaagtcttggcccatgcctatgtcctgaatggtattgcctaggttttcttctagggtttttatggtttttagatcttacatttacatctttaatccatcttgagttaatttttgtataagtcataaggaaggggtgcagtttcaattttctgcatatggctagccagttttcccaacactattaaatagggaatcatttccccattgcttgtttttgtcaggtttgtcaaagatcatatggtagtagatgtgtggggtaatttctgaggcctctgttctgttccattggtctatatatctgttttggtaccagtatcatgctgttttggttactgtagccttgtagtatagtttgaagtcaggtagcatgatgcctctagctttgctcttttagcttaagatttaattggctatattgtctcttttgtggttccatatgaaatttaaagtagttttttctaattctgtgaagaaagtcaatggtagcttaatggggatagcactgaatctataaattactttgggcattatggccattttcacgatattgattcttcctatccatgagcatggaatgtttttccatttgtttgtgtcctctctgatttccttgagcagcggtttgtagttttccttgaagaggtccttcacatcccttgtgagttggactcctaggtattttattctctttgtagcaattgtgaacgggagtttattcatgatttggctgtttgtctactattggtgtataagaatgcttgtagtttttgcacattgattttgtatcctcagactttgttgaagttacttatcagcttaaggagatttttttggctgagatgatggggttttctaaatatacaaccatgccatctgcagagaaaatctgacttcctctcttcttatttgaatacctttatttctttctcttgcctgactgcccaggccagaacttccaatactatgtggaataggagtggtgagacagggcatccttatcttgtgccagttttcaaagggagtgcttccagtttttgcccattcagtatgatattggctgtgggtttgtcataaatagctcttattattttgagatacattccatcaatacctagtttattgagagtttttaccatgaaggggtgctgatttttatcggaggccttttctgcatctattgagataatcatgtggtttttgtcattggttctgtttatgtgatggattaagtgtattcatttgtgtatgttgaaccagccttgcattccagggatgaagccaacttgatcgtggtggataagcttttcgaggtgctgctggatatgctttgccagtattttattgaggatttttgcatcgattttcatcagggatattggcctgaatgtttttgtgtgtgtgtgtgtgtgtgtgtgtgtgtgtgtgtgtgtgtgtgtctgccaggttttggtatcaggatgatgctggcctcatgaaatgagttagggaggattccctctttttttattgtttggaatagtttcagaaggaatggtaccagctcctctttgtacctgcaacagaagatggctatgaatctgtgtggtcctgggctttttttgcttggtaggctattaattcctgcctcaatttcagagcctgttattggtctgttcagggattggacctcttccttgtttagtcttgggagggtgtatttgtccaggaatttatccatttcttctagattttctagtttatttgcatagagatgtttacagtattctctggtggtagtttgtatttttgtgggatcagtggtgatatccactttatcagttttttatcatgtctatttgattcttctctcatttcttctttattagactggctatcagtctatctattttgttaatcttttcaaaaaaacagcctctggattcattgattttttgaaggctttttcatgtttctaactccttcagttctgctctgatcttagatatttcttgtcttctgctagcttttgaatttgtttgctcttgctgttctagttattttaattgtgatgttagggtgctgattttagatctttcctgctttctcctgtgggcatttagtgctattaatttccctctaaatactgctttagctgagtcccagagattctggtacattgtctctttgctctcattcatttcaaagaacatcttgatttctgccttaatttcattatttagccagtagtcattcaggagcaggtggtgttcagtttccatgtagttgtgcggttttgagtgagtttcttaatcctgagttctaatttgattgtactgtggtctgagagactgtttgttgtggtttctgttcttttgcatttgctgaggagtgctttacttccaattatgtggtcaattttagaataagtgcaatgtggtgctgagaagaatgtatattctgttgatttggggtggagagttctgtagatgtctattaggctcacttggtccagagctgagttcaaatcctgaatatcttcttaattttctgtctcattgatctaatattcacagtggggtgttaaagtctcccactattattgtgtgggagtctaattctctttgtaggcctctaagaactttctttatgaatctgggtgctcctgtattgggtgcatatatatttaggatagttagtgtttcttgttgcattgatccctgtaatgcccttctttgtcttttttgatctttgttggtttaaagtctgtttttagagagactaggattgaaacccctgcttttttttggttctccatttgcttggtagatattcttccatccctttattttgagcctatgtgtgttttgcacaagagataggtctcctgaatatagcacaccaatgggtcttgactctttatccaatttgccagtctgtgtcttttaattggggcatttagcccatttacatttaaggttaatattgttatgtctgaatttgatcctgtcattatgaggctagctggttattttacccgttagttgatgcattttcttcatagtatcagtggcctttacaatttagtacgtctttgcagtggctggtactggttgttcctttccatatttagtgcttccttcaggagctcttgtaatgcaggcctggtgatgacaaaatctctcagcatttgcttgtctgtaaaggattttatttctcctttgcttatgaagcttagtttgactggatatgaaattctgggttgaaaattcttttctttaagaatgttgaatattggcccccattctcttctggcttgtagggtttctgcagggagatctgctgttaatctgataggcttccctttgtgggtaaaccgacctttctctctggctgcccttaacattttttccttcatttcaaccttggtgattctgatgattatgtgtcttggggttgctcttcttgaggagtatctttgtggtgttctctgtattttctgaatttgaatgttgacctatcttgctaggttggggaagttctcctggataataccctgaagagtattttccaacttggttccattctccccatcactttcaggtacaccaatcaaatgtagatttggtcctttcacatagtcccatatctcttggaggctttattcattccttttcattactttttctctaatcttgtcttcatgctttatttcattaagttgatctttaatctctgatatcctttcttctgcttgattgattcggctattgatacttgtgtatgcttcactaagttctggtgctgtatttttcagctccatcaggctatttatgttcttctctaaactggttattctagttagcaatgcttctaacctttttttcaagattcttagcttccttgcattgggttagaacatgctcctttagcttggagaaatttgttattacccaccttctgaagtctagttctgtcaattcctcaaacccattctctgtccagttttgttcccttgctggcaaggagttgtgatcctttggaggagaattgacgttctggtgtttggaattttcagcctttttgtgctggtttttccttatcttcatggatttatctacctttggtctttgatgttgttgaactttgattggggtttctgtgtggacgtcctttttgttgatgttgatgctattcctttctgtttgttagttttccttctaacagacccctctgctgcaggtctcctggagtttgctggaggtccactccagaccctgtttgcctgggtatcaccatcgaaggctgcagcatagcaaagattgctgcctgttccttcctgtggaagctttgtcccagaggggcacctgccagatgctagccagagctctcctgtatgaggtgtttgtcgacccctgctggggggtgtctcccagtcaggaggcagcggggtcaggtacccacttgaggaggcggtctgtcccttagcagagcttgagcac

SEQ ID NO: 93247 - DNA, 67731 bp, Homo sapiens
actccctttgcaacctccccacccccagccccttttctgcatggcaggtgaaaaattgaaagtatcgctaattgatcccctcccacaaccaatcagactggtcttaggccaagtcttcatttgcctaggagtataactttgtaacttcagcctctgattggkcgttttacacaaccagtcagatgtttgtatagggtggtgtaactttgtaactttgcttcagcctctgattggtcccctcccacaaccaatcaaactgatcatggacctctgcttcatttacatagggtgtacaccaagtaaccaatgggaaacctctagagggtatttaaatcccagaaaattctgtaaccgggttcttgagctgcttgggctgctcccaccctgtggagcgtactttcgtttttcaataaatctcttttgttgcttcattctttacttgctttgtgcgttttgtccatttctttatcaagacgccaagaacctggacaccctccaccggtaacaggaggagcattagtcagcctaccacagactccaacgaacgttttttgagaggaaatgaaagaatattcctaagttattgggtgccttttcttcaggaatccctgaaagtgggggtttgcaattttccctggattgaaaacagaaatgcttcctacacaaacatgattgagaccttgtactctaggtgtaaaaaaacagagtaggtcatactctgtgggttatggtcagagagatctggttagaagttcccaggtaggcgacagccctagatgtgtgacacttctaggagaatctctggctatgtggatacgtccaggtgtgtaaggcagcctcagggactgccaccacttggtcacatacatgtccctccaactaatcctagctctcaaggacaggyggttctggggcctgtgttgcccatgagacttggtccacggcaagcctgtgacggagtgaaagtgaggggacacccaatttgaaaactcggcaggaagccagactccatgacatacaaatagatcaaagtgaatcggctccgttgtttggggaaatacctgaggtttgttgtttcgtgccaagaagattaacaacacggacacacgtgggtgggttaaggagcagaaagtttaacaggcagaaaaaagagaacagctcccccatgcagagggaggaggactccgaatggatctccccattcctggcgggaagcagactgatatatagaggagggggtttgaagaggtggtatttgatttacatagagcccaagggattggtttgaccaggtgtgccatttacatagccctcgaagaaactggccattccaccttgatcttttattatgcagatagggttttttacttggccagagccttgacacctgcacacatggcaacaaacagaagggaggcgaaatcttccatattggatgcacctgtcttccaggtgcagctgccggcatttatctgtgcaagcttctagcttgcttatttatgcttgcagcttgacttttcaggctgctttctgttggaaaagaaatggttttgggggctgctttttattaaaagaaaagccttaccaaggactcctgtaccctatctgcctaaattttttttaactactatattaaaaggtctgtaagtgggagctggccctaaaagtaggttgtagagattatttggatgtgccaacaagcttcatctgcagcttggactgtctccattggaaggcctctggcagattttgtaaaaagttatataacaattttactataggaaaaacttggctacagatatgaatttatattacccatcattggctggttccttatcctgaacattggtttccttggaatctgattttggcttgtttggcctttaaaaaccccagaagaatggggtttctgccagattattttctggttttcagtctcactgaatgtcacaaaggccttggtttatggttcccaactggtaaagaaacgtcaaactttgcctctcttagttccttctacatgacaatgggtggcagttgctcatatggaagcatttcttttccccctaaagcctatgagacaggctgcaacttaaacccctattttattaaaggagaggaaatgtccaagagcccagagatagtgggtaaaagcatcataaggactagaaatggggtcttcttgttgctaattagtaggggtgaggggtaagtggcagatgtgactgccatccatgcccagacagggaattgtccttgaacctactcatgcggtgtcttctggggtacagtgagtccacagggcaggacggccttggagtcaagagcccagactcacattctatctcaggcttcataactcaattgctccatgaccttaagccaatttagttccctcatctgtaaaaatggggataacaactgaatttacctcatgggattgtgtaatgcccaaccttgtttttactaaccctgtttttagactctccctcttcctttaatcacctagccttgtttccacctgaattgactctcccttagctaagacagccagacagactccatcttggctctttcactggcaccccttcctcaaggacttaacttgtgcaagctgactcccagcacatccaagaatgcaattaactgataagatactgtggcaagctatatccgcaattcccaggaattcgtctgattgataacgcccaaagccccgggtctatcaccttgtaatagtcttaaagcccctgcacctggaactgtttactttcctgtaaccatttatccttttaactttttgcctactttatttctgtaaaattgttttaactagacccccccctcccctttctaaaccaaagtataaaagaaaatctagccctttcctcggggctgagaaaattttgagtgttagccgtctctcggtcgctggctaataaaggactcttaattcgtcttaaagtgtggcgtttttctaactcgctcaggtacaacaattgttgtaaggaatgattgaattcatccaagtaagggaattagagcagtttctggcatgaagtaattgctcaataaagtgtgtcaggttttaagattaattgatctttacatcatgataaatggcaacaaaataaatgacaaatggattaaagtaaatggtaaaaacaacataagaacaaaacattaaaaaatcatataatagaagaaaccaaatattagtaagtttgaatatataaagtgaaaattactacaagttcaaatatatatatatatatatatatatatatatatatatatatatttttttttttttttttttttttttttttgagacagagtttcactgtgtcacccaggctggagtgcagtgacgtgatctcagccaactgcagcctccacctcccaggttcaagcaattctcctgcctcagcctcctgagtggctgggactacaggcacacaccaccatgccttgctaatttttgtatttttaaatagagagagggtttcaccatgttggccaggcgggtctcgaactcctgacctcaagagatccacctgccttggcctcccaaagcactgggattacaggcatgagccaccgtgcccagccgttaaaaaaattttgaaaaggtaaatcataagctggaaaaaagattgcaacgtatttaagagttaatacccttaatatattaaaaaatcaaatttgtaagaaaaaattcaatacatcaagagaaaatatataaagtacatgtaaaaggaagttccatattccaattatgaaaattgcaaatcacggttaaatttataatagccagtgttggttagcatgcacgaaaacagagaaacaggtgctgttgatggaagtgtgttttggtttaattttttggagggcagtcagaaagtaacaaaagtcttaaaaatgtccataaaatggaccttacagatgtccacctggtcgttccacctctagaaatttgtaagacaaataattcggccgggcacagtggctcacatctaaccccagcactttgggaggccgaggtgggcggatcacgagatcagtagatcaagaccatccttgctaacacggtgaaaccccgtctctactaaaaaatacaaaaaattagtcgggcgtggtggcacacacctgtagtcccagttacttgggaggctgaagcaggagaattgcttgaacccgggaggcagagactgcagtaagccgagatcacgccactgcactccagcctgggtgacagagcgagactccgtctcaaaataataataattcaacacagggtctcattctgttgctcaggctggagtgcagtggcatggtaacagctcactgcagcctcaacctcctgggctgaggtgatcctcccacctcagcctcctgagtagctaggactataggtgcacaccaccacacctggctaattaaaatttatttatttatttagtaaatagagatgaggtcttgctatgttgcccaggctggtctcgaactcctaagcagcatcattttttctaggtgttaaactgacaaccacccaaattcccagcataaggattctgcttaaaatatctagctctctgatgaaatatcttcaaagaatatttaatgaccttaaatctcagacaaaaaggtaaggagacaaaatgaggaacccatttccgtacaaccccaatttggaaaaacacatgtgcaagtatgcccatgttaaaaaatatagaagaaaaaaaggctttaaggaaaaaaaaaataatagtaatgatttagggtgggaatcgcgttaatattcccaataattttatatattttaaaaatctataattttatcaggggaaaacgttatgttgcggaaattaattgaycgattgagtgattggttaacggacagtgtccgatgactcatataatcccccggttcgagtccctttaggccgcagacgtttcgcgccttctcgggtgtccaagtcgcgcatccatacaatgaggggtaatatactagattacctgaggtcttcttacggtaaaaacaccggtgtcttaaggtttcccagtggaatttgggggccgggttgacttcggagctggagctcgcaaaggccggggctgctgcagattctgacgctttgtggacccctactaccgagcgcagccgcaccgcaggttttcttcgctgctggttagatccaaagcccatcccatcctagtaaactgggacagcgccgcttctcacatcactatgggggcttctgctccatggcggggaaaggccagaactgctgccttaaatacgcttttgcatcatccggttgctaacctccggccacagcattccccactccaaaatgccacttttccaggtgtgtttgcctaaatttaccccatttacagacttctcaggtgcatcattgggaacagggcgctttgcagtttgcaaaccacctcagacaactccaggtttaaaggataaaggatgacattgtgagcaaagcggcatcaaaatttcagatatttaactttcacattctaaccatacacctttccaaggtcttgtaatactttcacattgtgaatatacatctttacaagacccagtagtacatgggtcaagtgtggcaaaacagacatcgcgagccagccaggagtcgaacctagaatcttctgatccgtagtcagacgcgttatccattgcgccactggccccgacttgctaaagccttctccgtgatagctgatcacccttatacagtttgaacgggcttccgggtaccaacgatccattttgcccttgcgccgcgctcccgctgctctgcctttccccaaaacgcgccccaccaatccgcagcggcttcgtcacggcgctcttcgtcgcactccaacccgccgcgtcggcggcatctctcgcgtgctcttgcttgcgcactaatttgtcctccaccgcctcccgttcaggccggctctcctgcgggscggggaaaggggtgggaagaggctgggagctgcggccgctgtgccagggtgaccggtagagttgtasccgaggtggcggcgcggggcggggcgggcggagagagaaggaaggaggtggttgtgcaggatggcgacggcggcctacgagcagctgaagctgtgagtcccrcgggccagaggcctgaggcgcggcgggcggggcggcaggtgcgggccctggcctcggggagggcttctgagtcccggattgcrgatagggtgtgggagctcctcgcatttaccggttttcctcagccggcgcggcctctcctaggcctcgcccgagtagccataggccgggaaccagcggctcgccggcctttctccaccgtgctcggccccagcgcccacggctgaagagagaagctgccgactggcccccaccgagccggggtcggcgttatgrtgcggcccttcagggcacgcttgtccccactttctatgcagagctaccgactaaatttatctgtatgacttaacagagaaaaagagttttctcttacttaacggacctacagcagcaatttagagtctacgcacaaatcaacaaatctttgttttgcttacagcctatctgggtaycgaagcctgcctgccccctcttcagtgtgcagaaaaaatttaaagtacagtcagtagtcttaaggtcctgaaggagtttactttggtttaaattttaaacagctccagcctaaagcaggttcttaagtcagtgtcgacagccagaggctaatctcggtaattttggtactgcaaattgacttttcggtaaatccaagttcttgagtctttgatacagaggctgtggttgttaagagttataaaataggtgtttttaagggttttggtttgtcttggattamaaacaacatgtgtttatttcccttagtgttacccattagcatccacactttycttgtctgtgaataattttgttgtactcacttcgtgtttaatgctttacccctaggctgtttgaaaatctggtggccacagcctgggaatatctggtaggagaaacaaatgtaattttttagaagcttatctatcyctgtatatragctaaaataccttggcagttaggcatagataccgcatttcttttgcagggaaatgacaccaaaatgtggtttgggcacttaagctcctcagacctcaacctcactagtaacttyctgaaaggttcagtggaaagttagaggtgcaaaattcagagaggtcatctattccacattgtatgtgttgcaaaaaagatgattgctttttctacagtgcaccccctgtgggtgccatttctgtttactgtaatgttctttgaaaaccctagctgcacacttccctccacctttccctattttctcccagttcccctttgcaaagtgctcacctcgtctttggtgaaagagttgaaggaagtgtcttccactgcgtttctggccaggccactgtcacatgtgctctgctagctaattaggttattgtgtatctgataggcactgaagggtttaatgtgatcctacaccagktctcaaatgtgtttaagccatatggagccatggcttcatgcagcttagcgtggcaaagattgaataggatggagaacttgagaattatgatgattgtttttcagckgccagaacactaaatttaaccagttcagaccttaaaacaaacccaaatcctcgcatacataaaagagaaaggaaatttgtccctgaagtagtaagaatgatgtttttgtattgatttttgtgagaagtggaaactcttaaattatttgggtgataaagtcaaactggggttatgtgaaagtcattctctcatttgtcagtcctagctttttttccccctgaaaaaaaagtttagagtgtttctgtaaatgtgaaggtacaacttttttgcacctttttctttaccaaggggtttatgagttagartttccatttttattccttccttttggcccttcctgctctgaggctgctgttgaaggttttcaaatgtggctcctgccctaaggagtattcttttttggatgcatttagaagtgaaattggtttctgtgtaagaattggtaggagatagtagccattttttaaaatgtgtctggagatgtgttttaagaaatatccatgcaaaagagatagttcgattattttattacaaaaggattgctaaaaggatttatttaaatgttgaaatgcttgytttttttttcttttgtttcgttttgtctttaaagagatggggtctcattctgttgcccaggctggagtacagtggtttgatcatagctcactgcagcctctaactcctagtctcaagcgagcctcccacctcagcctctcgaggagctaggactacagatgcacaccaccacacctgtcctacttcggattttaaataataattctgtctgcattatgccatgctttttctccagcccatctctgccttgttgaatttcacctttctaatgctctggttttatcctctactttcctgcttacaatttccagttccatcttactgacctataggatcaarcttgcatttcttagccatctgtatattctagcctttttataatctgtcgcctaatttatttcccgtaactgcccagagccttttcccyacttctgcaaaacttggctcatccccttctagcttcaaacttgggtgttattttgatccttctacccagaatgccttcttcctctctgttctctttacatactggtcacatccatggtagagccaagagatctcaggttttgttagtcagaatggatatggattcatatcttaacttgactacttgttttgtrtcctgggcatagtacttaatccttctgaattggtgtttcagtctgtaaaatgggaatgttgatacttcacaggattattgtaaggtttgaaagagagtttttttttttttattwtttttgtgagacagggtctcacttgtcacccaggctggagtgcagtggtgtgagctcagctcactgcagcctcagcctcccaggctcaagtgatcctctcacctcagcccccaaagcatctgggactacaggtgcacatcaccatgtctggctgattttttctgtttttcagtttcgccatgttgctgaaacttgaactcctcgtcttaagtgatccatgcaccctggcctcccaaagtgctggaattactggcatgagccaccatgcctggcccaaagagagtttagatgaagtacttagtgtacctcataggtaccttctttgagaaatgttttctttccatgtcttttccttcactgagttctggtaacagtttttaaagccaaaaatgaaaaattattgtaacagggttagacaccaaatgtttacatgatttatgtattctgtctcttaggatcagtttacagtgcatttactttctcatggacaagaggatggaaagctagaatggtcaatccatagtactgtttgaaccactcattttgtcacttagaaatgaaatcattatgtacaccgttatgtgactcttactgacagagatacattctgagaaatatgttagaaatatgttaggcaacttctttgtacaaacatcagagtataattacacaaacctagatggtacagcctactacacacctaggctatatggaatagccagttgttcctaggctacaaacctgtacagcaggttactgtactgaatactgtaggcagttgcaacacaatggtaaagatttgtgtatgtatacatacataaacaagaaaaggtacagtaaatatacggtattataagcttataggaccaccatcatatgtgtagtctgtcgttgaccaaagcattgttacatggcacatggctgtactttgtttctccaaccagtttacaccttaacattttcttctctagtcctcctcagtacctaacayagagccttgtgcagagcagctcctcagtgaatcaactgagtaaatgaaaggaactttccagtatagaccacgtactagcactgcaaaaagaacacagtctagggtaatttggaatgtatcgttttgaagaaacacagcttaaaagtcatttcatgtrtattgtcttcccagtgtctctgtgaggtcataggttgataggtatcctgtcattgttgaaaacagtctcataattgcccttggccacaaagtcagatcatacagccaagccatggtagagctagccttggaatacggctggtccagagtccagtgatctttccattycattgcattrtccatatgacctttttttctcttaccagattgctctcgcrttagtcctcagacatgccaggtattraaatgagtcacttacaaccaaatatagttgacatgtccatattaatttccatatgtttaatgtggaaaacagaatattgatttgctcagaatttaaaattcatactttttaaacttccaggcagttctaaatatcctgttaggctccatttttctttttaagccatttgtataggcatggataatgtcagacagtgataaatttgaaattgcaaaataattagactggaaatgtaatttttaagaagcttatctatccctgtatataagctaaaataccttggcagttcggcgtaggtgtcacatttcctttgcagggaaatgacatcaaatgtggtttgggcacttcttaggcccctcaracctcaagctcataataactttctaaaaggttcagtggmaagttagaggtgcaaaattattggatacatttaaagcattttttcttctttttttttctttttcttttaaaaggtcagttgaaactaggtgtaaggcagggaatcctttagwtactgcatcaggctgcagcatgcctctgaagagtactgtttcctcaggaaattgccatttttaaaagagtctcataactgtgaggtcatcagtcagggcagatatgatccaaccttgaaaacagatgtaacctaagctaccttgtgatacagacacatataatctgttcartataatgaacattcatattattcacagaagtctcccggtggagggaagggtgtagggcagctcagattattctcatgagttttagcacagacaatatggggtttgtatccaaagcattagttggctgggagttcaggctagttcaggcttacctaggctcacgtggctagcctaggttagtgctaggctacatcaaatgacttggtatgcttgttttaagtgcgtattccagggccccacattaggcctactgagtgaaaatctctggggatgagcggtggaaatctgcaagtttaactagctatcctggtagtttttatgcactctgaaatattttagggctgggcatacatagctgagttaggaccagaacatgctggtagaagagaattctttggaagatatggggctctggtagattgtgctgtggattagagcttcagattaggtggaatttggacctagtcctgtgaagaagtctggttgagagaatgggttttagggcattcagggaataggatrtaggtgggaacacagagttttgagaaagaggatagcattagaatgagtctttctagaaacaccaactggtttggaattgggttgtgcccctggggagtctgtgatgaacttgagctataggagaggcaaccagggagggctcagtgaggagatacccaaagggaggatgaatgggggaggtaggagcaccttctgcctatgagtgtagtatgtgcaggggatccttctttactaagttgttttctttttgctcaccaaacctagtaaagtgttgtgcctctgtcttttcaaccagagatgtattaaatttgatcattaagaccttgatttaattcttttttttttttgagatggggtctcactctgttgcccaggctggagtgcagtggcgcagtctcggctcaccacaaccaccacctcccaggttcaagtgattcttgtgcctcagcctcccttgtagctgggactacaggcatgcaccaccaggccyggctaatttttgtattgttagtagagacagagtttcaccatgttggcyaggctggtcttgatctcctgacctcaagtgatccacctgcctcggcctcccaaagtgttgggattacaggcatgagccactgcacccagccaaattctttacgtaagatttttgagggaatatgttcttgctacagttttatgacatatcactgtggctsctatgcaaaatagtggtttcattatttttaaaaattgtggtaaaataaaacattaaatttaccatctcaaccatttttaagtatacagttcaggggcaataagcacattcatgttgtacaaccgttatcaccatccatcaccagaaccgttttcatcttgcaaaaataaactctgtacccattaaacaactccccatttctgtatcctcccagcccctggcaaccaccgttctactttctgtctctataaatttgacttctctagatgcctcatgaagtggcagtatttgtccttttatgactggtttatttcacttagcataatgtccttaaggttcatccattktgtagcatgtgtcagaatttccttttttttttttttttttgagatggagtctcgctctgttgcctatgctggagtacagtggtgcgatctcggcccactgcaacctctgcctcctgggttcaagcaattctcctgccttagcctcctaagtagctgggatttcaggtgcctgccaccacgcccagctactgttttgtatttttagtagagacaaggtttcactgcatttgccaggatggtctccatctcctgacctcgtgatccgcctgcctcgtcctccctgagtgttgggattccaggcctgagccactgtgcctggcccagaatttcctttytaaggctgaataatattccattatatgtatgtaccacatttcgtttgttcatttgttaatagacacataggtggcttccacctttttggctattgtgagtaatgccagtatgaatgtgagtatacaaatacctttttgaaaccctactttcagttattttgagtatatacccggaagtggaattgttgggtcatatgggaattctatttttaatttttaatgggccaccatactgttttcccatagtggctgcaccgttttacattcccacccacaaagcaccaggattccagtgtctccgcatyctagccaacactcgttattttctatcctgggtttgttttttttttccttctagataatagccattttaatgggtatgaggttggtaagtagtaatgtttttgtagtgggccagttttactcattgatttgacaggattttaaagagatcagttgtctgaaataagacgtgaatgttacatgagagataaatgttttcagacactagaaaatcgcaatgccaacactgaaagaaaataaaaatatttgatgttaatattataattaaagatattgcttttcttaaaatttaacaagactaattttttaaaaaacactcttaagagctgttgaatcccaggtgactataagattaaatgcatttgtattaagtgtaataccagaactgcctttgttgcatttagcttttagtcccagttccacttctgggatactcaaaataattaaaagtaaggtctcaaagagggatttgtatacccctgttcatagcagcattattcacaacagtcaaaaaggaggaagcaacctaagtgttgattctttcttttttttttatttcaacattttttgtagagatgagatctcgctgtgttgaccaggctggtctcaaactcctggcctcaagatcctcctgctttgtttttcttttcttttcytttttttttttttttttttttttttaagacaggctcttgctctgttgcccaggctggagtgtagtggtgcgatcttggctcagagcagcctctgcctcccaggttgaagtgatcctccgacctcagcctcctgaatagctgaggccacaggtgcataccaccacacctggctaatttttgcattttttgtagaaacggggttttgccatgttgcccaggctggtctcaaactcctgggctcaagcagtcctcctgcctcagcctcccaaagtgctaggattacaggcatgagcactgtatccaaccactttttcttttttatgccatgcttggacagtaatccttaaaagcaaaatgacgaactgaatgaaggtagtcaaaataggagcaattattatacaagtattatgctattttgatatatcttccatagtatgtgtcttattaatgggaaccagaactctgggtaggtatgggatccccttgtcttgacagatatttggtaggattcttgttcagttagagttaatagtgaattggaggctaatcacctcaccagatagtttatataggaccagaaccctttttagtatacagtattactttgaaccttagagatctgttatcaacagtatagataatgaccaaataatcttcttggatcgaatcttgtcttccgaaatccatttcataaaataagtaatatgatagcttgtttggtaaagatttaaacacaaaaatagcaataaaacaatacacaccaggaaaaattataccactgaatgtttacttaattgtttttgacggtttaaatgctagagagttaaagttaatttcactggcttttgaaatgaagcccaggaagcataaaacatagaataaaatttattacataaaacaattatgcttcagatcagtattaagaccaatacaaaagtggtgggaaatgagaggaagagaacagtaagggcatatatgtaggtgccgtgagttaggatgatacctgctgttatggttaacagaattgtgagtcattacttctaatkagcatccctagaaatgttgattccctggcagtcactgttcacattttcattgctccaattcttaagcctagagataccactttcagtgacattatcagaatagcctgatggcagcatcagcaatttagattccaacagcatctctcagagagagaagatcaagcaaaggcctcaggacttttgagcgagacatctctaccttgatccataattactcttatttgtatactttgttataatacttttttttttgagacaaagtctcgctcttgtgccccaggctggagtgcgatggcgcaatctctgctcactgcaacctccgcctcccaggttcaagcgattctcctgcctcagcctcctgagtagctgggattacaggcgcctgccaccaygcctggctaatttttgtatttttagtagagatagggtttcaccatgttggccaggctggtcttgactgaactcctaacytcacggagtcttgctctgtcrccagcctagagtgcagtggcgtgatctcagctcactgcaacctccacctcctgggttcaagcaagcgattcccctgtctcagcctcccgagtagctgggactacaggcacrtgccaccgcacccagctaatttttttgtttgtattttagtagagacgggtttcaccatgttggccaggatggtctcgatctcctgaccttgtgatccacccgcctcggcctcccaaagtgctgggattttgcatgagcctctgcgccyggcctgtaatacagtttttaaatcttatttttatttcaatcttatgtatacggtttaaaagtaagtagtatacaaagcttataataacagaggcatctacttttttaagcaacttctggtattttactccatatctagcgcaccagcatggcacatgtatacatatgtaactaacctgcacaatgtgcacatgtaccctaaaacttaaagtataattwaaawaaataaataaataaaaaaataatagtagcagtaatggtaaaaataaaaaaataaaaaaatgctcatattaggctgggctctgrtttatgtagctgtggttcaaatgaagcctcatggtgtatcataattacatttctttataaaaatgttttgtttttataaatttatataaattttataaaattataaattataaattaaatgtttttaatttcctagaattaaaaagtgccttggttcttgttatttgcttgacgtttttttgagackgagtctcactctgtcgcccaggctggaatgcaatggcatgatcttggctcactgccrcctccatctcctgggttcaggcaattctcctgccttagccttagcggggattacaggcatgcgccaccacacctggctaatttttgtatttttagtagagacagggtttcactgtgtcggccaggctggactcaaacttctcacctcaaacgatctkcccgcttccacctcctaaagtgctgggattacaggtgtgagccaccgcgcccagccgagaaaaacttttaattgcttataatggagatagttttttttctgtgtgtgcgtttgacttttgtgctcttataaacagctgaytttataataaatactttattgctgactgaaatgtacctattaagttgtacctccaaagttgtatgtggaaacaagtgtgacttttcagttcattgatttttgtccaaataattttcattttaaaggtcttacaggtgaggagagtttaaatgcatttatgtaaatacaggtggtcagagtgtaggaagggtgagctgtcgagggcaagcaatatgcatttctctgttggctgtttatctagatgcaagccttgtgtttttgtgcctaatataaaaaagtggaggaattcgatttctgagcttggtgaataataatctttttatgttaaaaatagcattagttattgaacaggtaacacaccctttgtctggagaaataaattatggcaactgtcccccaaaatacagctgtgaacttaaaagatgtagacctctgagtattatgaagaaaatggttgtaataaagcccatggacttcactctgtggtcaaaactgtgtcaccttcctgagacctttctgaaacctgtaactttgtcctggatgtaaaagtaaagcagccaaataggagcagtggtgatggctttgtcaagacactaaagacggtggaagggtaaaaaaacaatgttaaaacccagtgttctgaaaccatttagtaaaattttaataatgcctggagtcccctcttagtgctgagcatatcatgtgtattctgtcatccacccttacctatcagttctatctctttttattttattttactttaattatttttttgagacagagtctcactctgttgcccaggctggagtgcagtggtgtgcactcactgcactctgaactcactgcaacctctgcctcctgagcttaagcgattctcatgccttagcctcccaatagctgggactacaggcatgtaccaccatggccagctaatgtttgtatttttagtagagatgaggtttcaccatgttggccaggctggtctcgaacacctgaccttaaatgatccacctgcctgggcctcccaaagtggtgggattacaggcgtgagccaccgcgcccagcctctatctctttttaatggagagaaggctgagaatggcagcaaggaatgaaatcctttcctcaaatgaatttttagatgccttggtgtttgggtctcgaggtgacaaaacttttaaaaaattattttaagtggaaagactttaaattttattaaacctgggttttaaaaacatttctttaattttttttttttactaaccagggtcaattttgaacacaacaatgtatctgtgccagcctaccaaaggatgatgtcttcaaattgtagtaatagagtatggtgaagaaaaagttatagcctttagacttttacaaaactggtttgaatctcaattccgtgcctaccatcagtgagtccccaaaacaaagcactgaaattcctggctcagctttccctggaatgtattcatcacctgccgcatagcccctagtgcttgcataatgcttagtatgcggtagccttttggtaaatgttaatggcttacacttggaatgcaacttgtgcttccataaaacatcttctgtagatacggactgaaatagtgggtttaaaaaaaatggcttaagactagatgtctcgaatttctttatatttctttggttttaggacctttcactttgttttctttttatagctttattgaagtttgrttgacatacaataaactacacacatggaaaagggaagtgtacagtttgataaattttgacatttttacacccatgaaaccattgccagtattacaatattgaacgtatccgtcaccctgaaacgtttcctcgtgcctgtaatccctcctttttctcccttcctrcacaagttaaacatatatgtgccatatgatccagctgttccacttctagggagttaaccaagagaagtgaayatctgccttaagacttttatacaagaatgttcctagaacckttcctttattcatagtaacccaaaaccaaagttaccaaatagccatcaacaaatgaatggatcaacaaattatgatatatccgtacaatggaatgctattcagtaataaaaaggaatgaattgttgtgttcaggttaaattgaagattgctgtatttgaagcagatttgctttctttgttgtattgattttcctttacttagcatatccccccaaatgaaggaaactagcctaatatttagttagttmcagatgaaccatagaaggttgtaagttatatttgggtaattaaggattgattattcctcagagaacttrcagtaaaaaagagtcaaaagtttgttttgctgcaggacatttttctataatgccaaatagcttatacacaattggtaaatagaaaatgatgtccatgatggttgtgtgggtttgaatgagatttttcataggcaagtgggagtagaattaaaaaggaaaagaaaaagccctcagattggctgctgcacagatagaacagatagaaattcttttaagtctggtttgtgaacaataaagattagtttctggaaaaagaaatagttcttggactcagcctccctccccagccttgctcagcttctggaaaggttgtatcttctcctgtgcctaccttaaaacagcagtctccatcagtggcttggagttctacttcagtctgcatcgttttagtgcctgcaaatgaaaacgcagttttactttattctgttaatattttgtatatcctgagtcagtccctcaccatgctgagttgcttgcctgaactatttaagttgtttcttgagaaaccaactgttatttttgttagactctaattacaaarttgcataaattttaagtagtctctctcaaccgtgtttctacctcctttattttttattttccagagtgagtttttttcaggaacatatatatgggtttctaaaaaaacaccccacctgaatgttaaagtaatttgtttttaaaaatttcctggaaatattttatttaaaatgcatttcttactgtttttagctaatacctcttgcttactatgcgtcagatgttcaaagtacttaccaaagattagctcatttaattyacacratgctgcgtgatgaatctggtattatcgttaktttacagaaagggaataagaggatcagagagaatgagtaacttgtctaaggtcacactactggtagtctggttctgtaggctctggtcctactatgctacattgccttctgtaccctgttgaatataataaactagatttgattatggcatttttttgtatatgttaaattgatggtttcatagcaaatcaaaacctagtcagcatcaaatatacaagtgaaaagagttgcagtgaactcataaggacagcaaacttaacagattcrtccttttagaagctgggaaaatgatgtcaaatttatactctgtaattgtcataataagtagttttttagaagtcttcatttcatttggttagttatttatgttttacatttcttcttaggcatatcacacctgaaaaattttatgtggaagcttgtgatgatggagcagatgacgtacttaccattgaccgtgtgtccacagaggttacccttgcaggtattttacagccagatttagaagtttagggagaaagattttatacataaattayagtaattaaaaaacatcactcagaggtgtgtcagtgtgtggatctctgagtgcattcttattaaaatttttattcttgctacctcattcataggttggtgcatcaattttatgctatctccttttctgtgaaaaggagaaatgatcttgaaaattttaggtagcattttactgtccgtaaggatttaaaaacataatatttattatttttttcccttagctgtattttaacaggattggtttagatagctaagcttctttctagctgtaagatttaagatatttgagagtgaaaaagttgtttcagctttaagagtatggaattttaacagctacttttgttttgaaagctttcatgactatgtggaaatttaataaatgaaaaataaaatatacttcactgactaaaacttgtaggtgttcttaggcaaatgatgtttctaagttttatctacctaaccagttatactttggttatgcttttctgggatgtgaaaaacaaacttttttttcacttgtgtggaacaccctgactttccaaatagataaatacgaaataattttggtggcaaattaatataccatgtgataacatatttagaatttcatatttcacttgtttaaagattctattcacccccagagttctatatttatttttttcttaaagtacaatatttgaataaccatasagtaggcattcagtaaatagcctttgagtgggtgaagtgaagtacgaaaatatattccatgagataatggggtgtaagacaagtatggctataaaatttctgtttttttgattatgtggtaattctggtaggtactatatatagtttgkctttgatcaaatggaattagagctctgttttagtttgataatttgacatttcctatttgtctgttgcttggtggctgctctctcaagatagctgactggttttaactagtgttagtacacttctcctaaagtttaaattatactactctttataccatgttgatacaacctagtgtcttacaagagctttaatgtgggtgtattttcagttatccttgatctttcagtaatgttttatttgtaggtagagattgcagacccatttgaatagactgaaaagctaaaggtcatgaatagtttgaatgtaaagatgatgatgccaaacagtcatcagtaagacacatgataaaatacttccacgcaaagtcagtactgatgagcgactgacttgctgacagtttcttagccagtttcttttcaccactgcgaatgcagactatgkyattcctaatgggattattttttcttccatgaaaaaacctaacatacattctaggagttatcacagttttattgctgttacactccagtttacataacttatagctctatcaatagtgcatttaagttaaggaatgttgcttttcttagaacaaatcatgcaaattgatgtagtcaaagtaactattgaaatcgaactaaatttctgtttctgttggtgagctttttgtatgtgatttttctttctttcctttcttttaaagtcaagaaagatgttcctccttcagctgtcacaagaccaatatttggtatactgggcacaatccatctggtggcaggtaagagaaaataagctaagatgggcaaagaaggtaattagcaaggtagttaaattgttaatattagagtgagtatacgatgaagtaatactttgtatcatgctttaagcagtaaatctcttggttaagtatttrtcattaatttttaaaagaaatactccccaaatggtaaaatttatcagcgtgagcttctattatttaaaaaaaagttttgtattttgttgtgtttcagttagagttgaaatccttagctagataattttcacaaatggagtatgtaaataaaatttttttttttttttttttttttgagttggagttttattcttgttgcccaggctggagtgcaatggcatgatctcagctcactgcaccctccgcctcccgggttcaagtgattctcctgcctcagcttcctgagtagctgggattacaggtgcctgccaccacactcggctaatttgttatatttttagtagagatggggtttcaccatgttggtcaggctggtcttgaactcctgacctcaggtgatccacccaccccagcctcccaaagtgctgggattacaggcatgagccaccacgcccatcctgtaaataaaattttcaatgcatcagtggaacagggtattctacaccttcagccctgtagtaataggacatagtgcatattagcaaatgttacttggttctgagtkgttaagaaggtgatttttgtttagatttaatttgattgagcttgtttgaagttcctattttttcaggcatcatgctagatgctgagttataaaggmtgaaagtccattttgccctgcagttcacagtctagtgagagaggcgtgtaagtagtaaattactgcagtacagtgtgacaagttccaggagagacatgtacatggcaaaactttcagagggggaacttgtgggtagaatgttgaacagacctgaagaattaattgagtaggaaagggttactctgttttatgtatttctggrgtgaggaggtggcaaggtcaggattgstgtattgtgcatgatgttgwgatgactmcttgattcctgaccactcatccttgtaatattgcagcagccagttaggtatactgmcccagcacatttctctaccatttagagagagacatgaaggacataggagtggtgtggaagggacattgccctgtagtgtcagatctcacgtcctgatgctttaagctgcctgctgggaaatgattagcagaggtctgtatcccttgggggtgatgaaagagagaaagagaagtattttctgtctctactttccatttastaagacaaatcctttggttatgaaaagcttttgcttttatcttttttgagaaaaacatgacctttcagtaagaatttttctaaataatatgctgacctttctattcataaattgtaaggttgctttaaaaatgggccttttatctgagtggcacaatatagtctcattctactagcctttaaagttaaacaataaggactcctatttctacctttagagttactatttttataattatgtgtgtttggcttgctttttgcaggtaattatcttatagtcattaccaaaaagataaaagtaggtgaatttttcagtcatgtagtctggaaagcaacagattttgatgtcctttcttataagaagacaatgttgcacttaactgatattcaggtaagaactggaaattgttactaattgcarcgcccraagaagtagcatgggctggggagaggagggtgagggtgttgtggaatacaaagaatgctataattattttaacaacctatagagtaagatcactctacctacttttctacctaggcataaaaaatattttttaaatcatttgttgctcttgttttttttttttwaaagattcagttcttaaattatgcaatttcatrtggagagaagggaaaacagaaatgcacgggtactcaacaccagatttaacttcatatcctctttgtaaagaaataaaatataaatacctttgaagttctactcctcttaactcattcccttctttcccagagaggttttctctatttttaccacatgtgaatgtaagtgtgtgtgtgtgtttatgaaatgtgtatatattctttcaggcagttttccttttgcactattcctgtatgcacagatttcagtaaccatagtttagttaacaccagtacccaaacagcatggcttaaatttcagttactccagtttattaactgaagaattaacccaccaaagatgaaggtgcaaaaaaacaaaaagcaacaactctggaagagaaattgaaattgaacataaatggagcatagaagaagtagctgaccatgggaatgctgacactattcaccattcaagggacwgtaggtatgcagccagaggtcctggtgcaggcgaactgaccgacattaatgatggagtggctgtgacgaaagggatgacagtatcccagagaaagtgatgcctgcaacagacttcccattaaaggaaaccttggagatatttcccaacattgaaagtgcaaaggataaaatgtcagaagttggtttagacttaggaaggtgtatgacagttcaccagggatagaagaaatattctgtatcttaatctatatgacaagaagscggcaagcactgttcaagtctcttgataaatttttttacaaagaaaatattttttattctcggtgtttctaatgttttaaattatagtgtgctaaatattagttttacaatttgttcatktatgcttataatttactatatataacttacaagttacatctacaacgtaactatataagttaatatctataactaatatctataacttacaatagagtttttaatgttttgacaaaaaaaatttttaaaggtcatgaaacagtcatagtttttacaattgactgttaagatagcttaagattattaagatgaaaataacatggtaatttttacattcccactttacaaagtaaagactgcctgtatycatatttaaacaggatctgtttttgctcggagtgtgtatgaaacttacatgaatggcattgccctgttctgattctttgaaacttactttttaaagtcaacattgtttagagatatatatacctgttgagagtgattgttttcttaatgtaattttagttacatgtttgctatttaaaaattttaagttgtatttttacacccaatttataagaatgtttctagaagaaaatatattattctaaaacatataacttaggataaacattttaaaaaataaaattatagcactgyctacctgagtaaaactacaggatatgctttttatactttagaatttcttttttattatatatatcaagaaatatatatcaatatcttcattctctactaggcatattttaaagaaataaaaacagctgtatttatttaatagaccagtcatatttacttagacaatttcttctcgattgttattctttgttgtcaagctgtgtagctaattttaaaaacatgtctgagcacaaataaaaaattttgtatatgtagatttgtaacatgtagattaacaagttaatcatttagtaatgattaaacgttaccaaacattaacaattgttttttaaaacaaggataaaaacaaatgtcaatcttagtattcattgggaaagctagttaaaatggtttcccaaaaataaagataaatattgcttttactggactttttaatctttgttttaaagaaaaagaattccattttacttctcgtccatcccaaaccagggaacgtttcttgagaatgtggatgatgttagtatcttgttatttgctgtttgcattattgggcccgtcgtaaatttatgtgttttatttgtcgaagatagctatgctaacttagcagggctgttgtgaagattaaagggaatctttggaaaatacctggcacacagtaggtcataaccgaaggtgatgttttgttaaaactactcttctgcctttgagaataaaatttgtaaaggatacaaaggggaggagtcctacctaatcaagttacctaatagtaccctacagtgtttattgagtatcttctgtgtgtcaggaactgtcctacatcccagggaaatggcgagcatccccctcactggctcagtccttgtgccagtagtctttaatgagactggacttaacaggatttaatttgtattcttttctcatgctggcagattccttttcaattatgagctatactgatttttctttgtttatagttacaagataataaaaccttcctagcgatgctaaaccatgtcttgaatgtggatggattttacttttcaacaacatatgatttgacccatactttgcagcggctatccaacactagtcctgaattccaagaaatgagtctcttggaaagggtaagcttgatcttcaattatttttatttttaggtttttaaaagggacatgtctctgtttcatgcataaaaatttatattgatttttctcagtcctggctatcttagaatcatgtatgaggctttgaaaatataccctgttttaaatatacatcacaatcccagtgtgtgagtccttgaatctgtgtatatatacagccagaattgagaatcactggtgtagatattcagaaatctttgtataaacacacatgtaagttattagaggaaaatctttcagaatttgtatttctgcataagtattaccaggctaccaagtgctaactctcagatgtcaaatcttcaaactagcattgcattcatttgtaatttcttaactctcagtgttcggtagtgtagcagttacattagcagtgtaattaggcttataaaattcatattctaacagttgatatttcttctgtagtgatgcttatttataatttttataactaaaaatgtaacaaaagtcactagaacttggaaaatatccttttaaggttttttttattttgctttttttttttttctttgagacagagtctcactctgtcacctaggctgtagtgcagtggtgcgatctcagctcactgcaacctctgcctcctgggttcaagcaattctcatgtctcagccttgtaggtagctgcaattacaggcgtgtgctaacacgcttggctagtttttagtagagatggggtttcgccatgttgcccaggctggccttgaactcctggcctcaagtgatccacccacctcatcctcccaaagtgctgggattacaggcgtgagccactgtgcctgcccagtctgccttttttttttttttttttaatatacagtgaatatatctttaaaattaggtttcatatgatctcaacttaaagtttcttttgttcaggaacctggatgattgctacctgaatttttttttgacacaccttagaagtgtttaatgagaagacagaatttaaaaggtcgctccatcttacttattaggttggacaatgtgaagtcgccagtaattgaccatttttgaccaataaaaatgkttatttcatgtggttcaacctaaattaatattttagttgactggcttttttgggtgagattttmaactctaatttggtaaaattgtatgtaggcttagatggaagtttaggtgcaggctaagcattcaagaaacttggcttttaactacaaagagacttgcttttaaaagcagttgctacattctccatttgtttatgaaacatctctacaacgtcagccatgtaccaggaactatactagyccctggggacccagaatgaagctgtggaccctgtcttgtgggagcctacagtctgctggggaagtggtagtcaaagaatggttgctataatggtgatatgtaccaaagtgaggtgggatcctgaaggaatgagggtcttygcctgaggttgtcagggacaactttataaagtaaggtatctacagaggacagtaactttacacagaaaggtaacttttgagctgagacttgatgaagatttgttggtcaggtgacagtgggccggggggttccaggcagaggtggtggcagaggctaagctgcagaaaaagccatctcatctgttgggatgagatgggaatgttttgtcagctaaacagaaagttagccaagtgtagtggttcatgcctgtaatcccaacactttaggtggccgaggcagaaggattgcttgagtccatgagttcaggaccagcctgggcaacatagggagaccacagctctacaaaaaaatttaaaaattaatcaggtgtggcggcacgcacctgcaatcccagctactcgggaggctgaggtgggaggttcacttgagataraagccacagtgtgctgtcatcacgccactgcactccagccaaggcaacagcaagacggtctaaaaaaaaaaagttaatgttaacatagggaatcataaaagtgataaatggaacatatataccctaaatattttaacttaraacctaaaagttttacattggtcaatgtttttatgtacggccataggattttctttgtttttggttccttgattctgaattgtcttccctgtgtaaattacatccatarggctttcccatttgggccactttaaagactttgacacttacagagaaatctgtgtgcagaatcctgtacatttttactatgttcttttatatttttttagttgccactcccactccaaattcaacagcagttttgttttagcaacttgcctcttatcaagttacattccaaatcatttaactttatagaaayagcagtgtgtttttcatcttatttcattggtttataaaatagttaaactatrtaatgatgaaataataataagtatgactggtacaaattcrggaacacacacttgaatctcaggaagtgcgattcagctggttgtggtcaagtgcaaaagccattccctgtgacttttagagtcggsggtgctggtggttcagttggtatgcttcataaatagaattgattaatctactgagtagagtcagttattttgtttgttttttcttttttgagacagagtcttgctctgtcacctatcctggagtgcagtggcacgatcttggctcattgcagcctccacctcccaggttccagtgattcttgtgccttagcctccccaagtaactgggactacagacacgtgctaccacgtctgactaatttttgcatctttagtagagacatgtcggccaggctggtctcgaactcctaagtctcaagtgatccgcctgccttggcctctcaaagtgctgggattataggcatgagccaccacgtctggccctaagtagagttgattaaatatagattgttgagggagcctcttctgtatttatgaaagttggagtggccagagatgagatcagagagttaattaggggctgccagatcctaggactgattaggccatgcagagatttggttctttagatgacagagtcattgaagaattttgagcagataggagacaggacatgttagagaactcctgctggtagcattgtggaaaaatgagtggcgagggctaatgcctaaactggaggcaagggaaggtgtgttaggttaggctggagtcagatgttggtaaagatagtgggagtagaaatgtaaaaaatatggattttgaaggagatttagtacttgacaattaaatgtaagggaaagaaataccgtaaaactcctcccaggtttctgtctggcctgagacaatgagacagaaatgcccacaggaggtacagatttgmgggggagatgtattttgtttgaggcctgtcaaagaaactggcttctagccatcagaaagagacattgattggtgtagttttctttctgtagaaagtaagcttggcaggagatattttattaaattttaaaacttctctcaggcagatcagcggtttgtatggaatggtcatcttctaagagaactttctgcacagccrgaggtaatgtacacgaaataaaatctgcttaattgttacagtccaagctttaattcaatgcatrctataaagtgacttcctaatcaccaagaatttcgagaaacaattctaatttaactgtttataacttacaaacttggatcaggtctaccctgtcacatcrttctaggttgaagaagcctaactattttactctgatcttctatagaagccttaaataaaaatacattgctttgtctaactaagagagatacaggggatcttggtacatggataatggagaaatgaggggccagggccaagtttcctggccaaggrgagagctcttttttgtcttcctttggggatgagactcccttcagtcacccaggagagacatgcacaggcaccgccctcttctgtcctttgtctacacatatgaggtataaacagggaggcccagctagggaaacrtgatatattattgaatctaggtaaatagatgtgtctaattgctttatttcttgtcatttgctatgctttttttggaaaagtagtttgagctgcaaacaattagcatgggatatcttttccctggaggagtgaagttgttgtaggcaaagactgaaaaggaggtaaacattctgtaacttcatgtagctttattagtgttccaaaatctgtgaatattcaagctcaaatgattgtaatgcatacttaatgttacattagagaaatcttttaaaaattatattacccataagtttactaccttgttatgtttgtatattacctccctatgtgtaaatatttttatataatgcttatttatttttaaagtatatttattctaaatatatatcttcatttcaggttcatcggtttgcccttccagtgttacatggctgtatccttacatgatattactctttagtttctagatgcctttatttaaattttattataaggcasatttagagatagtctcaaatactccataaggagagtatttcagaattaatataaattgctgttgataagaaaatcaaactcattgctattttgktttttttttttttttagaatgaacttttcagactatacgattctctctctgttcaagagttctggggttggttgtttaaagaaaaggaatatgtgtactgtattttgcctttatttgatgttaccttttatcagtaaattacacataagtagtttggacctggctgttgaaaactttcctaagtacataatttaaaaagttagacttaggccgggcatggtggcttgcacctctagtcccagttactcaggaggctgaggtgggaggatgacttgagcccaggagtttgaggctgcagtgagctgtgatggcaccactgcactccagcctgggtgacagggtcaaaaaaagtgagactcagacactagtgtgggtaacaagttggagaggagaattaccattaaaaattttgtcatttgaaatagtgacagataaatgaaaataagtagagtacaaagaatattgcctaagggagaaatcagagtacagatacaaaatgagtaatgattatctaattgtaggttcatgttaaaaacaratctatgtcatagacatcataataaaaataaagcagccamgtgagctggctcttaaaggatatataagcacaatatgctsatgagtgcctatccagttatgtgccacatactgacatttcagtcggtgacagaccacatatatgaaggtggtcctataagattataataccatatttctactgtatcttttctatgtttagatatgttgagatacacaaataccattgtgttacagttgcctacagtatttagtacagtaacatgctatacaggtttgtarctaaggagcgatgggctataccgtgtagcctaggtgtgtagtaggctgtgccatctaggtttgtgtaagtacactctataatgtatagaattgcctaacgatgcatttctcagaatgtacccctattaagtsatgcatgactgtaatcaggattgtgccctgaagaaaacrgtgatgacatctatcaagcacatgtaagaagcttatcaatacaagtctattatttatttattcagtatgttaatataatttcactaaacttaatgcttgttatacttaaagaaaacccaaaaagtaatggaggaaacatgttccacagttatggggaaataaaaattagaaaatttcatgataaaagctcatttatttttgtttycccaccccgagctttccaagttctcctaaggataaaataagaataaatgtgtttattcrgccgggtgcagtggctcatgcctgtaatcccagcactttgggaggccaaggccggcagatcatgaggtcaggagttcgagaccagtctggacaacatggtgaaaccctgtctctactgaaaatacaaaaattagctgggcgtggtggctcacacctgtaatgccagctactcgggagactgaggaaggaatattgcttgaacccaggagacrgaggttgcagtgagccgagatcgtgccactgcactccagcctggatgacacagcaagactccatctcaaaaaaaaaaaaaagygtttatccttattwagtgccttaaatgatttgggccaactatggtgttttttgktttttgtttttttttcaaaatgagattgtgaatggacaaacaatattaagtgagattatagaacctttttttctaggcaawtttagaaacagcttactcatttacctttaaattgaaagctttaaatgagcttttctttagtgtagtttgttgactagaagtaaaatcatatgtttcacacacatacagagacattaataagtaaaatgaccccaagacaggaacatgactggaatagagagtggacagagaggygggagctgtgttcagagaattagctcagcccagatgactcagggccttataagccatgggaagaactgtggcttttactttaaatgtgatggggccaggcatagtggcgcatgtctgtaatctcagtgccttgggaggctgaagcaggaggatcctttgaggccaggagttcaagaccagcctggagaacatagtgagaccctgtctctacaaaaattttttaaaaattaggcatggtagcatgtgcctgtagtcccacctgctcaggaggctgagtcaggaggatcacttgaccccattttgaagctkcagtgagctatgatcacaccactgtgttctagcctgggtgacagcgcaagacctctactcaaaagattttggagaaggggaaaattggtgaaggtgcatgctagagtgatatccaagaatgtgtgaggtgggtgggggtcagcgcacaggtagagggcctggtgtgggctgctcacctaccactgtagaagggaagcagatagatggatgtggttgctgatgggtgtgtaaatgtgatcggggcctgtggagggcttttatttttacagcaccatataaagtgtcataatgggccatgagggggatgagggagaaatgttgcatgttgaggggagtatgtgaaatgccatcctggagagaaggcatggatggccctgggagtaactgattgatgaaagactagaagtaaatacactcacattttaaaagttatgctgatgggattcagtttttattttactcttgttccttccatgctttmtggattctctaaagtgtgtagatgtttttgtcttgtaatcagaggaacatgattcataaagcagtcagtcatattctctgctagatttagctctctaagagcaggcttatctgccctgctcatttttgtgccctggctcgaaatagataatttgggtaagggagcaaatattacattggagtcttctctagtgctatgggcttcaaaggaaagygaattgggagctcaagaggagcccttatcaagtctgatgataccaggtaatagagatgagtcattagcagctcaactcattgctgatgtcattaggtaccattttgaaaagcatttggtgttctcttgtgaatttgccagcacttctccaatgcatacccaatacattcataccaggaggtctttccagaatgttcacagtaccacgttagagcaataccatgaacgtcacaagggcttgaagtttataaatagcgtagtttcatttttacraaaaagcaagctgcgtgtttctaagtatggttgcatgtgatgaaactaaaaagataggagaatggtctccatgaacctsagaatagttacttctaggtgagaacacaattggataaaatagggaaggagcagataaatagattcagggttttggtactgttttgaagtyggatggtaggttcacaaatatttattttattatgctgttatactttataatggatgcatcaaattatattaagaaaaagtgttacatatagaaaataccataaccaaacctaaacaaatgtggaaggagaaaaagtaaggccattgaaacaataaaacctttctgtcatacccccctgctccccagccacagtgtggcatacattaaaaagcagacaataaattagccagacatggtggcatgtgcctgtagtcccagctacctgggaggccaaggtgagaggatggcttgggcccaagagtttgaggctgcggtgagccatgatggtgccactgcactccagcctggttagcaaagcaagagcctctctctcaaataaatacataaataattttttttaaaaaagcagacaacatcaaatgttggtaaaggtgagaagccaaagtaattcttgaagcaatatggaatttcctaataagatcagatgaggagtatactctgtaacccagcagtactgctccttagagccatttctgcttatttgtacagagatgtttattgcaacactgttcataatagtaaaactggaaacagctggcatgtccatggacagtagartggataagtaactgtaatctagtcatatagtggaatattatacagccatagcagcagcaaatgaacctcatgactataatgagcaaataaagaaaactgaaagaatacatacagattaattcctgttatgttaaaaaaaaaaaagtcaaaagctgttcagactaaacaagaatttgtttagtggcaaaactagaaagacaagggaataatgaactgagtggatagtagttacttcttagagggcagtaagggagccacagggaaaggwgcttcagagatgctagtgggtacaaaggggtgtgtgtatgtgtaatttttaaaattatgatcaaatatacytcataaacaatttgcctttttggtcatttttagatgtgtaattcagtgagtggcattaatttcattcacagtgttgtgcaaccagcatcctgtttccatcactccagtaagaaattcttacccatttaatatcaactccccatactaaatgggtatttaactattgtaaatagttacacacattatactttactgkttattatatttcataataaaaacatttaatgtaagaggtatgccaattccaaaggcttktgcaamcctttactctgggaatgaagtggagagatcagcctttagaatttctaggtgtatgactgtttatattactgaatggtgtagraagtgtcctataccatatactattatcagtagtaagggaaataactttatataaagaaaggcttttgggsagatacagtctttcatactgaggttcaccttttctatttcaaggataaggtagagtcaaaatttccatttctagrtaacctttgtttaattcactttgatctgtgaatcttcatatgcttaccagctgttacatggmtaatttataattatgtgtcatgcatttcattttttttccccttagctgcagtagyctagccttccctccccattttgtgtttcttatttgaaagttaatctattttaaatttatgttttccattcagagtagatttttcagtgatgtggttaatacttaattctttagaaagtgattgagaatrtcaggaaaagggaagcatatcatttaaataaaaacaccatagtgaacttcttaaacatactaccttcgygtcatagrgttattaacttgacaaaacttcacagttgattatagtactaagggcttgtgaatattcatgaagatttgtatactcttgtcattttttctcttaaagaccatcattaggatagatagatgcaaacaatctagaaacaatgcttatgatttctattatatgttatatttttcttaatgtggttaagttattaccatgcattcatgttctattaatggaaaatactttgattggattctcatctcgaggaggagctgtttcagagctggtgtgcgctattatgtaagaggtgagaattttgtcagcatggstcatatctgtaattaatattttgtcttacggtgacacgaatgtaaccttttgtattttatttgttttcattatcatttgatagccttgctaagtatttatctcctgcttcattgtaataattaggtaggtcttccgtgcttcagttactgtaattacattgcaaatgttaatgtgatacttgtaggctgctgcttactgcttgaagaggaactgatcatgttgtttgctggatgtccgaaagcacagctgaactcagtgtagttttcagtaacctaacttagaaagtattttcttgtattgcttttaggttttttgcatgcatgaagctagtcatttggctttgtgccttcaactttgtaaacatttacattttgagcatttattttctaggcttygtactagcaacatgcttattttgctaaactaaactttaaaaatctgtattaaagcttactgtcattatgaaaagaagtttctccaacctttgtattttttttaaccagaatatatcagcatattttatggctgtgagccattaaataaattgtagcttggggccagaaagttgtagaaattatttgcttaatctctctcatagcagaggaagaataacattgagtgagtgacctggcaaagatcacaaaccaaaattaaagttagcaactctgttgtaactagattttcttggatggaaacatagtttttgattaaatttttgaacaggtagtgcatttacatatttcaaatatcaaaaagtatttttttaatgcaataaaaaatatttcccatttctgacctcatctgcttggttcttacccccttcccagctaatcagatgttagtttcttgtttatccttccagataatttttatgctaatacagatatgtgcccttctcttcctccttttttagacagtgataatattctgtgcacatttttctgcaccttgtttcctttttttccttcatatcttttgcaaatcttttcataaagatctttctttcatacacacaaacacacatactgtctctcagtctgactctgacttttaaaaataattggatgttgttccttagtgggaattacgaagggaagcaaggatagcctgtgcctctgacaagtaatctcataaagtattgaggagtcatgtcattgctgatttggctcaataattttggccccttctggtgatatggtaactaaaacagtgatacttcacatatacctgcaaatgttatatgtaagaaatatgtcagaaaggatgttaggaaatacttggcacagttaaaaaatacattgatttctttctgataatttggtaatttgggtcagggactagcttgaaagttgcctttgcttagcaagcgtttctttgtaaaaatagattacgtaaacaaatttttaaaggaatgcttcaaatatttgaaagaactaaacagcatcaagaatccaaacactttgcttttcaaactaggttttgtgagcatattcatggagttacagaggatcacatacagattttgtgttttcattttgataattaaaatcagtataagcatctgctggagaccatttgcattattataacaaaatattataaactagcttatattcaccgggtgcggtggctcacgcctataatcccagcactttgggaggccgaggcaggcagatcacctgaggtcgggagtttgagaccagcctgaccaacatggagaaaccccatctctactaaaaatacaaaacttagctgggcgtggtggctcatgcctgtaatcccagctacttgagaggctaaggcaggagaatcgcttgaacccgggaagcggaggttgcgttgagctgagattatgccattgcactccagcctgggcaacaagagcgaaactccgtctcaaaaaataagtaaataaaaataaaatggcctatctttacgttgagtattgtgttgttactaagtataattacctaaattgatagttttacctttcaaactagtatttttcaaattaggatytatggacattttctcaggggtctttgagattttttttttctttaaaagatgtctcaagtttgagaaacactactttagaggaattttgtatgtagaaacaatgtatttaagagcaaccaacttcatctgtttattaataggtttttaatactcctctttaagcctgtttaaagtgagcaagcttgtgttagttttctgatcatgtataatgaatttgtttgaattgtattttcataatgacttttccactaacttgaactgacttaattctctccaagttaacctgaattagtgggtttctgatgtgtttctttgtgtaatcagtatagttaattcttaattttttttctatttaggaattgattcggaaggccatgcagctaactttgtagaaacagaacaaattgtgcactacaatgggagcaaagcttcgtttgtacaggcaagttgttatgtctgttaggcagtcagcgagttggccttttctgcttggattatarttttctgtcatgttgaaatttccctcttttcccttctctgttcttatgtaatatttttatctatggtgcagaaaaagttcaccccaaaaaaggaaaatccattaatctggcactaacctgctgccatttcctgcccttaaattaaatccctagaggagagggtaggctaggaggtgcgaagagagttatggaaatggagccatctgtctattgaaccatttacatgtattaagggcagtgatgataggacaagctgatggcttataattgactttacctgctactgtgagatgtctcttctgttgccttatggagttgtacaccacttgctgctccagagcrttagtggccaaatacattcatatgttcataaacatattcatttgaaaatgaataaagcaattttctaattttttcataatgccaaattatataacagatgtaacctgttaatttttactcatagataaatttagaatttcaaggaaataactgtctactacacaaatgccatgtatataaaactagaaggagaaaaagttctaaatgtttttccataaaatatgaactttaggagcagatacacgtggacttttaaagttgtcggtagrttgtattagttttttcccttgcatattcattaatatatacacccctgacaataagtaaggtgagaaaaacaagtatgtttgtgtttcttttcacatttctctcttttcttttagactcgaggatcaatacctgttttctggtcccaaagaccaaacctcaagtacaaaccactgccacagatcagcaaagtagcaaatcacgtgtgtatcttgcatgccttttttgttggttaaaaatagaagcttaatagcattataatttgcatgtaaagaatgtatttattccgcataaatcaaygttcaacatctttgaggctattcttcttgrktccggcacatagtaaacccctaaaccaaaaggtgtgtgggtggcatgttagaaatatagaaaaacaaactatgattgaatggcatggcaagtaaggatttgagagatctcagtaagatttgtaactttatgctttttagggtacttaatatattccactgaggttgtactcagaattaaagtggtagtgttgcagctcagagtaaaatagcttatgattactagatgacatttagaatagctagaaggcatagttcacatcctgacatctttcttttgaatatagaaataagacatttaaggaggtcctttaaaaatattataaatatttaaattatatttataaattacataatgtactccagtaaaatatgtaactttttcctctctagatggacggtttccaaaggcattttgattcccaagtaattatttatggaaaacaagttataatcaatctggtatgtttcttatgtttcttggggggaaaaaaaagccttaactttttcttgacagaaaatttactattttaaccattttttaagtgtacagttcagtggcattaagtagttcataatgtgcagccatcatcactgttcatttccacaacatttcatcataccagacagaaactctacccattaaacaattaacttcctattatatccctccccacagcccctggtaattctattttactttctgtctctctgaatttgtctattctaagtaccctcatgtaagtggaataatacaatgtttttcttttttaatgtttttaaggttcatccatcttgtagcatgtatagaatttcattctttttttaagactgaggaatattccattgtgtatgtgtatgcatatatgcacacacacacacagacmcacacacacacacacacatatacatgcataccacattttgtttatccattaatctattgatggacatttgggttgttttcattttttggctattatgaataatgttgctatgaacattggtggtgtgcaagtatctgattgagtccctgttttcagttcttttaggcttatacttagaagtagaattgctagatcatatggtgattctatgtttaactctttgaggaaccaccatactgtttgccatagyggctgcaccattttgtattcccaccaacaatacaccagarttccagtttcttcatatccttgctgacaattgttgttttctggtgtgtktgtgtgtgtgtgtgtgtgtgtgtgtgtgtgtgtgtttaatgatagccatcccaatgggtgtggagtrgtgttgagttgatttacatttctctaatgatttgtgtgattttgagcatctttgcatgtgctcattggccatttgtgtatcttctttggagaaatgtctatgtaaatcctttcgctatttttaatcaggttgttttttgtttgagttgtagtcattctttatgaagtctggatatttatctcttagcagacaggtgctttacaaatattttctcccactctttaggttgattttttactcttgacaatgtccttggtatacaaattgtttaagtccagcttatctagtttttcttttgttgcctctgctcttggtgtcaaattcaagaaattgtcaccaaatccaataacataaacttaccccwatattttctttttaggagtctttatagttttagatcttacagttaggtctttggtctgttttgagttgatttttgtttcgtgtatgtgtgtctgtgtattacttcttaaaactgcacatgagttaatttttgtatatggtgtaggtgtaagggtccaacttcattcttttgcatatggctatccagttttcccagcaccatttataaaaagactgttcttttcctttgaatggtctgtcaccataataaaaactcagttgaacatatatataaggtcttattttgaggctctgttctattccattggtctccgtgtctgtccttatgacaggatcacactattttggttactacagctttgtgtaataagttttaaaatcgggaagtgtgataattccaacttccttctccttttgcaagattattttggctacttgagatcccttgagattgcttatgaattttaggcttggtttttctatttctgcaaacaatgtcattgggattttagtagcaattgcattgaattgacagattgatcactttgactagtactgtcgtcttaataatattgtttgyagtccatcaactcagatgtctttttatttatttatgttttaaaaaatttcagcaatattttgcagttttcagtgtacatgcatttcacctccttgtttaaatttatttttgagtatttatgcctgaatggtgtttttttgtttgtttgtttttcgttagtgtaaatgaaattgtttttgtactttcctttttggatatttcattgttagtatatagaaatgcaactgattattgtgtcttgatttttgtatgctccaactttgttgaatttcttatctccaattgatattttgcagaatttttagggttttctatatrtaagatcgtgtcacctgtgaacagagataattttatgcttcctttccaatttggatgccytttttttttttcttgcctaattggtgttgctagaactactaatactatgttgaacagaaattgtgaaagcaagcatccttgtcttattccttttcttaggagaaaagcttttggtctttcatcattaaatatgatactagctgtgggtttttcacataatggcctttatgctgaggaacttttcttctttttctaagttatccagttgagtgtttttatcaagaagaggtgttgaattttgtcaaatacttttctgtatcaatcgagatgctcgtttgttttttttcccttcattctactaatgtggtatrttatactgatggatttttgtgtattgaaccagccttacattgtgggaataaatccttttggtcatggtatatactttttaaatatgctgcagaatttggtgtgctagtgtttggytggggatttttacattaatattcataaaggatattggcctgtarttttcttgtaatatctttgtttggttttgatatcaggataatcttatctttacagaataagttagaaagtgttctctcttcttcagctttttggtagagtttgaggaagactggtgttaattctctaaattttggtacaattcactggtgagttcactagtaaagccatctagtccaggcttttctttgttaggagactttttttttttctgttcgttttcattactgattcaatctccttactatgtattggtctatttagattttctattttttcatgattcagttttggcaggttatatgtctaggaatttgccaatctgggttatcctacttgttggcatacagttgttcatagtattctcttagatcctttttatttctcagaaattgctagtaatgtccactgtcactcttgattttagtaatttgagtcttttgttttgttttggtcagtctagctaagagtttgtgaattttgttgatcttttcaaagttcaacttttagttttattgactttattgtttttatattttctattttatttatctctactctgatttttattatttcctccggtagctttgggtttagtttgctcttctttttcttgttccttaaagtgtaaaattaggttattgctttgaggttttcttttttaatgtgtgcatttacagcgacaaattttcctcagcactgcttttgctttatttcatacatttggtatattgtatttttgttctcatttgtctcacgtattttctaagttctcttgctgggattttttctttgaaccagtggttcagtatgttgtttgtttttcacatgtttgtgaaatttctagttttccttctattcttgatttttagctttctgttgtgatcagaatatatacttaatgtgatttgaatttttaaaaatgtgttaaaacttgttttttggcctagatatagtttgtcttagagaatatttcatgtgtacttgtaaaaaaatgtgtattctgctgctrttgggtacagtaatatggtctgattggtttatgatggtgtttaaattctctattttcttattcatctctgtctgattgttctgttgttgaaagtagggtattgaagtttcctacaatttttttaaattttttatttatttatttttggagatggtgtctcactctgtcacccaggctggagtgcagtggcatgcctccctggtttgcaccattctcctgcctcagcctcccgagtagctgggactacaggcgcccaccaccacacctggctgattttttgtatttttagtagagatggggctttaccgtgttagccagggtggtctcaatctcctgacctcgtgatctgcccgcctcggccttccaaagtgctgggattacaggcgtgagccactgcgcccagcctctactattattatataattttctgtttctcccttcagttctgtcagtgtgcttcattatattttcaggcggtcatggtttgttgcatatatgtttataattgtatcttcttggaaaattgaccatttaatcaataaacaatgttctttttttgtcttttgtaacaatgtttcacttagagtgtattttgtctgatactagtgtagttattccagctcttttttgattactatttgcacaaaatatcttttttcatcctttctctttcaacctatatgtgtctttaggtctaacatgaatctcttagagacagcatgtagttagatcatatttttttccattttgccagtctacttatttttactggagagttaatccatttgcatttaaagtaattactgataaggatttacttctgctattttgttacttgttttctgtgtgtcctatagctttttgttcctcatttcctccattactgtctcttattgtgcttagttgattttttttggtagtgatatattttgattaccttctcattttcgtttgtgtatattctatagctgttttctttgtggttaccatgaggattacatataacatcctaatgttataagtatctaatttggattgataccagaagcatataaaagctctactcctgtaaagccttcatgcttcctttttatgttgacatttcmaattccatctttatatattgtgtttcagtaacatcaatatataattatttttatgcagttggctcttatttatgtatatatgtatttattttttagagaaaaggtcttactctgttgcccaggcttgtgtgcagtggcatgatcatagctctgtgtaatcttgaactcctgggctgaaggaatcctcccacttcagcttcctgagcagctaggactataggcacataccaccatgcttggctaatttttttgttttttatagagatgggggtctcactatattgcccaggctggtcttgaactcctggcctcaagccatcctcttgcctcagcctaccaaagtgctaggattacagatgtgagccaccattcctgactgcatttgacttttaaatcctgtagaaataaaaattggagttacagaccaggatttcaataatactggcttttatatttgcccttgtctttacctttttggatttatttatttatttatttatttattttttgagacagagtcttattctgtcacccaggctggagtacagtggcacaatctcggctcactgcaacctctgcctcctgggttcaagcgattctcctgcctcagcctcctgagtagctgggattacaggtgtgggccaccacacccagctaatttttttatttttggcagagacagggttttgccatgttggccaggctagtctcgaactcctgacctcaagtgatctgcccacctcggcctcccaaagtgctgggattacaggtgtgagctactatgcccagcctgttggaaatttttatatctctgtatagctgcaagttactgtgtagcatcctttcatttcaacctgaaggactccctttagcatttcttacagattgggtttaatgataatgaactacctcaggttttgtttatctaggaatgtcttaatttttccttcatttttaaaggacgttttgccagatacagaatccttggttgacagttttttcttcttccagcatttaaaatatatgatcccactgtcttcagcctccaagatttctaatgagaaattggcggataatcccattgagaatctcttgtgtgtgatgagtctcctctytcttgctgcttttcaggattcygtttttgtctttcagctatgtgattataatgtttttggtgtgggtctccttagagttcagagcttgggtttgtagattcatatgtttcatcacatttgggaaggttttggctattttttttttcttcaaataatctgtctctgcctttctctctctcttcctggaattcccatagtgctaaatattttatttcactttttgtactcttttgctccagaattattttttggcttcttataataatttttctatctttgttgatatcctcattttgtttatgtattgttttcctgatttcttttagttgtttgtctgtgtttccccttagctctttgagtgtttttaagacagttgctttaaagtctttgtctaataagtstagtctttgtctaataagccaagtcctgtcttggcttccacaggaacagtttctgtcaatttcttatgttccattgaatgagtyatgtttttctgtttatttttgtacctgtgattttttttttaattatatgtttgattattataatatcataactctggaagtcagagtctccttttcccctacggtttgctggggttttttttgttttatttgattgttaaagactctgctaatccattttttttttttgagacttttccaaactatttttgccaaaactttcttattgtgtatgttcactgaggtctgttccttttgcttctattcagctgttttgacaggtttcattgaattccaagaactgaaatagacaaactaacaaaaaaagaaagcaaaaatgagagaacaaccctgtcccccattctttgcagacttgctgtatgctggggcagtcctttgctgagtagccaggcttgctgtgagcctagggatcagtctgtggtaaaggtttaaggtcttctcaggactcttttcagcatgcatcttgcctggttatgtgggtggccttcaaaactccttcatatacatggctgcttttgaaagtcctaatttcctaagaatatcaccaagcttcttctccagcctttagatggtctattgtatgtctccatccagaattttttgcctcaggcatccattggtttatgttcctcttgtagcttttacaaacagtggtcaccatttttactgcccgtgttcagagatacgtgggacagagatgagttagtccttcatgttacaacagatgtacacaattatatgcaaataaggtctggtctgcctcctctagtttgatgaggggaactgagaacccggttattcccttgtaagactaaggttgtcaccactctgaggaggggctgggtcaaggacaagttaaatgccacaaaactttcccaccattttgaaagtgacttttactttattgggtgcttgggtgggttactataaaacctttaatcgtttttcagagctcctacaaagttggctcagacagcttctgggtttttttgatgtttctgtgggagaatgatgagagcttagagcttcctagtttgtcctttttctgataccaytytctcctttgaaataaactggaaactatrgtgtttgaaattttttacagattaaccagaagggctcggagaagccacttgagcagacatttgcaacaatggtgtcttccttgggaagtggaatgatgaggtacctcactagaaatctgttgcaggtcttttcagatcagatgtgcacttacatatatgcatgattacatagagctcactagacatatgtttcagcttgcatttttttcaatagtagatcaaagcatgatattttgttggcttgaaatttctctagcataatttatgttgcagaataacttcttttcagtcaagttttgagtttagtctctgattaaaattccctcattgaggctttgtgctccagagagtttccatagataatactttgccactagaattgccttaaggaatttggactaggcctctttgcagtgcatacctgattgctgtacttgagcttacttcactaccatttgttgtgtttctcctctactcctcctgagggccccagaagaacctgtgaggatagatatmtatgcatatattttcatgtttatatctgcacrtatcatatatatattttttcctctgctaggtatgagcatgagaaggggtgtgtgtgtgcatgtagtatatgtatagtkataaacccagagtgaaggaggttctagtgttcccaagaaatatgtatgcactgatataaagaggaaaatcagcttatgaaggtattattaatagaaggaaaatgaatgatctctggtcggtttctgaatatcttttcttttggtagatacattgcctttgacttccataaggaatgtaaaaatatgagatgggatcgactaagtattttattggatcaggtagcagaaatgcaagatgaattaaggtaagctatattatttccttaaggaggtagagggaagaggtatatatatcagtcatattttattatgcgtcatccagcagacttacaartacagttcactggattgtcattgcttgtctgtactattttattatttttaatttctttactggaaagatgagacttggtgacttcaaaatatttttgaattcttaaaaatgacccaaggccagatatcttcatatttttataaattatctaccatacatttacaaatttttgtataattgaacttggtttactactattttgtattgtcgtttccactagacattctatcacaagtattttgttgttaacctgtacagcgtctgtaatgatagtgtttaatggcttttctatattctgttttatcataacatagttctaagaaagtgcttttcttcaccctgagcacctggyttattkcctttcctctttctatcatgaaagattgtggtgccatgaatcattatatatattttacatctgttaaatttatttctttaaaaaaattcttcagagtaggattaatggatcaaagggtctgaatgtctttgcagtactatattatcatattggttcaggtttaccatactctatgcgtgccagtctttaccgattttaaagccagaagaaggaatctgtaaatcgtactaccattttcttctgcctgtgtgtgatggttctaaacctggcaatccaaatgcactttttaatttgttacacaataatatagtaaaacctcttggatagacatttgctcagttttcaaaaatatctttttatatacattaggtaatcaactacagttatttaaatctgctttttttctgtgasgttttgccatgaacacagaagggaaattgacctcctgttgttgggcaattagagaaaacattggctggccctggcatgttgttggaggaggtagttccttgggttcacccattaactgctgccgtacaagagtgtaagaaagaaggagagttgactccagagtttgtgttcgttgctgttcactgtggtccacarggagagcagagctttcactggtgactttcagatgatctctcgagacttttttctaagggttttgggggtagtgggaagaatctgggctttgggatccaacacaccttggtttgaatttaagtttttctcttagtagtaatatgacccagggccacttagttatcttcagacttcggtttcttcatttgtaaagtgaagatgataacttactgtatagtttaagcgataatgtttataacatatctaggattttataagtattcatggggtacggacacacacacccttgcacacacatatatatgtacaccaactctaaacgaaccttaccaattctgcatgatccatatgtagatttttcatcctaacacattcttccacgcttttgttcctgaggtcatgatttgtatttagcccttgatgaatctgttgcattttcttcctccttttggattttggagaatagtttcaatagttaacattatccagtattcgttgtttgctgtgttccatacactgtgctaagtactttatgtgcattatgtgttatctcattcaaaccttagagaagcctaatggtggtgctgctgttacctccattttgtggatgaaaaagcttactatttaaagttctagagttagtaagttgcgtatgatgctaaggctagcaaacagatagtttgcttcctgcatccatattcttaaccaccacactgtgtgttgtcagatttttgaattcatagaattatcaaggagcttgttaaagaaaacatgggaactggtaactgtggttggttgcagtgcagacawctggatgtttaaggggaggaagggaaactgatttttcaaataatacccaattgttctttataaatcttgtactatttgcatgtattacccatttaagaattttttttttttttttttttggctgkgggctgtggctcacgcctgtaatcccagcactttgggaagccaaggcagatggatcacctgaggtcaggagttcaagaccagcttggccaacatgtcaaaaccctatctgtactaaaaatacaaaaattagccaggcatggtggtgggtgcctgtaatcacagctactcaggaggccgaggcaggagaatcacttgaacctgggaggcagaggttggagtgagctgagatcatgccactgtgcttcagtctgggtgacggagggagattccatctcaaaaaaaaaagaaaaagaaaaaaaatatttttaagtatttaaaaaaaattttttttaatttagatacaggatatcgctctgtcacccaggctggagtgcagtggtgtgatcatagttcactgcaacctttaacccttgagctcaagtgatcctcccactttagccttctgactacaggtaggcaccaccatgcctggctacgtttttgttcttttagaggcagggactcgttatgttgtccaggctggtctcgaacttctgagctcaagtaatccttccacctcagcctcccaagtagctgggattacaggcacgcaccaccacgcccagctaaaagtatttttaatgcaaaatattcaatccttgcctcagagattctgattcagttgatctcaaggccaggaatcttttttcacaagcaacccagaggattctaaagatagtatatgaatcataaagccctgacatctagggatatagttggaataattatgttagaggaaaccctcatctggctttgggaaacatgattgatttgcacagcaacctttttaatactcttaactttactttttcacatctttggggtgagatgatctctaatcttcagccattttttggatggagggctgtcttgcctcagccatttagacttctttttggtctaggataatcacatatgcctgaccacacattcctgtctgaccttttaatttacagtttttaataatgtcactgaaatgagacccatgttataagagttaagtccttagtaaatctgacctactttggtatgagagtgtttatacaaatatgttttagttattttctagtggactctgctggccaggtggtggcaaaccaggaaggcgtgttccgaagcaattgcatggattgtctagatagaaccaatgtgatccagagtttgttagctcgtcgttcacttcaggcccaacttcaggtgcgaatgctttttttttttttaattgaaaaacracacagcaaaaaattaaacatctttaaaacccagtaacaaaaaatattcacattgcccacaccctaacccagctctttttatttttgtgtcttgcccatggatgtcacattttccataactagggtcagtctgtgtatgcacagttttcacttttgccattttcccttagcatttatgtaatcacagtttctggtggttgtattgttgtgccgtaatttactaagccattcagattgctacatttttggtttataaataacaccgtagagaatatatctgtatatgttattattaacttgaattatttccttcatgttaattcctagaagtggaattactgggttaaagagaataaatatattattttccaagagcgtcataccagtttacactgacaccaataatgaatcagtaaatccatttcattgaactcttcccagcatttgatattttaattttttttttgtttttccttgagaaagtgtctggctctgttgcccaggctggagtgcagtggtgcagtctcggcttgctgcaacctctgcctcctgggctcaagccatcctactaactcagcctcccacaaagctggggctacaggcatgtgccaccacacctggctaatttttgtatttttttttgtagagacaggatttcaccatgttgcccaggttggtctcaaacccctgggctcaagcagtctacctgcctcagctcccaaagtgctgggattacaggcttgagccactgtgtctagcctcttttttttctatttcgttaatacaaaagtagcacctcaagattgtttctatttatctctctcttattactagcaaggaatattgactccaaagtaaaaagtttctgacacagctttgctttaccactagactatgctgttgagaaaaatggtttttttcttctgtgtatatttggaatgaaaaagatgtagagccccaatttttaaatcacattggcatttgttgtgaggggcagacaaaatgcataccacatggtttcctgttcaggtaattagtaagcattcagctttatttctgacaattgtatgataccgagaaagaaattatggaggtaaaatacccccttcagaatgaattgttcttgaatcttaaagtcacacctgccagaggagtgctgtccctgttggagtagtctgtagtttgtattgtgctatgtcctygtctgttggaaggtcttctaagtgtagtttttaatagaaacaatattaggaatggtttggttccatggctgattaaccaaaacttacttgactaggctctgcaatccatattttacaattttacatgctatatatagtattatgaaacctaaccaacctgcagagagtgggggcaggagcctctcmagcagctttgcctactagtgtaggggctgtctacttgtgcstctccaagtctgccagtgaaggcagagttcttacccagctaaaggtcaccaaggtggctcctgtgctgtgtctgagggtgggaatgactccttctgaggtggagatgaggtgtcatctgaggtaagcaatgaagatggtggttctcagaagtgatggtctgagacaaggcagggacttgtcatctgtggttggtggtctccaaaggggagtctatagaggggattcagggggcccagcaaccctgggatattctatgtctgtgtgtgtgcacttttggggaggtagattaggtggcactcatcagattcttaaaggtccctgggacagagggtaaggctggggtgactcaggggtgaagaagttgagggatgatgcatgtgagggggtctcaaggggtagaggcagtagaagactgggggtaagagggagggaggaagtagcggctggaatcctatagcagctttcactctctcttctgaccctctccctgagtatagtcctgctgctatccctcaagggagtgcgggggctgcaaggcaaaggtgccctcaggagaggctttgcagtctgccctgggcaggagagggctgctgtgagctggggccccctatagacaacagacatttctggcctgcatccagcaaccaggcaccatgagataaaatttggggactgctttttcttcctaaaccatgtctgctaaaatctattacacataaatctgggtgtggttttttattccagagactaggagttttgcatgtgggacaaaagcttgaagaacaagatgaatttgagaagatttwcaaaaatggtaggtcatttctttaatayagacaaagttggtcagattttgaaataaattaatattctggatttagaactttgtttgtcatcttaataattatcagctgtttttacttttttctacagcctgggctgacaacgcaaatgcttgtgccaagcaatatgcgggaactggtgccttgaagactgactttaccaggcaagccatgcttttaaaatagcattccacatcagtagttcacagtcctggtgcttttaaaaatcacctgggcagctttcagacagcagcagcaacaacagcaagactccagcatctgggcctcacttgagacctgtggagtcaggatttctgggaagtgaggcccgggtactggtgtgttcttagccaccctgggagattctgatgcttggggagggttgagagccaccgctccacagtgctcctcagaccttaccgtgtacctgaagcaccagtcttgagatgtgctctaaaaagcacccaggtgatgctgatgctgctttcaaagactgcactgagtaatgaggacattaatgagaacattttgaatgtattatgcatgcagtggctctttttctgctatgtgggttccctgggagcagaataagatttctagtctgtttgctttgctgtgtcctaccacttaacctgggctatgtatttctcttcatatttcttgtctttgcaactggaattagtgtgtttctttgtgcctcctttggtaatattttagaaagaaaataggtatttcttggacctacaagtgatttcttttgtgaagtatctrtattttcagggatagtttttaaaatctgtcactcacttatttctataccttatgcttattggccataaaacagtgtgagaattcagtgtacaaacctgtaacttaaaatttaacctctttaaccagaactggaaagagaactcatttgggacttataatggatggctggaactcaatgatacgatattataagaacaacttttccgatggatttagacaagtaagtttgtatttgatgctttcctggcmttacgtggttgtatctttgcattgttcatcactaatgttatctcacactgagtttacgaatttcttcctttctgttctaggattccatagacttatttcttggaaactattcagtggatgaattagaatctcatagtcctttaagtgttccaagggactggaaattcctggctgtaagaaaccattttgtatttttcaagtttttaaaagcattgtgtctgaaggtatagatggtttcagtctcaatttaaaacgttatatgtggttttatatttcattacatgaaatataaatacttaagttttccaaagaggtcaggctgaggagtacagtaactgtggagcatttgttttcttttcctcagactctcacacatccttttcatgtgaagtaacataagcaaagggaatgtggaagctttctcatttcaggaaaacttcaattctcttacattgagggaattgccagagacaaacgtgttacatggaaggcaaagtttatttttgatgcttctctcctttttgactcctctgttcaccagaccctgcaagagccgctctggattttctttccagtgtgtcaagtgcyctggaatggaagggaggcctagtgttctaggtcctcatctgggcatcctccttccatttagcaccctttggcttggagcaaaagcatgcttcttccgatcttaccacatcccccatctaaagtctrgggcagttgtgattgaacccataaataataatgttttgttgacaaaagatattagctgtgtattagctgacagatgagttttattcttttcccaagcaatgcatgcacaactgattttgctgccattgattagcattcttaaatgatgatctctttctattgtcttttccagttgcctattatcatggttgttgccttttcaatgtgcattatctgtttgcttatggctggtaagtctgctycacacatttgtttcttagttagaatgttgacctttctttkacaacatcttaagtttttgagttcaccgaacacttgatgtttccctattaaatttaatgggtaaagtggatgtgacattagattgtcattagatgtgacaggaagaaaaataacatacctagtagttygatggwtgtcgttwtttttaacctcagattktaaaaacatgtttttcttattactstaaaccartgagtgtctgagacaggtctcagtcagtttagaggcttaatttgccaaggttgaggacctgcccaggaaaaagagacacaagatacagtaggatcagtatcttgtgctttttccaaagagggttttaaggacttcagtattaaatggggaaagagtgtacaggagaggaaggaggaatggaaacaaaaggggagggtaggtagtaagataagtggtcacattcttgtgaggctttgattagcactcactgaatccatgttacatgtgaaaggacggggtagaggaacagtcaattatgcattcatctcctgctcagtaaatctgcattttatgtaagacaaagtaaacatagagtagataaagaagtcagatctgcatttgttttggggtgggcggagggatgattttctagtcttgtctttgtcccatacctgtgaaaataaactgttaatttacattgtcagggtgagggagattcaacaggactgtcttttagggtaaagattttggggcccacaaggaatttgcttgtgacagtttgtgagggtggccatctgtgaggatatgtggcccactatctttgcagctgtctacttaggaacaaaaggagggtagttttgtgagactcagttcccaagtttaactttttcctttggcatagtaaatttggagtcctgagattttattttcctttcacattaccaaagtaatacatagyaattatagaaagcacacgtaggcagaaaaggagaaaatattatttatcatcatacctttgagagagaagctaaccactcttaacattttgatgttttaatctttataagtgtctgtgattttttttcaaaagtgagatacgtattttcattatctgctttttttcactgagcagtatgttttcccatgttcttaattgctaatggctgcaaagtattccatttatggatgtatagtttaaccaactcaaataaatgttaatggattaagatattacttatcattacattttaaaggttgagagtaaaattgcctgagaacctgaggagacaaggtctttactggttttcttttttctcttaatattttgctatgttactgagttaataaagcatttaagattaaagtgagaagaatgtattctttattctcctttgagtaatgtcctgtaatttggaggtttgagtctgagacttggtgtattggacgttggagatgcaatcctagtcactctgaaagaagaggcaccttccagccttcatcctctatcctgaattcgttgagccaacctctctctgcctgtctgaattccaccatcctcagggcaccattcatatgctcccctctcacagagtgtctctcccacacagaagtcttcaccttctrtctggatttccacagcactcctggtcctctctcccagcactttcctcttttaacctcattaatacatagggagttatttttcagaggtggtatacctctttggtgtacctgacatacccagtgtgtatttctttttggatggtaatgatttgcatacttgtttgtttttttcactggatcagcaactttttgaaggtaaagactgtgtcttactcattgttttatctcctttgtccaggatatagtgagccctcagtaaatgtttgctgaattaaggactcactccaccaccaccactaattctgtcacctttttgatagggaggctcagttacctgttcatctctgtattcccctcagtgctcagccctgtagacagtcgtgacatagttttaactaaatgctgaaatgttgagtagggggaaagaaagagccatcttattattattatagttagcaaaatttttctgtaaagagccaggtagtaaatatttttgtctttatggatggctgtacattctttgtttttgtgtttataaccatttaaaaatgtaaaaagcattcttaccttacaatacaaaaacaggttgaagcacaggtattgcctgggacatgactgcaggttttagggcaggaaggaagaggcagcatgtgccggttcctcagcggccagccctgctttcatttcctctctgggtcctctgccttcyttcctgaaaacactgcccagcgcatgccatttttggggagccactctactgttaaattagttcattttgttgttgtgactatacccacatttacttaaagaacctctggagaggcaggaaagtcaagaccaagaactctgcttgaatgaaacggatgattcctttagggagtgtccagcagagtggctaacaaggaactgcccttcttcttttgtccaagaagaattttaaacttcagagccatgaaaatgagcaattatgcaaattcgagtatattttgagtaaaaagagattggatgctgtggatggtaacttctcatgtcagtttattcttatgataaactttgtgatgtttggttatggtaatatctgatttctagctcctgctgtggttttcaaagagaatagaaaacaaatgtagcatgatctctgagggcttgttaggaaggagtctggatgctagtttcttccgtggtgtgctcactggctgtcattccctgtatgtatttctccttctgcaaatgaggccagtagtgttgcagagagagaagctattctctaggttcagctattsaaggagtaaaacaaagtagatctttgcccaccggcytgctgctaacctttatgaacttcggactttggaaaatgcatatcagcagagttgggttaaatatgtcattaaaataggttattggctgggtgctgtggtgtgtgcctatagtcccagctactcaggaggctgaagtgggaggatcacttgagcccaggagttctggtctgtagtgtgttatgctgatcggatgtccgcactaagttcagcatcaatatggtgacctctttgagcaggagatcaccaggttgcctaaggaatggtgaactagtacaggttggaaacagcaggacaaaactttcatgctgatcagtagtggaatggtgcttgtgaayagccactgcactctagcctgggcaacacagcaagaccccatctctaaagaaaatgttattgacttttgttttatatatttgtgtatatgcaaaaaatactctacaaaatatacataacttcagaaaagttatgtataacttatgtttggtatttatgaatattctattaattttttgtgcaggtrttttgacaatagctcatatctgttatagaactatgaattaaacttaatagttatttgtattattaaaatatactaaaagtgatcattattatttgtataatataatatgaaatcatttagtccagtggttctcaaagtgtagcctcttgatcggtagcatcagcatcacctgggtactaggaacttgctagaatgcagattcctggggcccaacagttgatgctttatcaagccctgcagaagattctggtactagccagggtttgagaaccactggtttaaaccttaattaagaggttcttatatttttcctgtgaatgtgctagtaaactttaatgttgccaaaatgtgctaaacagcygaaaactgggtctgatatcaacaaacgacttatttagctttttgtttcttaatatcaacaggtgacacttggacagaaacactggcctatgtgctcttctggggagttgcaagcattggaacattttttatcattctttacaatggcaaagattttgtcgatgctcccagactggtccagaaagaaaagatagactgaatttgtatttgtggaaagcggcttggcttggaagattccattgtgcagaactggagtctttactgacccgctttccacatcagcccaaggtctttttaatgcctttatccaaaagcacatcttgtgctccatgcaggatgatgacagaattgatctgatgttactgccttgatggtctctttactattgggacagttagatttataatttgaagctattctgtaattaaaatataacctgaattcagcttgcagaatggaagctgaatctgttcattgtattctattgattgtcaatttaattagctgttgcagaataagtaatatattttaaaaacctagctcctttcattatttaaaacagcaaaattatttttgtagctcagtttcattattgtcattgtagaagcggtcactattagcaggcatacttttccacacatctttggacttttcttaaaagttcagtaataagctaactgtgtttataaaatgtaagtctcttacagacatcaagtagtttgatgagacagtctgtgacttcatgataggaaagaggaggatgaggtctggggttctttaaagtctctggtgggctgcctcatgactttaatcagcttgaactgccagtgcaccagcagtttaggtgtgatgagagaattcagatatactttatctttttaaaaaagtgtaaataaaatcaaagaatgtaaagtctatctcttacgctagaggtccaaagctgcctctgttttaaagattatcccaatgtggaagatgcccatgactggtcagctacttcctcstatacattttggtttctttgagggtcactcattgagacacgcaggcctctgagagggtcttgttctagatttcatattgcacttggagggtaacagctgctttttcacgcatggtactcttgatgtttttcactctgtcaaggattttgttggctatcaatgaatgtgtctaaaacttagtgcttccaggtagttatagtactccaaatcaaggaccaacttaaacgttaatttttgtgcaaaaacaaacctgaaaaatatgcttcggaaactgtgcatagttctaattgtaagtcagattgtatattcaaattgtaattaagagatttaaatattagaacggtatgtaaggtagtataattaccactattttaaataattcagttaaacactgctgcaatatttcagtgttgtgcttgaaaatatgtacagtttttttccaatattaataccttatgttgtccttaaatatttctaaaagcgcctttatttcagcattacctttttttcatcactatcttttataaaacattaatataagtcgttacttttagaaactaaaggaaataatagctggaaaaccctctgtagtttaaaatcagtcattaaactcacaatagggtaagtaaatatwgccacctgttaacatgtaaataagcataatttgttccaaagatggaatattgaaacttagttcatgtctgctgtaaaatattatttaaatgctgctgggcatttcacttaaagaacttaatgtcaacagctacaacaaagaccaaatctgaactgctaatgtggctgctttgtagggaatggactaatatcagtgtgttagatcttaaggtatcagtatttcagaatcctgcgacgattttatttctaaattcatgtactgtatgtccataagtgaaaataaaatgtcatattcttttctattattggtatcattcatgtactttgaaagtgatgtttttctttttgatcttagaatgctaaaaatcatgcaaaatgatagacggtttggctctgtgtccccacccacccaaatctcatctcaaattgtaatccctacgtgttgagggaggtacctggtgggaggtggttggatcatgggggatggtttcccccatgctgttttcatgagtttgcacgaggtctgatggtttaaaagtgtttggcatttacccccttgctcgctcactttcctgccaccgtgttaagatgtgctttgctttcccttcaccttctgccatgatgaagttttgtgaggcctccccagccatgcggaactgtgagtcaaacctcttttctttatatgttacccagtctcaggtagttctttacagcagtgtgaagacaaattaatacacaaagcaatgcatgatcatcatagaaaaattagagtaagcaagaaaatcagtagcttctgcaattttgctttccagttatgatcacttaagaaattttgtatctccttatagtttttatttttagttatagagaaacccagggaaatatttagtaaagtgtaatgtccataaaaaggtgtcccccaccttcaaattgtaatttgtttttcaaaatgttatgaatcccagctgatgtgggaaaatattgcttattagaaaatgacacctccacaggaaggtgtcagcatgagggaaatagtgatggaaacacattggtacctagtgatggcagcagtgggccgtctggagtggctgctgccattgtgccggccgtagcagggaggtgtgagtggtggctgcaggagcagccgtggtgatggtgagacccctgtgccccacgttccctgtgccccgtgtccctgtggcagccgactgcgccgcccccacccctgtgtggccragtggggcctgcctccaggcctggagccaccactgctctggaccctggtccgcgttaccaccactgttgcttgctgttgccaggagggcggagagtccctggagcctgctgcagggatacccctggagcctgtctcccggggggccgccgcaatgtggccaggttgagttgcctgccggcgggggagcagcgtgattgtgcatggaggaccaggcagagaagggccacaggcggagctgggcccggggtggtgccatgcttgcacatggagcacgggggccgcgcctggggtgcggagctggggctgtcctttgggggcctggagtgggaagtgggagcggtgctcactttggggacacagccagtggcacggccaccgcacccttcctgctgactggcgccggattcctgcgccttgggaggaggctctgcgcaggatttcccagggccggatccccagggtctgcctcatagcggggtgacctctgagcctgatgctccctaggaccaggcccagggcctgcaatccgctcctggaggcactcctgctgggcagggctgtgagccaggcaagggagagccctaggccacccctgagcactgggaccacaggaagaacttgtggtgacgtcactcttgcctcagatgccagcatgggcccagcaaggaacctgaacccctaccccagactgcgaggaggcatggccagagccgcctgcacgtccatggagcaggtgggagactcgccttcccaggcacaggacctgggtatccgcactgtgcaccctcgggagccagatctcagagtggggttggagccgaagctgggcattgtcacagctcagcagggtgtgtgcacacttggggcagcactgaaaagccagcctcctgccacgtcggccccctctggactttgggcaccaacaagcactggtggaggggaggggaaactgagggggaggctaagggtgtctcggtgctgacctgcaggtgccccttggtcaagcagtctgggcaccatggatggctgcaggaggcagacaggctcctgggcagaaaggggcgggtccctggtgaggccccaccttcaggccacggacggcctggaagctgggggctgggctgccagttctgtggacctgactggaatgggaacttgtgccttttctggtcccacctatggctgcccacggaccaattggcatattcagtttctccctcctgaggcccagaaaggccctgggctcagccaaagcagagcagagacaatgggacaaccagctgcagagaagagctaccctctctgctgatagctgaacacttgggatgacctgcctggagagagcagctaccctctctgctaggagctgaacacttatcggaacaccctggctgcggaaaggaggtactccctgcaggtctcctctgagctgttctatcactcgataaagctcctcttcatcttgctcatcctccacttgtccacatacttcattcttcctggccacaggacaagaactcaggacccgccaaatggtgaggctaaaagagctataacaaacagggctgaaatgccccttgctcaccacattgtgcgcgaaggagagaagacctgcagcccttcagggaacccagacctgggagttccctgagtcagggctgtgactccctctttggggtcctgcagttcctagcatctctaagcttctgggcactaccgtcttccgcactggcagccgtggaagctgcttgcatgcatgcctggtccagctgcagccttgcagagagcccgcacccatgccagcacttggagctgcctaccccactgcagcagctggtgtgtgtaactgcagtggttgggccccatgcttacataccccttgctgctccatacctgacttggccttggcaggcatgggatccaggcccgtaatgtaagccgagctcagcctgccaggctgagtgggcggaacaagcccagcaggcctgaacaaaacacgggcaaaggcaccactggccacagaggtttccagccagaaaaccaacaccccaaagatcctgtaacattaggaggactctcactcatgtgggaagtgagatgaaattccttggaaatggctcgctcttaatcccatgtgctcgatctcgttctctctcaccagctgaactttggagcacttttggagtaatgtgggttctctgtattaacagttgttttctgacagtggatcagaaaacatataaatatatatatatataaaaaaacatatatctctcttgaggataaattatataataattatatttatatatatatatataatctcaggataaattagggtaaatatttaaaatattgtcttcccataattcatttttccagtttcttagtgaaataatttcaaaatttggtcattaatttgagaattaatgaggtgtccttgtgctcccaaccagggactgcaggggatgtatgataccttccagctctgaatgacctcagtgcatctatcactgcataacaaattactccaaaacttactggcttaaagcaacccctatttattcgtatttatcatctcacagttcctgtaggtcaggaatttgggcacaatttagctctgtcccccatttcagggtctcccacaggcgccagtcaaggttcagctggagcaggatccactttaaagatcactctcgttgttggcaggtgtattagtttgttttcacactgctgataaagacatacatgagactgagcaatttacaaaagaaagaggtttaactggacttacagttccaagtggctggggaagcctcacaatcatggtggaaggcaaggaagagcaagtcacgtcttacgtggatggtggcaggcaaaaagtgagagaatgaggaagactcaaaagtggaaacctctgataaaaccatcagatctcatgagacttattcactaccactaaaaccactcccatgattcaattatctcccactgggtcccacccacagcacatgggaattcaagatgagatttgggtggggacacagccaaatcatatcagcaggattcagttccttgtgggctgttggactggtccgcttgctggctgttagctgaaactctccctcaattccttgccacatgggcctgttcaacatggcaacttgtttcatcaagtcagcaagagagagtctgctaacaaggaggaagtcacagtgtcttgtctttttttttttttttttgagacaaagtctcgctcttgtcccccaggctggagtgcgatggcgtgatctctgctcgctgcaacctccgcctcccaggttcaagcgattctcctgcctcagcctcccaagtagctgggattacaggctcctgccaccatgcccagctaatttttctatttttagtagagacggggtttcaccatcttggccaggctggtctcgaactcctgacgtcaggtgatctacccgcctcagcctcccaaagtgctgggattacaggcgtgagccaccgcacccagcccacagtgtcttttataacttaatctggaaattgttatcccatcactttcaccacatttctgtgcactagaagtcactaggtccagctcattcaagaggaggagataacacgagcacatgaataccaggtggcaatctttgggggccgtcttagaagtctgctgaccatagtcagaaaggagagaatacaaaggtaaagtgcagagctgttgctggagggagtcaggtggcttcctggaggaggtggggcttatgctaggacctaggtgttctggttatctaatgctgtgtagcaaattagcccgagaaagaaagagggggacggaaggatgaaggagggagaggagggacatagacacagcaggtgtaccatgaacaccctatccaaggcagctagttgagctccccagagccagggcacaactctgctattatccttaactcctggctatgtttccttctttggaaggagtgttgggaaaggcacctagcttgtaagaattcaatattccacctcaatctaaagctttactgtttccctctgtatgcttttgggcatctggatcatgactggggagaacagaacttgcaccttggaagcccatggtctccttcccactgccatccctacctcttcccacagatgaccactagccttgcatttcttcctagtttagtacatagtatgtatccctagatacataatatctatataatgtatatgtaatatctgtattgtttcgttttgcttgtttttgaagtgtctagaaatggcatcattccatatgcatgatacagctggcctttgaattcagcattgctctaagattcatctacactgacggttatagctggagtccaccctgttgttgtctgccttttgtttgtttgtttgtttgtttgagacagggtttctctctgtcacccaggctggagtgcagtggtgcaatagctcactgcaacctccgcctcccggattcaagcaattgtgctgcctcagcctcccgagtagctgggattacaggcatgcgacaccacgcccagctaatttttgtatttttagtagagacagggtttcaccatattggccaggctggtctcaaacttctggcctcaagtggtccacccgccttggcctcccaaagtgctggcattacaggcgtgagccactgcgcctggccaactgttgtttactytgaatgaatgtattacaacatatgtattcatttggatctatttatgacggtcacaaatcattttttgtctagtctaatattgatggatattctggttgtttttggttgtttgtttttgcactaagtactgctgtgagtattgtatatgtctccagctcacacaggaaattatttctctatgctccatgctcagtggtagaattataagcctgaaatatataaggtaacatgaaattcttttctaaattgcttgtgccatttatattgctcccagttccacattatcaccaatgcttggcactgtcagacttcctaacttttaatccagtaggtataaaaatcgtatc

SEQ ID NO: 93248 - DNA, 172314 bp, Homo sapiens
  misc_feature (1)...(172314): n = A,T,C or G
ccagttacttcctccctttcctgcatcatcaatttgtccttgtatttgattatctccaccttcttacaaatgtattcatggattttctttttcatttttcttttcttttcttttttttttgagactgggcctcactgtagcccaggctggagtacagcagggcagtcatggttcactgcagcctcaaactcctgggcttaagctatcctcccactccagcctcccaagtagctgggaccacaggcatgcaacaccctccctggctaattttttaaaaagttttttgtagagacaaggtcttgctatgttgtccaggctggtggcaaactcctgggctcaaccaatccttccatcttggcctcccaaagtgttggcattataggcatcagccactgcacccagattaatgcattttctattccttttaaagtcacccaagaagggcactgccttcacttccatggtattgctgccaaaatacaaaaccggaataaagcaggaggaacattctacaaaatacctgattagtacacctcttcagaagtgtcaaggtcatgaaaggcaaaaaagagagagaggctgtcccagcttgcaggagacaaaggagacataataatttaatgcaaaatgtccctgggctggatcctagactaggtaatagaaggaaacttgtgataaagactattttttatctgtttctgagaaacaaattatcccccaaacatagcagcttaaaactacaaacacaatctcacacagcttctgggaatggcttagctgggtggttctgcctcggggtctccaagaggtctcagtcaaactgtcagctggggctgctgtctttgaagactacatggggttggagggtccattatacatggacctggctgttggcagttggcttcatttcttcagcatatagccttttctataggctaatgatgtggcttaccyccagggtaagtgatgcaagacacacacagtgagaatgacctagatagaagatgcaatatctcttataacctaatctagaaagtgagatactattacttctgctgtattgtattggtcagactaactaatcgtggtacaatgtgggaagaaactacatgagggcatgaataccagcaggtgaagctcattggaggctatcttagaggtgggatactacaaagagtatttaagaaaaacttaaagcaagcatcatatttaaaggtagaacattagaggcaaccccattcaagtgaggaactaatggaataagacaaggatgcccactatcacagctattacaactcttatcaaatatgaagaaggctttctttgaggactgtttatgatctctagtattgtttgactctgacttgtccttcaagttgagtcctggccgtaggggacaaatagtgttatgggtgtgactctggagagccaagctcctttaatgagacggtggcaagtaaaaatatttctgaagatccataagttagagtgttaataacaaacaacactgtgaaaggcataaaattaaacaaatggtgatgggtagcagttcctttatttaacaaagaaatctttacactctttttgggatataaaatcccaaaactaacacaaactcatcccagaaaactaatccccagctaatacagaaactgtattagtttcttatggctgctataacaaattaccacaaacttggtggcttaaaaaaaagaatgcatttattatcttacaagtctggatgtaagagaatcccaaatcagtttcactgggcagaaatcaaggtgttggcagggactcattccatgtggaggctctaggagagaatctgttttctttttcttttttttttttttttttgaaatggagtttcgctcttgttgcccaggctggagtgcaatgatgtgatattggctcactgcaacctccacctctctggttcaagcaattcacctgcctcagtctcccaagtagctgggattacaggtgcacaccactacgcctggatacttttgtatttttagtagatagggtttcaccttgttggccaggctggtctcaaactcctgacctcaagtgatccacctgccttggcctcccaaagtgctgggattataggaataagccaccacacctggcctgttttcttttttttttaaattatggtaaaatatatatataatgacaattaccattttaaccatttttaaatgtacagttcagtgacattaagtacattcacattgttgtgcaaacatccccaccttccatctccagaactctttttatcttcccaaactggaactctgtatcccttaaataataacttcccactccctccccattaccctatcctctggcaatggccattctactttccatcttagaatttgatggctctaaataccttatatgaaaggaatcatacaatatttgtccttcagtgaccaccttatttcactgagcatttgattcatccatgtgtagtgtgtgtcagaatttccttccttaaaggctgaataatattccattgaatgtatataccattttcttttatatacatttaagccgtggatggacacttcggttacttgtacctttttgctgtagtgaacaatgctgctataaacatgggtgtacaaatatctctttgaggccctactttcaaaccttttgggtatctactcagaagtagagttgctggatcacatgagaaaaatgtgtattcctgcctttttcatcttcaactgcatgagctgcactccttacattctttggctcatggtcctttccttcatcttctaaaacagcattgtagcatcttgtttcagtgatcaccttgcctcttctctcaaatttctctctgcctccctcttataaggacccttgtgattgcatttagggccacctggcattagccaggataatctccctatctcaagatccttaatataatcacatgtgcaaagtctcttttgctatataaggtgacattcgcaggttccagggagtagaacctggatctatctttggggggcattattcagccccatacagctaatagaaaaagcaaaaagaatgcagaaacattgttaatagaaaggtccataaaatcctactatccctagagatcatcacaggaaatagtttgggatatagttttttatatttctttctatgcatatactaacaaatgcctttcttttatttcctttccttttttaaaaaacaaaccaatgaggtaacattctacacagcctagcaacttgtctgcttcatttaataatgtattcaagcaagccctttaagagtgaaaaggatttactttcatgctactgccttctttgaagtaaaaatagcaastttccagtaaagtaagtgacttttagaaaaattctatttgaaataatcttctagaaatgtcaatgttaaatgtaattcacgataggcaagacagattttcaaccaaaataaggttagaggctgtattttgggtaaattagagaaaggggcactctagttatatatggatgcacgtgacatacctgaaggctaaactgcatcaagtgtggcaggttaatatgccagccaatgtttccatggtatcagtttaaactaagcatctggtgttcggagtgggacctggttggaaccctgtctccatcatcaactacatatgtgaccttaggtaagctgtgtccaacctttggamctcagtgtccttgtctttgaagaggattggactagaagttctaagctctttatgatcttccattctgcaacttgagaagggcactattctgccagaatggagatccagttttgaataacaaatctttgactaatttgccttatgacctgagcaaaacagtcagctcttttgggcctcagtttatttatctgtaaaacgaggagattggactagaaaggagctctcacattctaggacagtgagtcttcaaattgaatgtgtctaggatcagttaggagtcttgttaaaattcagagtctgattcagcaggtctagggcagagactgagtttctcatttccagcaaattcccaggtgaggctgatgctggagaccacaccttgaataacaaggtatttggatgttgaactattaggaaaccttgttaaagacatggaaatgggcaaaagagaatactgtatgtcgcttgggtggagtattgggggattatctgatgctataggagtgcatacatttgcctgcctctctgttaactagctattgttcatcttcgtaagaatagaagctaaaatatggaatatgaggccgggtgtggtggctcatgcctgtaatcccagcactttgggaggccaaggcaggcggattacttgaggtcaggagttcaagagcagcctggtcaacatggggaactccttctctactaaaaatacaaaaattagccgggcatggtggtgtgcacctgtagtcccagctatttaggaggctgaggcaggagaattgcttgaacccaggaggtggaggttgcagtgagccaagatcgtgccaccgcactccagcctgggtaacagagtgagaccctgtcccagataaataaataaataaataaaaatgtagaatatggatacagtagtcccccttatcttcagtttcactttctgaggtttcagttacctgcagtcaaccaaggtccaaaaatattaaatgaaaaatttcagcaataaataattcataagttttaagttgcatgccattctgagtagagtgatgaaatcttgctacctcctgcctgggatgtgaaccattgtgaatcatccctttgtccagcatatccacgctatatagctacccaacttagtagccatcgtggctatcagatcgacagatcacaataagggtgaggacagtacaataagctgtttcaagagagaccacagtcatataacttttattacagcatattgttataattgttctattttattattgggtattgttgttaatatcttactgtgtctaatttacaaattaaaccttatcataggtatgtatgcataggcaagaaaaacagtatacatagggttcagtaccgccgcagtttcaggcatccactgaaggtcttggaacatgtctcgtgagaataggagggactactgtaatcatgggacgaattttgtttggtagagatacgatttcaagcctgtaggaaagaaatggctcccaaacattactttttcctgtcctataggatattaaccaattttgcacaattggcaaattcatttcagtattcttgactgcccacatatatgagttcttcaagttctcctttaaatcggttttacctttttgaaaattatgctttaacaccactggttctttgcaattctttgatttgttgatttattacaagcatgaaacacttgccgggtgtgtggcagtgggggcatgggatatacaaactcctcgaggaaagggaaggcatcatgctttcctgactcccagcacacttgccaggtgagaaaagtaccttaccccaaacctattcttggccaggtaattccaccccccgccccagggctagaggattackcaatatggtggaagaaggtgcctcactcatcatgcagtcaattaggaatcaagaggtcgagacctgcccaagcccaggaggcagttgttgctacgctgggattcgaaccctggggtctgggctatatcccagggctcttttcaccagctgccgcctagtttattctgaggccactaaatcaacgactttcatccgtctgctataactgtaataatttgagtcccagacgtctagagctttgccgacaccagagcagttaaagggcgtgccagaggccgagaggcggagccccgggccgccgcgcagacgccccgccccgcccggcgggctgctgggagtcgaggactgggttgctctcctcccttccccggtcccgcccccgtctgtctgtgtcgactgcggacgctatcgataaagttgctgttttgacaacatggcggcgcccatggtccgtggcccggcagtgctcgcctaaaggtggagaacgaggagtagaggagccgcaggccagagcctgtgagcaggtaaacccccggaccgggcgcagcgagatgagagacgaggcccagtctcctcttcctccggctcgggagattstgacttgctgagggcaggaagggaaggtgcgggctgggttaggtggtcctggaaccttgcagtttcgaaactgaaaatatctgagatctaggtcttcaggacctttgagccaccgaccccattgatagctctggactctttcccagaaaaatgcacatatacacgtagttttgtactcaagctcccctctccactactcccctaccccagatctttgctccccggactaggggtttggacccagttgaaggtcatcccttgcctctctggggcccacaggtcgttttcacgttagggctcggaggtcctcagaaagatgaggttccagacgagaaatccgcctgaggtcacaggtaaattagtagctgcaaaatccaagattttttttgttttcacaaaacttggtttctttaagatgaatttttccaggtgcattcttgcactttcttttgagtgttgtacacagatgtcctcgtgtgcttctcccctgtgtcctgtttttttttttctgcctcctactcaggagaacagaaaaggaaggtgggttttgtctcacgggtcaaaacttagatcatcccacacacgcagggaaatgaatgactcccttctcaaggcatcactgtgggctctgacggctccagcattcagcagcccgtcagctctgcgtcccagcgcctcttccgtgaaagggaagcccctgtgactgcatgatgcacaagaaggaaggcggtcttgggaccacggcctagagggcggccagggcactccctcctgcctgtgcagggcccttcctattctcaaaaaccttcaccttaagctccaactgagattgaggtcagggttgattctaaagaggggtggagtagtgggaattgattctttggaaggttgtggaagaagagaagagtcttcttatcttagaagaagattctgagcatctaaggacggaactggaggagcccgagctaaggaagtaaagggccaagttgatcataaatataagacatgagccacacctttcacatcgtcttattctcacagccgtctaataaaatggctgctcctcgctgtcaataagaggcagtccatcagggctttggtggaggggtacttggagtggccaagaacaaggcctgggaagtaagggaaaggaatagggctgaaccctaggaagttgtgtaatgaatcatagccatgaatactgactatatgttgattcttatgagtccccttatggaattagaacctgagtggggtcttagggactcctaacttcaaaggatatgaactattcttaaaaaggtcctaacacaggttatcagattgccccccaccccccaaaaaaaggtggaatcagtttacattcccaccagcagttgtttaaaaaatgcatatttcttttcatttgccaatctggaaactaaactttcattgttttaatttgcatttatttgattagttgtaaagttgatctttttcatattaactatatgtcctctttattaaccatttatatgtcatctttgctgttttcctttgcccatttttatttttatttttatttatttattttttttgagacggagtcttgccccgtcgcccaggctggagtgcagtggtgcagcctctgctcactgcaagctccgcctcctgggttcacgccattctcctgcctcagccttccgagtagctgggactacaggcgcccgccaccacgcctggctaattttttgtatatttagtagagacagggtttcaccgtgttagccaggatggtctcaatctcctgacctcgtgatctgcccgcctcagcctccgaaagtgctgggattacaggcgtgagccaccagaccgggccttctttgcccatttttatttttattatttatttatttatttatttatttattwatttttgagacggagtctcgctctgtcacccaggctggagtgcagtggcgtgatctcagctcactgcaagctccgcctcccgggttcacgcctttctcctgcctcagcctctctagtagctgggactacaggcgcccgccaccacgcccagctaattttttgtacttttagtagagacgtggtttcaccgtggtctcgatctcctgaccttgtgatccacccgcctyggcctcccaaaatgctgggattacaggcgtgagccaccgcacctggccctttgcccatttttaaaattcgatttttagtgtttcttttcacacacatgagctcaagagtagaaaccttttgtttttgcagttttgctgaacattttctcgtagctaattgcttgctttccmattctgttcttaatggttttgatatacagattttttagcatcagatttattaacattttcctttgtgaattttttcattgtttttatactcaggacagaacatcctgcaccctcttaagatttattaaatattcatctgtggtccagatgcggtggttcacgcctgtaatcccagcactttgggaggccaaggcagagtgatcacgaggtcaggagttagagaccagcctggccaacacagtgaaacgccgtctctactaaaaatacaaaaaattagccgggtgtggtggcgggcgcctgtaatcccagctactcgagaggctgaggaaggagaatctcttgaacccgggaggcggaggttgcagtgagccgagattgcgccattgcacgatctcattgcgacagtgcgacactctgactcaaaaaaaaaaaaaacaaaatccatctgtgtttttatttttttatgacactttaaaaatattctaatttatttattttattttatttttctgcttttcagatccagacctacagataaaaaacattatttaatctatctgggatttactccggcttatgatttgaggtggggctctaattttaagtttttctcttatttgttgaataatctattactatctaatctgctcctgcttttttaaaaaaatgaactttaaatgcttttaaatacccagatctgtttcaggattctctagttcactggtttatttaagcaaagcagaggtcattagtaagccaggtattatgtgaacatttttagaaagcttattcttgttgtgtagacagacagtgtaggcagagcagttcaagtcactgtattttataattttgttgtgcccttttgtttctatttgagaggatagcccagaacactccttaggtgttctttggggatgctgtctaggagagaagtggcaagcatccatctatgtgtcctctgctaaacaggcgttctttggcttgcaaaggtatgaaagtattgacttggcaagagaaccataaaatctgtgacttctatataattagggagttctaattatagcaacctaagccctaaaaatatatgcaattgccttaagtgtacaaagcgtatgtatattaggtcagtcatatggaattgctaacatttaaccaatttcatatagttcaaatgcctgtaatcagatctgtgtactttaaaatagccaagcccaactaatagagagatttcttttttatctttttttttttttttttgagatggagtcttgttttgtcgcccaggctctggagtgcagtggcgctcactgcaacctctgcctcccaggttcaagttattcctctgcctcagccaccctagtagctaggattacagatgcacgtcaccatgcccagctaatttttgtatttttagtagagaaggggttttgccatgttggccagattggtctcgaactcctgacctcaggtgatccgcctgcctcagcctcccagaatgctggtgttacagacgtgaaccattgcccgtggcctaagagagatttttttttttaagtctgcactttattctatccctgaagaagcaagaggtgtttaatgtagtgagaactgataatgtcaatgactttggcagaccaacttgtaagatgcccacattatgttgctgtcttatgtgagtttgaaactcactgttataagcctatattgaccttcctggcaacatttgtgttctagtacctttgtgaaacaggccaaatcctgatagaagtggaattttgagagaatcaaagaacatcagcttagagtgccgggtttctttatttctctctggttttgaaaagatctgttktcatctgttttttcactgtagcacttcttgaatgctgttatgccagaaggagaaagtttaggctatttagtctagtatttatatcttaaatatttgataaaaatctcacctcaaccctttgaatagcaataaaacatgaaacttcttcagtgaggtcatttccagtatttacctgtggaagaagccaacgaaacattaaaattggattttgaatcacaactggatatcctggtaggccccaacctatgagttgtatttcaaaaaatagcactcaccgtgaccacatgttatatatttttgtttctyatctgcctcccttattgtttgtttcttatctgcttccctgctagtatgtaagtgctacgaaagaagggactctgggccaggtgtggtggctcacgcctataatcctagcactttgggaggccaaggtgggtggatcatgaggtcagcagttcgacaccaacctggccaacatggtgaaaccccatctccactaaaaatacgaaaattagccgggcatgttggtgcatgcctataatcccagctactcaggaggctgaggcaggagaattgcttgaacccaggaggtggaggttgcagtgagccaagatcatgccattgcacttcagcctgggcaatagagcgagactctgtctcaaaaaagaaaaaaaaacagagaaagaaagaagggactctgtttgtgtttactgctatattcccagtacttagaacaacgtgtgggcctagtggtagtcattaaatatttggtggtggctcacgcctgtaatcccagcactttggtaggctaaggcaggtagatcgcttgagcccaggagtcagaggttacactgaggtatgattatgccactgcactccagcctgagtgaaagagcaggaccctgtctctaaaaagtaagtaaataaataaataaatatttggtaaatgaaggagaaactaaatgaattaacagtcttctaaataatggttattttctggttcagcctacagggtatatttaactcataatatgtataaaaattactaatagtagttcagaatttctggccctcctgggaggcctgtatttagaccccttctgatatttgagcctaacgccaactcagcatgtgcttgagctcttctgaggcttgaagacataagaagtgaagcctgctggagagtccctgggctggcccatggggaggggagggagggcactccatgccttccatgcaacttgtgaggttgcgcaggagctggccagctgatggyctccattttttcctacaggatttttgcatctttgatgttaggggttactgaccctttatattttctattaaaaagtttgtgtttagctcaattgaattgctaaagtattcttttcagggaaagaaattattaaaagtaagaggaaagcacagggccagaacactggwctgtgccaaatggaaagataagctctggggagggtttgaggcagctcatagtgtgctttctgccctctttttcagggccttctcaccttctgaagaatggcttctgtttggcagagaytgggtttttatgcctctcttctgaaaagacagctaaatggtgggccagatgtcatcaagtgggaaaggagagtaattcccggatgtaccagaagcatctacagtgccacgggaaagtggacaaaagagtatacattgcagacaagaaaggatgttgagaaatggtggcatcaacgaataaaagaacaggcctccaaaatttcagaagctgatgtgagtattctgagagattctaagagggtagagaagaggggttgaaggtttggaccctggggttagactacctggttcaaataagatattaaatatgtgaccttgaaccaaattgttgaatttctctgtgcttcaattctcttatctgagatggagagtgatcataatagtgcccacctgcactattgggaggggtaaatggattgggaggcataaatgaggtgatacaaaggtagtgtttacaagagtttccaatgtggtggatgcacacatagtaatattgcgcacgaggtgtatgacagacagcagcaaaccaggtgttctagagcaacatttactggggaagctcatcaaaataggagctctaccagatgatgggtcctttgtggtccattgcatggtggggcagcacacagggatctggcagggtcatatctgagactccaggagaggcacctgggctcctcgctggctacatgttctgagaagtaactgccccttccctggcaatcgtagcctccaactctgttctgctgccttagcatcatggtttggggcacaccagccctttcactgttgtgaactggggtagggtctaaccttgaggtagcagctacatgagttagtggacccttggcttctgcaccaggtacaccagctcggcactctacctgaattaatggtggaagcataatacttggctgcagccagtttccacagagtgctctctgttccttttctgggaggccagcttgctgggaatcagtctggaacgtgttaacccttacctcttgatactggtcaaaatgacagctgggagatgtgattgttacatgaaatgtttgaatctgattggagttttaaattctgatcatctctttgtagtagttatagtcaaataatacaaaccctctatgtttaataaagagattaggcccaaggcaagcagctgaataagtacagctgcacaagaccacacctctctagacttgccttttccccatctcctgattcggtcaacacattcattctttctgtgagattggtggttatgaaaaatgagtaaggggaggagagctatttgtgttaaactgaaagatgattttgggcaatggttagaaagaaaaattgctattgaaaaagatgtagtgtgtaacaagtaaaatgaaatgaaaaaaagggaaggtttgaatgtaatacataattttacaatgaaagcttgacttctaccttgttaggaagtgaaaagcccttgtgtcaacatcatcagactaatgtaacttaatagattttgaaaacaaactcttaaggagcagtttaattctgagtgaggacagtaaaattagcttttttttcccttttggtttagataatcatttattgacttccaaatgttttgatgttgtagcttactgattttgtgacatctcattcttcttaagcatacagttttttaaaatatcaaatggatcaaaataaattgttttagcaattggggagatagcataaggggcattgtgtgtgatcccctggcagccccctatcagggtttgaatcaaggaatggcaaagcagagtgagcactcagtgagtgagccagagcctgggctgcaatgctggctctgccccaggaaacctgtgtgatccaggccacatcatttaatgttttggattctgggctccttgcattgtttatctcacagaattgttttgaaaatcaaatgagaaaatgtgtgacaaaatgcattttacaaactgaagtggtacataaataaaagatacacaaagatcagaacgtggtgtgtctatcaggacctgagactatgacggaatgctcatggattttgaagcatttataatcgatctcactctggtatcagattcacttgaaatccactcacataagttttttgaaatggaatgtcttgaaatcaccatatttatcatttaaaaaataatttgyatttaatgagcatttaaccatgtgccaggcactgtctttcaattgattatctcatttaatcctgaaacaacccagcgggtaggtattattatcctcatttttggagtaagaaaactgaggctcagaaaaaggtttaggtaatttgccaagacatggcagagccaggattcaaaatcaaatgtgtgtttgattcctgagctcatgcttttccacacagaaaccttcttttgtctcacctttgatttacagttagcaaactgatcccagaaggcaaaagaatttgcccaaggcctcacagctagtgacaaagctaggaccagaactggggctccggattcctattgaggtgctccttttactctgtcaccctctaggctcagccacagcttcagagcgtgatctataaagaggcagaagtcatctttcttctaaagtcagaagctgacaaaaataataggacccacttataaaagccatcctttccctatcatttaaatcttaatctcttttaaaggcttaaattcttatacttttatataattrtgaaaatttccctttcaatcagattcttgctcaattataacagaaactcccatcattccttctctcttttccacccccagatgatagaactcatttcattgtcacagaggaaaatgacttaattcatgcagaaaagcaaaaggcagggacaggcaataagctgaataccttttctgtaataaacagaaatcttcatgaatattaaagactttagaaaacaatacttttctatgtatcttttatgaactcagatttggattttggcttagctagtatataattattcatttgattttgctattaatttaatctttattgaacaaatgtaaaacaagagatgctagtaaagaaattacaggtggaaaatgtttggggcaagattggtaaattaaatacataacaaacattagtataataaaaataattttatgtaaaaactttcaaatgaaaaactagaaacagcttagatcaaggattttactgttttcctagctcccaaagaactcttaacagctattttcccatattcctaaaaatttctgaagaataagccataagcctaattcattgtaaggagtaaggcatgaattgagtggatagttttcttctgattctgcactaagtaaaagaatggggtcttgtacctccttggacgacttgctcataagctgagaaggttatctgccactcactttcttaaggacagttattaagttcctgagttcccaccaacccctgaatctcaggtcctctctcagatttctgtggttttcctaagagttataaatctgcagtttctaattaaagtgtctgaccaatgtgttgctttccatcctgtttgtataaatccattgtagttgtcatttcagcagttccagatgattttctaatttgtgtatgatccagatttcttaattgttctctttttcccatctcttccttcaggcagcttaacactccttggtaatttctagaggatgggcagcacaaagaaaagttctactctagtttttgtgggtttctttttgccaygtgctaatggttccgttaaaggtttgtttaacttctttgctgaaagaagtttacgaactccttggcaagaatctgatttctggtttcttctgctctactgattatatttggtttatgtgtattatcagtcatgcgaacattcagcaaacaatatttaaaaaccccatcccacatatgtacataaaagaagggttatgaatattctgtttcgtgtttgtttgcattacttcaggggaagmaaattcttaaagaactggagtaaagttctagcaagggaataaggccaggaagaaaaaacagaaggcwgaaataaataaaagcagaagttctgacccttagtgacgaaacagaatcagttacccagttacctgttgctcttcctttctctccagcccctccacccttgaccctgtcatgagatgatttaaacttgggtgtggggaaccctcctattacttgggtaggatttgtgaagtttgctgggtaaaaagtgctccataggggccagttatcaggcttttggagcacaaaggccaacgaacatttatccaacattttatgaaactcctgctggcactgggggcagacgtggagaaagaggtgactaaagcacagttcttgcccttgaacagtaggtccccccatgaacagtaggtccccccagtaggagttaattcaaggactaccatctttgtttgccttatccattcatgtgcacactcatgacgacattcatcattttaccaggggaagaattaagatgccagaagtcagtgatccaataaggactcattggcctgtgttccttctgttcagatacatgtacagttgtctatgtttctcatgatgaagctgcttctttggaagctggagagttatataaccctggtctgaggctgcttatttatcatccctggagaacaacaaccttctccctttttaaaaggatcttctcattaccttcccatttcaacatttttgttgaaagataggctctcaatacartggggaaactcaggacccaaattggtactttaggatcctgttattrctgctaaacctacgtcagaatgcagctatagagaatttaggaagagactccatttttagagatgttacatctatgtgattcaactattgcttctttgaattatatggatatatgtatgttagagcttccttcggaaaaacaaacagttctttaaggacctagatagaagctgtcttraaagagaagtgtttttttgttttgttttgttttgttttktttttttaatggagtagccattcttttatccctttactttcctaataatcttgctttcgctttcttctacagactggcgctgaattctttcttgcgtgagatccaagaaccctctcttcgggtctgcattgggaccgcttttctttctttcttttttttttccataggtttttggggtacaggtggtatttggttacatgagtaagttatttagtggtgatttgtgagattttggtgcacccctcacccgagcagtataggctgtactctatttgtagtcttttatccttcaccccsctttccacccttcccccaaagtccccaaagtccattgtatcattcttatgcctcatagcttagctcccacatatcagtgagaacataagatgtttggttttccattcctgagttacttcatttagaataatagtctccaatctcacccaggtcactgcaaatactgttaattcattcctttcaaaaaataagtttttaaaagagaaaaaaaaaagatatatgggtacttaacacttagaggttgtttggcattattttggacattctttagcttaaaccagggctttgaattttgctttttgacattttaattgatttacattctgggaacactctttttaaaaggaaacttttaaaatgttaaattattactttgtgtaaaatgccaaaatattatgtatacatgcagagttcccagaaaatgcttaataaatactcattgtcgttctttcctagaaatcgaagccaaaattttacgtgctttccatgttcccttatccttctggtaagctgcacatgggccatgtgcgtgtctacaccatcagcgacaccatagcacggttccagaagatgagagggatgcaggtaagaacaggtgcctgctggagcagcccttgtctgccacaygcagggttggcatgtagtaatatgtgttcaagacaaatgaagaaaaccaactttagttaagattaggacagctttgaagatggacatgaaaagctcagtgtttccttttatggattagatgatattataataaagcatctaggttaattggggggcagccatgagttgggtgttgtgctggggtggagatcagatgggaatggggtgaaaggtagatacaaatgtggataacactgataatcttcccaggagatactcacccatgagtagagaatcattgtatataacgaactgaggtcaacagtacaaatacacatcagtgctatgagtggcaggtgagactgcaagatatttctttctgttctatttgatattttccatattctttgagcatgtatttcttttcttttttttttgaggcggagtcttgctctgtcgcccaggctggagtgcagtgacgcagtctcggctcactgcaacctccccctcccgggttcacgccattctcctgcctcagcctcccgagtagctgggactacaggtgcccaccaccacgcctggctaattttttgtatttttagtagagacggtttcactgtgttagccaggatggtcttgatttcctggcctcgtgatccgcccaccttggcctcccaaagtgctgtgattacaggtgtgagccaccatgcccggcagagcatgtatttattttctaatggaaaaaaataatttttttaagaaaagatatttggggagtaacaactctggggagttggggaaagtgccactaaagaaggaacatctggtctgggcacctggctcatgcctgtaattccagtgctttgggaggcccaggcaggaggattacttgagcccaggagttcgagaccagcctgagcaatgtagcaaaaccctgtctccacaaaaaatacaaaaaattagctcagtgtggtggcacacacctgtagtcccagctactcaggaggctgaggtgggagaatcacttgaacctgggaggtcaaggctgcagtgagttgtaattgtgtcactacactccagcctgggcaacagagtgagacactatcttaaaaaaaaaagaatctgatatgggccttgaagaatgaggtgaaatttattgtgagagaggaggacaaacrcccttccttggctgatgtgggccattcctctttaccccccgcctgctttttaaaaaaatttttttgagacagggtctcattttgtcaccccggctggagtgctgtggttgcaatcacagttcaytgcagcctcgacctcccaggctcaacttccgactctgtctcccaagtagctgggactataggtgtgtgccaccacgctcagctaattttttgtaatttttgtagagacagggtttcaccatgttgttcaggcatgtcttgaacccctgggctcaagcaatccacccacctcagcctcccaaggtgctaggattatagatatgagctaccgcacctagcccagagcctaatctttactagcaatctttagcaacacatcatctttaagatgggtgttggataatcataatatcttctttatccacctacgaaatatggcagtattcaagaagggctgagagcatggcccattgaaccaaactgccaggattcaaattccagctcttaatacttacaagctgtgtggcctttgagtagttaattaattaacctcttcaacaccttgttttctctcatctataaaatagggataaaatagtacctgccccattggcctgttaaaaggattcaaagaggatgactatgaagcacttagatacctaacacacagtatgtaaccaataagtattagcaattgccagcagtggacaggaacctgcacacaccagcacctgagagccaactatgtatatctctgcccaatgttgtgtttattagtcaccttggcagcttgaaatctgccattgagggagtatttacrtcatggtaatcagcaaacctacaaatcatggccttttcctccagagagccaattgttaattaaacatttactggaaccccagtggccattgctactatgaacctgtcagggcctatacaaatgatatctgctgcctctcagttctttctattttattttagcaaggtaagtacatccattgtcataactggtttgaaattttatgctgagctgacattggctgcaagaagtattcctaaaagagggtcacgttgtaatgtctttgtcacttgaagagttaaataactttatactaccaaattcagagatttgtgttccactttaagatggctgagggtgtttgtctctctggtttttgtcagatgttatttttcccagataactgtttttcattatttctgctatgtttattagaaagaggtgggacaggccaggcatggtggctcatgcctgtaatcccagcactttgrgaggccgaagtgggcagatcacctgaggtcgggaggtcaagaccagcctgaccaacatggagaaaccccatctctactaaaaatacaaaattagccaggcatggtggcccgtgcttgtaatctgagctactcgggaggctgaggcaggagaattgcttgaacccgggaggcagaggttgcagtgagccaagatcatgccattgcactccagcctgggcaacaagagcgaaactccgtctccaaagacaaaaaaaaaaaaaaaaaaagaaagatgtgggacagaatgaattggctctttgcctaaagataaagataaagacaattctttatctcactgtgataaagaatctagttgtgattctttaattagatttgtctaaattttttttaacttaggccaacttatttcggacaattagtgagtgcaggcaaattgcctacaattaagcttttttttgtttgttttttgaggcggatcttcgctcttgttgcccaggctggagtgcaatggtgcgatctcagctcactgcaacctctgcctcctgggttcaagcaattctcctgcctcagccttccaagtagctgagattacaggcacccaccaccacactcagctaatttttgtatttaattagagacggggtttcaccatgktggtcaggctggtctcgaactcctgacctcagatgatccgcccgccttgggacagttaagcttttatagcaactgtacatttatgatagggtgcagggaagcctgttagcaaaacaggtggttgaggggcttgtaggtgggattctaatttccttggatgggatgagatgttacagaggaggctcaaggcagagctccaggcccaaaggaactggtacccttgcaggcagctcaggcccaaaagacaaggagtcctcctaccatatctgaagcctaaggtcaggctagacccagaaattgaacaacctagatttgaacctaccactttctagccaagcgactctacagagtcatttaatgtccctgtatcccactttcttaatctttaacatagggataacaatactttattcctcacagggttatgaggattagatgagatagtgcttgtatctggcacataataatcccataataagtgacagctgtaattattatttatactgatcttattcctcagagctgcttaggaaggtgattcgtcaccatttaataaatgaatcttgtaattcatattatccatcctgtggcttgatttgcttatggttgaaaccactatttgttatttggttgatggtttcttagtctgtgtgatcagcagatacctaaggttgtctttttgtttcacagtttcagttgctgtgtttaagatagcaagccctcttttcagggtgttctctaggttctcctgaaattaatttcttattaattttcatagttcatatttaagtcacagcatctcagatacaaccaccaaatctggtgaaaacttgtctggtcatttttaagtgatgtgggaaaagagaaacaaatcttggtttcattgtcagtgatgtgaaagaaagtctgttgagcttccttgtcattttaaaatctttcctgcccagtgtcaggattggtccctgagattgaataaacttggactcaagtttaacgatcctcactctaagcagggaaggaatatctaatctgggcctgccaaacagggtctgccacatgtattgattaatttagtcagtaagtaatcattgagcaccagctctattcttgaatggagatatatgaaatagttctaaggcacactaagaacagcattatctctgcctcccaggttcaagcagttctcctgcctcagcctcccgagtagctgggattacaagtacacgccaccacacccggctaatttttgtagagatagggtttcaccatgttggccaggctggtctagaactcctgatctcaggtgatcagcctgcctcggcctctcaaagtgctgggattacaggtgtgagccactgtgtccggccagtccttgctatttttcaaagcccatttaaattcttacttctaccataaatccatccctcaattctccagttcacatttgttatgaaataatttagcacttatagtcagaaccacaaactagggaggtctatatgtcatccacatgttgttttatctgcccagtaatataagcttctcagtggcagggaaggtctttctaacttcttttgtgttagcatgtcaagttttttttttttctttttctttatacaagatggggtctcactatgttgatcaggctggtcttgaactcctggcctcaagcaatcctcccatcttggcctcccaaagggctaggattacaggcatgagccaccacacccaaccatcatgtcaggtttttaatggtcaaatgtaactaacatgtttttaggtctacagcctataagacctaacaactcctttgttcctaacagcctataagataacaactcctttgttcccaaggagtttataatctgataagcctcaactgtttgtgagttgattgattcaatggatgtttttaaaagcatacaactcctttgtttaagtctggactaagtgttcattgtgcatatatagcccagaataatgtttctcaaactttagaactcacrtatctcagtgacaaaatccttgggctcaagtttggtaaatattgaattaaaagttaaactctgtcattctagatgattacttgacatttagatgattataaatacaaaggcaaccccagacacccaattcatgggctagttcttggtgatcaggttcatcaatcaggaaaaattagaccatgctgctataataaacaatccccaaatctcagtggcttaaaacaacaaaattttgtttcttgcttttgctacatgcctagcaggagggctcagttcaaggtagtcaggacctcgatgatggctgttcttacctcagtgagtgcctccccatctctgtggctgggagaagggggtatagtgaatccccactggctcttaaatcttccacttggactcaagtcacttccactgacatggccacatccaacctcaaagagggtaaagaatattcccaccatgtgccaggatggtgaggaggatcaaaatgtttgtgaacagctccaatgacccccacctaaggtgatctagttgacccagaatattcttatcttgggtgatctttttaaaaattattgatgtaaaagtatacatttagaaaccatcagggagactagcagacctctcaattggagcctgtggaatttgagaaacattgctcagaacatgaagttgttgccgtcaagtttggcatccaaccatttatgctctgtaaaaatttctctgtgtgtccatgattcttaaactttagggtgtgtaatgatcccctgaggagtttgctaaaaaggcaggttgcgatatagtcctgcgtgaggctcaggaattggtatttaaataagcatttcaggtagttctgatgtaagtgctctcccagatttggcacttacatgaatgggatcggatgctccacagagccaaatggacatggttctctaggttggaaaatacatcccattgaaatgagaagaaaactaaaggtcacaagcagctgagcagacacacacagattagatgtggactgtgtatgtagaggggcaggtggtttgggggtgatgaatcaattaggaaacggggttagtcaaagcggtgatggtgtctgccctacccgcatcatggatttgttgtgaggtttgtgtatgtgagatgatcactgagaaaaccctctaaaaacaatatgtaattttcaagtgtaacccaattaatagtagcaataaaaagagagtcctgaggtttggatgtttgagcaggggccatttgaagccagagataaattattctctttcagtaatcagaaaaggctgtactgccaatcggtttcttcttaaactcatagaatgcctgatgacatatttaaaayttagctccatatggtgattttgttgtgttttcatatgttgtatgcacagatggttggaaaataaaattccccacctcccacctcggctggtctccccagcaccttctggtccagaagccgggtgataaaagcatcaaggtgccaagtccccctcacagagttgggcttggaataatttgtctcaggcaaaaagccaccaggcattgcccaagtagaagagttttctgcttgggcctttttgctattcactgcggaggaggaagaaaattgaggctatgtgtctggcagctgcataatcataatataattatccacaaatatcaggaagcaagggaagttcttagcaagtaaacaataatgtacgttccatcagttttcagtttgccagtcagtcaacaagtgtttatgaagtgcccggagagtgcatagcatggcatttagttttcaaatttgcaaatctctgtagcatctgaaagtagatagtgaatttccagggcatattctctcagatctccttcgaaggagagaacgaactgctggtccagtgccttgactggaaactggcagatttatctgcctgtcacatycctccacattcccagaggaggtctgctgctttgggcctaggtactgtcatttggtttttataatctgaagtattcacttgatttttatccccaatctgtaataatggtgagttattacacttgctaaacaaaattaaatattgtgtttctcatttcttggaaataagaagtgttgaacatactccaaagacaccatgacactctgaaaatagcagtttttggagaagcagtaaccatggttgctctcaattagaagctgaattggtttcaaatataaaattttgttttgatgaaagggagagaaagctggtaatccctagagaactggttggccctttcatagtaacagttacgctgcttccctctctactgggaaggcagatgaccagctgcttgggcttccttcccttccatcgccaaactctactcagtcttacttcttgtgtcggatgaacaactatatctttgcctctttaaaataattccttcttttaaaaaatatattttaaaattgtacatgaattcccatattccacctataacaaaaagaaatacaacatagataagtctgtagtcccctttgggcacccatttctacataaggcccccccgtccccaggcaataacctctggcattttccaggttatatgcctttagagccttctctgtctgtcatatggaactgtgttttctcctgcatctctttcttctacttcttttagtttgcttgccatccatcctgcctgccaactctgagacaccaaggctcaccctggagcagggcaggggtgggcagaaggccccacctgggtgtgccatggccatgtggctaccgggcctcaccccctggccagggctctgacccctgtgtttttgtcatcagtaactcctggtcttccatggtaacagctggcccccactcctctctgatctcaaagtaaggcaggttatgcagtcctgctagcgttcttgtsctggtccttgaccagyttgctgttagatccatcccttgctttttgtacggcagaagggctgactcctgcaggtccrgttcccaagctggccccctcctggttttgaacagtaggaaatcctggtaacattggaggacaggagaaagggagaggccagaaaatttctctctctctctctctgccctggtttggtcttcactaatctagttccatctgggcagtccagcctgtttgagcttctgcagctgagatcagcctttgggctttgttaactctgctttctcactttgtctctgcagtctagagattgtggtaatgtcctgcccttccaaactgctaggyagattcacccatttccttggcttcccactcaactttaaacatatagagtattagttaaacgaaccaggtggaaatgatggtttttcagactttggaagtttattttgtggatttccaagttatagctactggtactttttcttgattccatctctgagtagtattacatttattatttcaaaattatcattagkagtcttctgccaccctctgtgatgtcacattcctatctttccaaattgacatgatacatatttcaaagtgtattttcagtagatgtttttaaaaataaaatacatggaaaaaatgttctgaagctgcagaatgcattcatgtccaagaagttaacttctaggaagttgagagggttcaggtgggctcaagcatataaatagagatgccaataatttatttttatttttattttttttttagggaaattgcctagttagcacatgtgagctgtaagttcatttcagtccagttactttttcaactgtggatggattaaaataagttatggtggtagaaagaaaggaattggaattctaaaacctaacaggagagtttggagttcttcccagtgaatggacaatcttggccatagagaaatcaarggcaagaaagtgtaccatgtatctagaggtatttgatctgaacggtgcatgagacatgtacaaggctggcaagggaagcacctaacccagtgtatttcacgtaaataggccataacaacttgaccaaaaaatagaagctgctctctgtgggggaagggacaagctttggtattttgtaatcctgttgtaggtcttcactttgtttcccccttgacagtggtgaatcatcttatagaacaaaagtgagctttgcgcttggtcactgggctctaggaaacccagggtatagaaacaaagagaccctttccaattttgtggaaatttggctcacagagacatttattccagtgctctggctcatggtgggaagaacaattctgacttcaagatgcaaaacggccttcccacaatctgattctgttattctctctagggcaaacrtttgtttttttgttaatttttggtaagaatctgaaatattaagaaactttgagatttttctaactttattttcatggacagcttagataacatgtaagctaagaatatctttccatgttaattctatctgaaaacaaaaatagaaatgaataagtgtattatgtaaatctaggctggtttttgtgacagtctctgtattgcctttatttaaaaatatggacggcacctaacagaatgttaataggcagaaacattgaatcggtgccattttggcagttctgacaaagaaaccaagtggtaattaagtttcccccctttcttgtggaacagttacgcaacagttacgttattctgccagtaacacagcccaaggagaatttaaagcacagctggaagctgctcaggtgttgtccttgaagtattgcagaactttctagtaatactgcccatatccccagcattggattcttttttttttttttttgstcttgaaatttaaaaagaaaaagagaaagaattgcagaacttagtagcaaatacagaagaatgtttgtcatctatggatcaagcaatattcaagtgaaaattgtagcctaaacagtgtttgttttagtcatgattcttgtctaccacggactaaaaacccagcttagaccagcttaagcaaaaagggaggctttgtttttacacatcctgaaactcacagaatcaaaggaaatgtaggagctgggcccactgggtattggtactaggtccttgaagtacatcaatttccccagtctctctccatttcctatttctgcttctctccacatgccagctttattttctcagacatttctacaagctagggagcagagccacctgaagcccttatggcttctgaccaaggagaaaagagagccctgtcctcctccagcgttccgccttactctgtacaagcctagagctgtctggggaaagattcagggacttgcctctctctctagccagggggatgggtttttaagattggcagttcgtactaacactatattaagttggacacagaacagtttcctagaaggggaagatgctgtttgagaggatgaaatgctttgggtctgccacatttagtaagaggaaaagagacctcaagtctcaactggattgggatatgtccagtcagtttcttaaaactgcatagaatagatatactcagggaatgttagaatttttagaaaagacatgtatgcactgcggggrtctaactcacagaccctgacccagcaacaaatgaataacatacactgacacagatagtatgcctgtcagtccagctgagcatctgcrccacttacagactccaaggagagtgctgtaaagagttgcagccgaggccctgactcactggccctgccggcatttattcagcacacattcaatgacaaaggctttgagtaaacaccactataggaaaattgacctggttcccgacacccctagtagagagcagttatgcacccgaggttgatcaaaggttggtcttaggatcacatgagtaaacaagctatttagataaactgcattcctttgtacctactttaagccatttactcaaggtaaggattaggcagctttcagccataaccctatcctgagacttttgcaaaaccttccagccttccaagaagatttgtgtctatatcctataacttcatcttaaagtttttcccaccagcctgactgaactcccacaatgcacacttacatattttgtgcagagatccctgatataatgttaaatgaaaaaaggtcataaaataatgtatataatcatttctattttctttctctttttaaaataagctttttaacttttttwaaaaatttattttaggttcaggagtacatgtgcaggttatatagctatactcctgccagagtttacctagattattttgtgacccagatactaagcctagtacccaatagttattttttctgctcctctccctcctcccacccaccaccctcaggtaggccccagtgtctgttgttcccctttgtgtctgtgtgttcttatcatttagctcccacttataagtgagaacatgtggtatttgttttttggcctgcattagtttgctgaggatattggcctccagctccatccatgttgctgcagaggacatgatcttgttctttttttacggctgcatagtattctatgctgtaaacgtaccacattttctttatccagtctaccattgatggtcatttaggttgagtccacgtctttgctattgtgaatagtgctgcagtgaacatacatgtggatgtgtctgtatgacagaacaatttataatcctttgggtatatacccagtaatgggattgctgggtcaaatggtaattctgttgtcagctttttgaagaatccctacactagcttccacaatggttgaaccaatttaygctcccaccaagagtgtgtaaacattcccttttctctgcaaaggttctatttcatgaaaacaaataagcaggctcctatatatgtgtacatatgtttgtatgtatgtatttgagtggggagatagatgtggaaggaaacaaaggctggtgttattggttacatcattgacgagtagtgaccaggagttaaaaataaactttgcctttatttatcattgtattatgccatttcatttgttaaattaagcttgtattacgtttgtaatttgaaaaaacatcaacttatgtaaaaagaaaagcagcctattcygattgacctcaggatgggtgtggatgcaggaattgaagatagtagcttgggatcatctcagcctggaaatccaaggtgtcccagattcccaaaactgggaaatgcagcwtaggatgtggcaagccagcctcccctggggcaacagcaagcttgagaggtccacaggactgcttgttcagtaagcacatatcccttacagaaagcagttttcagtgggtcacatccaccaccaccttcaatatggcaaagtctactgtagggcagagtccttgcctggggcaattggaggcaggccccatycttccagtgcacagatggctgccttctgctgatggactgctcctggtccaatcagctgtggcaagaacagccgggctgcttttaatcraagcacctgatgtgaatcattaactattcaggaaagaagcactgctgggcctcttttactgaaaagggggccaagtacttgattggccctttgagcctgtgtggtccgttcggtttgggtaagaacttccaatgcctagcaccaaccttctgcagaggcttgttagaagtaacccacccttaggaacgtacatgtttgtgtraggatctgtgtgagattcaggtattaatatcttccgtcctcttgtcagaaagcaactatgttaaatgtggccaaagagatggaggctgaaattgtggtaagggaatcagtgatgtgcgatgctgtgagatgctaaagatcaagaaagcagacagctgcagcggccacagcagcaagtgctgccatttattgggtgcctgtgctgtgccgggcaccatgctagatgtgccacagacatcatgaacatgtcatgctcaataattcaaggtagctgctttcagttaccatttatagttgagactcagaattagtaagtaatgtgcctcaggctccactgatagtaaacaggcagagttagatttaggacctttgccctcaacaggctcctggagaacaagccttkgttagcatttcctgtgcactagccaaaggagtaagagcagctctattttagagagatggtctcagttctttagatggaattgtttcatcggactactaaaaatcaacttaaaaaatattaatgtgcatagtggaagtatgcctttaaggtaagtgactccaaccactggaaggggtatgcctgttctcttactgctgcctgctaagacaggggcttaggagagaacagatctggcgactgggattgcaagatgcacctaggttgggacactttgaagtgtaagtgcttatgggacctgaggcataggtggccagtgggtagtacaagtgtgcttgtsctggacataaagatggaggaaaactccaggtgctcatgtgcaggtggaagtgtggttcgctgcagtctttctggggatgccatttggctgtatatgtcaaacgtcttaaaatttttcatacccttttaccctgtagttgcacttctagaaatttttctaaaggaaatgttaagagtatatacaaagatttatgcccaagaatgttcatcctggccttttttataatgctgaaaaatggaaataacttttaggaaaacaaatatagctggtcattcaaagcagtcactaacaggctgcattgacagcaggtacagtgaaaaaccagagataaaaaatacatatataaataatatattctcaatttttaaacattagatacaaatttaccacatgtaactggtacgtatggctgtatggtagaataacaggtgagtcttattttcttctatttttctctacttaccaaattatggtgaatatgtaattatggaagaaaacaagacctatttctttagttgaaaatgtcccattctgatatgcgtgtgtggtgaggtggtgccagtaagtgcctctcagtattcgtcattattttaaggaaatgtgtgtgaacataagcctagcttctctgcatgatcaaaaagcaaagtaaggggctgggggcagtggctcatgcctgtaatcctggcactttgggagggagaaggatagctsgcagccaggagttcgagattacrgtgaactgatcgtggcgccactgcacttcagcctcggcaaccaaacaagaccctgtctcttaaaaaaaaaaaaggcagcaaaataaaacttaccccaggttgacagcccatgaacttgataggaaataagagggtcaactggaatgggctgttttctataacagaaatatcagagtcttcttggtcagtccttccccacaggcaggcttcagaaagaagtggcgtctgtggttttgtggctggattcagtttcagagaatggtaggggactgaattttgtaagcagtgtgtctttcctgacaggggcagggagcctggcttcctgagactgtcccctgatgccacagcagatgtgtcaaaccatttttcctgctcatggcatgtagtttgagagagcttgatagtgaagctgccagctcagctgtgactggccactcatttgcagacaagaatgccttactggcctgggcttgcttaaggtaattgcttctagactcctcactcctgctgggccacagttgcttgaacagtcaaataaggggttggggggtagaggatatatctcaaaaccttctttgtgcttgaagatttgtgattccttgttctttggagaatgaaaatatcttctagaaggtgattagagagcagtactctttagaaataataatactagtggccaacattatatacagcactttactgtgtggcaggcactattctcagcacttttcttaactcacttaatcttcacagtgatccaatgaggtagttatgctatcatccccattttacagacgatgaaactgaggagaaaaggaacctacacatggaacctttcttataccaaaagcatagctagtggtttgcaattaatttaaaaatattggctattttaggccaggctcagtggctcactcctgtaatcccagcactttgggaggccgaggcaggcagatcacttgaggccaggagttcaagaccagcctggccaacatagcaaaaccccatctctactaaaaatacaaaaattagccgggtgtgggggtatgtgcctgtaatcccagctactggggaggctcaggcaggaggatcacttgaacctgggaggtggaggttacagtgagccgagattgcaccattgcactccagcctgggcaacagagcaagactccatctcaaaaaaaaaaaaaatatatatatatakagagagagagagagggagagagagagagagagagagagagagaggctattttagaaattagtgtaaatgatgtatagggcttagtccaaagccttacttttatccagtctcaaaagttactctctggaataccttttctgctgtgttcctgtgtatttttcttagttttcatctatctggctgtttgggtagaggtgggggtttccctcccttactggtagggaagaaaggratgaacttcagtacttcagtacttcagtagttgggcatggtggtgcacgcctgtaatcccagctactcgggaggctgaggcaggagaatygcttgaacccaggagacactccaatctgggcaacagagtgagacattgtcttggraaaaaaaaaaaagaaagggatgaacttcaggaagaaatggggagtgggcctttcaggagagtattgcctcaatcaggggagagagagagagatagaagaaagaagtgtgaaactcttgattctggagcaacctggagcagggtgctgaatgatgtacatttaagagggactgtgtgccggattcaggcaagccgtgagaaagggacaggtccgggccactgagtagggttgggatgaactttcttaggtctgggtagagctgggactgcctagagccaccagtgtggtcattatgcatgtgttctgcagcactgtccagtgcggctttctgccatgatttgaatatccaatatctgcactgtctggttcagtgtccaccagtcacgtgtgtctgctgcacacttgaagggtggctagtgagactgaagaactgcattttttattttatttacttttaattaagtttaaatgtaatagctatgtgtggctactggctaccatattggacagcacagctccataaatgaaaaatactggccgggcacagtggctcacgcctgtaatcccagcactttaggaggccgatgcrggcggatcacgaggtcaggagatcgagaccatcctggctgacatggtgaaaccctgtctctactaaaaataaaaaaaattagctgggtgtrgtggcgtgtgcctgtagtcccagctactcgggaggctgatgcaggagaatcgcttgaacctgggaggtggaggttgcagtaagccgagatcacgccaytgcactccagcctgggtgaaagtgcaagactctgtctcaaaaaraaaaaaacaaaaaaaaaaactgacatgacatgagcatttggaaagcctatacattatgtgtgtgtrtgtgtatatatatatgtgaaactgaaagaaactctttataatttcagaaaaacaatttgggttcaatatagagactatagaaaagaagaaaataaaaagtactcatgaaaacacctcctcagaggtaacttattggtgctttggcatataaccttctaagttgtgttctatggttacgtcataggtagccagctggctgtcagatgcataacctgaaaacatccagcaaaagataaggcatgttagcaggagagagtgctgagtttgccccagaagacaataccaatggagttattaatgatttgccatggttgatgttcctcttctgggtcctaggtcatcaaccccatgggatgggatgcttttggattgcctgctgaaaatgccgcagtcgagaggaatctacatccacaaagttggacacaaaggtaagtgtttacaggcatattcaaatacttgcatacaaaaacctttaaaaaatttttttaacctgtgcttaaaaaatagaaagcaaagcaaacaaaacactgcagcgtaccaagagataaatatgattgtgtatattggtgtttgtcttttaacatattgtattcttatctaagaartattcagagagggttttggatatttgttcatgtgttcattttgakgctttgttatttacagttatttttccttcgagtatttacattcggtaggaaaaagaagagggttaggaaaaagaagagggtcgcatttgttaaatttctataatgcttctggtcttcttgaccatagttttactatatccgaatactacattataattttctctgaaaattcagtttattttttgccttcaccattcagaagcaagaggaacttaggcattccatgtagaaatatatggccactttattctgggtgtggttttctccaaggcggaacacactcgcaatcccacccaagcctcaggcttctactacacgtgggccagcrgtgctcattcctctccctcctgctaaagtcctgagggcctcaccctagaacttggcagaatcctctggggccactgcatcagctcatttcacaaaggcctgggacgcttccccatgccaccccttagagagacagaagggcagttccagggcctgtgcccagtgtctcttacctgtctttgttctagcttacccaaggatacattgtaaaagcatctactgtgcttctgtccatactatggcatccaggtctcttttttcttcctaacccctagcttctacttttctagtaatgtttaattctagattaattaattttatcactagattttatctagtgataaaaagaggaggaaatgatgattcaaataaagtggatcaaacatggcttatgtttgatataaggtagaccaggagttggcaaactacggcctgtgggctaaatctggccctacctgtttctgtaaatcaagttttattggaacacagtcaaatccatttgtttacatattgtccgtgtctgcttccgtgagacagtggcagagctgagtagttgtaatagagactgattggctcacaaagctgaaagcattcatcatctggcccttttaggtttgccagcctctctactggtgaatagcagttaagatgatggcccctgagccaggctacctaggtgcaaatcctgccttcccttcttgccagcagatcaccttgagcaaattacttaacttctctttacttatttgtgcttcagtttatttatctgtaaaagagggatagtcatagttcctatctcatgtgattggataaagactaagcacttctctgcaaagtgcttagcayagggtcttgcattaaataagctgccattagctaatcagagattatacagaagattttttcatggtttttcatatttttagtctgctagaawctaaaagaggatgcagtagaaatgaattagtcctttttctttaaaaaaatgaaagagaaaaaggtttatttctttattccatgttatattataagttggtttacctgtttatctccctgtttctcaatggtggatagttttaggttttaggatttacattttcattaacaaagcagtgtgtggtttcttttggattcccacaatttatatattaaggcttttgttttcagccacttttaagcttataaatgcttggcttaaataatatggcttaaatgcttgcagaatattgacgtctggacgggccagcagtgcacatctcaaaggggttgcctatttgaatggccaggggaaggggcagtyctcaaggccaaagaccattgtggtttctagtggattctgtatatgtccaaataatgggtgtcttctaatctgttggtattttttgctgattcttagtggttgatttttctgctagggcaaagcaacacttaaaacccatttgaataatttagactttttcagtttccctttacattctcaaagtgtagtttgtgtatggctttaatcccctctctaaaaaccaaacctttttcccattgtttcacagtaatattaaacacatgaggaaacagcttgatcgtctgggcctgtgtttcagctgggatagggtaagtcaactctttttcctgaaaggtcgtcattttaaggaaggacttgatggcagggagcactcttcttcctctttgagttgggagaaggcaagggtgggaggcaggaagcaggagggaaggattagcactcttcaraaagtatcctgagtggataatttgcttggaaacaagtaattttctgtgggattaaactgagagttaacttcctatttaactttggagttggctatgatttctgtgtggcaaaagctttgcacaaggatttctctagttctcagcaatagttttaaaagactgttggaatctatattaaagtgattaaatatcaatccatctggtccttgaagtaattagacattgattgaccatttatttaccttttgttttaagttcagaagtgaggctcataacagcccataattattctgtcacatataatcttttggtgttagacactttcaaactgtacattaaatcagtggagaatcagtggagaattccagacccacgaggagttcatggaaagccacctggctgtttggaacactcgtgttgcaaacaaattgtgaactgggcccttcaaagctgtggcccaaggcccaccctttagactttgaagaatagtctgttaggtaagatggactgttgcttgtctcctccacgaagggccccttccaatgccacagtccctcttaacatcccatttactccacaaaacgattggggttttcattgctgggcctgtcaagtttatattgttttctttactagaagcactggaacaaatgcaaatgagggctcctcatccctccccccaacaatttcttaaatgattgaaatttgatgagtacagtgaaaaagaacaaaagtcaaacacatttgaataagccctgaattattatttcctcacaccagagtcaagttgtcctgaggtgccaatagggaatcgctcatagagaatgaaatacggtcacaggcagagagaactgagtattggccagagctctttcaggatgagagtgttgactccttgagggcaaaaatggacttaataaccctttagagtgataactagcctagtcctgcacaggaatatcaacgataaatgacttaaaagttgttagattgttttcctaatcatcacagaggattagaacatayagaaaagtataaagagcataatgtggctaatttaatattttggtatggttccttgcagtcttttattttggaattataaacatttatataatttacaaagttcaaatcaatatgcatatattttttgtcttgaatatttttatatctcattaactatttgaaaaagtgacttttatagctgagcagttttttgttttatgaatgtattataatgtatttaagctatctcttattatacatttagatagattctaatgtttctctattataaatgcagattctcaatccttcttgttcaaatccgaagtccagaaagctctgaaaactgaaagttttttcataatttatttcactgtaaaacctgaattgaactgatatttatctcactaaaaatgagtattcatatattttactgtaagaatagtaaaattaccaagtaatatcccagacctagttagataaatgcactattttcttttaatttcaaaaaaatcttaattctgaggcacatttggctgacagcatttcagataagggattttgaacctctaattcaatgatgtagataaatatcaccacttctactaccattgtctattactgaacacttaccatgggccaggtacagagtaggtatgaccttattatctctttggatccctagagagctctaaaaggcaggtacttttattgacgtcattttattgctggtcacccaagtggcaaggctgggstgatccattggtcaagttatgactgccgtgctcctcccccaaacttaaggcagaaatctcagtgcagatgatcctggacttacaagggggttatcctaaattgaataagactgtcctaaattgaaaatattgtaggcatataatacatctaaccatcatagcttcacctaamctaccttaaatgtgctcaggacacttacattaaygtacagttgggcaaaatcatctgacaacacagtctcttgcagagtatcggttgtttaccctcatgactgtgtggctaactgggagccgaggctcagttttgctgcccagcatctcaagagtatcatactgctttctactgaatgcatatctytttcacatcattgtaccactgtaaagtcgaaaaattgttaaggcaagccgtcataagttgggaaccatctatacacatattttattatttccttaaaatgaattctcaaaaaatcaagaacaaattttggtatttattgccaaattaccctccataaaggctatacaaatttcctttctcaagttatacagttattttcatttgaatttcctttattattagtgattgtgaggttttttcatgtgtttaatgaatgtttgaatttgaacagggtatgtatgtgaatggtctaatcatgtgttttcccatatagataggaggtgtttgtccttttttaaatggtttttgttacaaataattttcctcagtctgtcatttgccttgcattttgtttatagttgaatattattagcatacagatatgtacttagacctttgagataggataaataacatattttcttcttgattctttgtgatttaagttttacacttcactggaattattttagtatatgagataagacaaggaattactactttttctaaatcaccagttgattaaaaaaaattttcaaacaatcccttctctttgttgatttaaaaggcaaactttataatagaccaagttatttcgtcctatcattatacaccaagttctgtttgtgttcatttgatccatttattatttcatgactaaactatttttaattacaattgcttttaatacttggcaacagaagttttctctcattgtctgatattagcaatgccatctccaccttctgttgtttattaaaaaaataaacttttagcctttatttgttgacttctattggtacatcatttatagatacaattaattgaaaaaattaaaaggtgggcaaatatatgggggaaacctttggggcaatttggagtctttgtgtttaataggaaagtgaaaagctatttgtatttatttgcataactcgtatttattttcataactcgtacttattttctaattaaactttttaaaacatagctttagacttctatttttaatgatgtcttgcctttggattctgttttcttttatctatagagacttgaaaagtatcaattccattgttcaatctgctaaaagatagctttaagagtgttttttaaaaataatttgtatcaacataaaaaatagtgtatttctcttgatcctcatgtatgataagaaaagtagcaggtaattaacatttcccattttctaaatctattttccaggggttttttgttgttggtttttatgggggtatatcctgagatgttagtcctaatttactgtttcattgtttttgtttttgttttttagacagggtcttactctgtcacccaggctggagtgcagtggtgcgatctcagctcattgtaacctctgcctcccgggttcaagcgattcttgtgcctcggcctcctcagtagctgggattacaggcacgcaccactacacccggcttctttttgtattgttgaagagacggggttctgcccatgttgtccagactggtctcaaattcctggcctcaagtgatccactgtgcctggccggtttactgttatattgcaatttttctaatcatgtatcatttcttaaccattatatttgatattcacttccagttttacaatcatattcatagcaattatttaaattttaatgctctttaatttcacagcttataagaagaccttttaaaggacaaccgttcatttaaaattttttcatttctgaacatttttaaaactttgttttaactcttggtttggtgtgatcttcgcccaggtgtcacaggttactttcataactaagaatgacagctgctttcacctacaaacagcaacttactgggatatagaatctttcattcattatcttttttctttcttatctctgtagtagaccttgatctattgtcttttttaaaaatacttataggcttgcaggaagttgccaggatagtacagagagatcctgtgtggtctttacccagctttgcccaatgataacattttcataatgtaatataatatcaaaccaggaagctgccttcggtacaatactattattaataagtagagtgcaagtcttattcagatttcaccagtttttagatgtaatcatttgtgtctatttgtgtgtgtatagtagtataggttctccttaacttacagtgaggttacatcacaataaacgcattgttaagttgaaaatatcatagagtcgaaaatacatttaatacacataacctaatgaacataatactttagcctaccttaaataggctcagaacacctatattggcctacagttgggcaaaatcatctaacacaaaacctattctgtaataatagtgaatattgaatgttgaatatcttatgtaatttattggtgttctattgaatgtgtatcacttccacactattgtaaagtcaaaatataggtctaaccattgtacatcacggactatcagtagtagtagtagtgtagcagcagcatcagtagtagtagttcyatatgatttaattacatgtgtagatttgtgtaaccaccaccacctgatccgttgtattttgatggagaagtctgagagcagccagaattgtctctgtacatatagtaatccttccatctgtattttgatgcttgtttttttattcttttcttctttgcccttgccattttccatttttcgtcagagtgtatctcagcgtcaatttgtttgctttaattttgcctggtgctcagtgaccacttttgattaacagttgtaggtctttcmttgtgacagtttcataggagccctttctcaagaacactgtccgtatactcatttcattgtcttccattgtcatcaccatctctctcatgattttggtctcctttttattctctaccttctggaagaactttttcatgtttgctttttataccactgattctatttctgtacaatcaatgtggtcttgtatggtttctagtacagatattagttttgtatttttagatttattattatttttccttatctcattcagttcccattttttttctgaatccttttggccagatgctctattttccttcttgtttttctatcttatttatcttcatagatcttatatgttcagaaatttttctaaatactaggagatgcccttgaagatttatttttgtttcctgtaataaatgttttttacaactttcggatgctgtgttcttgtctgttttggaatcttttcttaggcacctgtagattctccctcatttcctgattgagggggactagtgtatcaatttggagctttatcagccagagggagtggagtagaagctgccctgtaaggctgttgttcactgaaacaaactcagaacgtgacctcacrctcgtccctgcaagccatgtgggctaagagagatttagagtgtggttatctgcagagctgcggaagagtttgtttgtgaatggaagtggtcagcagcacagccacatcagagccatgctctatcagaatttttactgggacaggcttttggtgacttcaggcccttccaagttttgtccatcagtgcctcatagcctgtataaagtagggtgaacattgaggtgttcatggtgttccccaccatcagcacatatatctttgcttctatttgtctttctctccatcatgtaattttcatctgtaaagaatctgttattgctgaatagacaatatatagcagtatgtagcttttaagatgaagtctcttgtctgtcttgcttgcttgctttcgtgtaatcacaattccatcatcacacctaaaacgcttgatgacaatgccttagcatcacggaatctcagtttgcaaatttctctggttttcttataagccttttttttttcttttcttttcttttctttttttttttaatattgtgggtttgattggctgcacttctcttagccttctcttcccaccgtcatgttgttacagtagtttaggagcagtgctctctttccatccaaaacatatagactctgaatcatttctgcctcaatttattttaaaagacagcacgatttgtatgattacaaagtgaaaattaatattacttcaaagcccgtactaccttgacaccttattttcatagagaaccggacctctgataggaggcttgaactaataacgaagcctccggaataatagaaagacattattgttttttatcttaaaagaatttaaagaatagcttaaaacaaaaagaacttaagggcaagagaatgcatgaaaactcagtggggaagattccctttgcaagagctagcagtggttgccttgacaacatgtcacaggcacctgaagtgtttgacccgcccagtcctctttcaagtgctcacagaggtggggcactttgtctagcagatctccggctctggattacttgttctccctcagagtcagaaattaaccttttcctgaaggttttttctttagttaggaggggaaaggcagtacctttgttttagctgaaatgatttggcagcttacttatttttaggatggttggtgttgacacataaggggtagtgtagtctgtcaccttgaggccagggaccacatctcattaatagacggtacacttgcagttgacctcatgaggagctgtgcccactctgtgcttgccggtcaaaaacatatgaggtgtgtttttcatcgcttcagccaggacagtattctcgcagtcttcagccttaactaaagagggatgtctcctggggctgcccagcaaatgtagctcttcaaggaagttatttgttttgtccgcagttccagctggtagtcatgagcccagtcaggtcatccccatcaaggatgtacactctggctaatagaatagaatttcctgatgtaatgcttgttgagtgctttcaggagacaggatcttggytcrtcttggagacctcagttttggtgatggatctggctattaacacttggtgggcatggtctgtcgcccctcggagcctcagcttcttgccaagggaatgcttcttgtcataagattaggttactctttaaatgccttagaaaataagggtacaaaatctctctcttcctgactgaatcaggcctccagatcagtcttctacatcagccaggtacaacatttgatagaatgggagactacagttatacggatacgatgggcatcaggagtagtatttaaaaggtcttgaagatgagattgttattccatgaaaataacaaggattatttttacatatacttacagcagtggttctcaaactttggcaagcatcagaatcaccaagagggcttgttaaagcacagatctctggccccatcctcagtttctgaatgtgtaggtctgtgattttgtttttctattcagaaaaaggaatcttaggaatgatcatgcttccaaaccttattaggtaggaatcaaaatacaggcccatcatcaattctttctgacataaggtagaacatgaatgaataataaaaacaacttttggaaaaactaggtaatgttttgcaaatacaagacttacttttaataacttccttttactgtgaaatactagacatatatagactagagcataaaacgtgtatgtataacttaatacattatagtaatgtatagctactacctagattgagaaataaaacatctcctgcacccagaggcttggctcaacatgtgtcctcctccagtcacaactctgtctctcctctctataggtaaccactgttctgacattgatgatcattactgccttgttttccttttttttctttttttttttttgaggcggagttttgctcttcttgctcaggctggagtacaatggcacgatcttggctcactgcaacctctgcctccctcattgaagcaattctcctgcctcagcctcccaagtagctgggattacaggtgtgtaccaccacacccagctaattttgtatttttagtacagatggggtttcaccatgttggccaggctggtctcaaactcctgacctcaagtgatccacccgcctcggcctcccaaattgctgggattacaggcgtgagccaccacgcctggccactgccttgttttcaatgtacttttaccactacatatgtgtttgggttttttggttctttttctaggatttttaaattatggtaatgttcacataacaaaaatgtactatcttaacctgttttttttttttttttttttttgagatggattcttgctctatcacccaggctggagtgcagtggcgcgatcttggctcactgcaagctccacctcctaggctcacgccattctcctgcctcagccgcccgagtagctgggactacagatgcctgccaccacacccggataattttttttatatttttagtagagacagggtttcaccgtgttagccaggatggtctcaatctcctgacctcgtgatccacccgcctcagcctcccaaagtgctgggattacaggcgtgagccaccgcgcccagcctatcttaaccatttttaagtgccagttcattgctattaagtacattcatattgtggtgcaaccattatcactcttcatctccagatgaactccttacctacatacagtttttaaagttgtatcaatggaataacatagtatgtgttctttggtgtctagctttaactcaacactttttcccctctattttttattataacaatacaaattttcaaacacttagaaaggttgaaagaatagtacaataaacattcatatacctttcacctagattcaataattattgctgtattcrctttatctctttttatttatacatattatatatatatatttctccccctgaattatttgagtatgtattgcagacatcatggctcttgaccccaaagtacttcagcattcctatctgagtaagtaggaggttttctgacacagccataataccattttgaaaactaagaaaattaacagtaattccataatgttatttataatccagtttatatgggaatttcccacttgccccaagaatgtcttttatagttgtttttactctagataagtcccctgcattagttttctgctgctaccataacaaattatcacaaacttagcatcttaaaacaacatcagcrtattatctgacagtttctgtaggtcagaagtttgggtgagcttgatagggtcctctgcgagsgtcttacaaggccaaaatcaaggtgttggtagagctgtgttccttactgggtcctctggggaaaaatccacttctgagatcatttaggttgttggttgaattcacttccttggcaactgtaggacaggtccctgtttccatactggtcatcagccagggattggtctttgcttctagaggctgcttgcatttcttctcaagccttccacatggccccctccagcaatgcattccctctcatgcttcagatctctcccattccagccagaggaagatttctgcttttgcatacccatttgattacattgggccacctggataatttaggatacccttcttattttaattacatctgcaaaattccttttgccatttaactaacatattcacaggttcaagggattagggcatggacatctttgaggtggtaattcagcctaccacatccttctgcttttttttttttttttttttttgagatagggttttgctctgtcgcccaggctggagtgcagtgttgcgatctcagctaactacaactgctgcttcctgggcttaagtgattctcccacctcagcctcccaagtagctgggactacaggcacctgccaccacacccagctgatttttgtattttttttggagatggggttttgccatgttttccaggctggtcttgaactagtgaggtcaagtgatccacctgcctcaggctcccaaagtgctggacttacaggcatgagccaccatgcccagcctcttttttttttttttttttttttttttttgagacagagtcttgctctgtcgcccaggctggagtgtagtggcgcgatctcggctccctgcaagcttggcctcctgggactacaggtgcctgccaccacgccwggccaattttttttgtatttttagtagagatggggtttcactgtgttagccaggatggtttcaatctctgactttgtgatccgcccgccttggcctcccaaagttctaggattacaggcgtgagccaccgcacccggccatttttttttttttttaatttttttgagacagagtctggctctgtcgcccaggctggagtactgtggcgtgatcacggctcactgcaagctcagcctcccaggttcacgccattctcctgcctcagcctcctgagtagctgggactacaggcgcctgccaccatgccccgctaaatttttttgtatttttagtagagacggggtttcaccgtgttagccaggatggttttgatctcctgacctcgtgatctgcccgcctcggcctcccaaagtgctaggattataggcgtgagccactgcgcccggccaatctttttttttttttttttgagtcagagtctcgccctgtggcccaggctggagtgccgtggcgcgatctcagctcactgcgagcttcgcctcccgagttcacgtcattctcctgcctcagcctcccgagtagctgggactacaggcgcccgccaccacgccggactaatttttttgtatctttagtagagacggggtttcaccgtgttagccaggatggtctcgatcccctgacctcatgatccgcccatctcggcctcccaaagtgctgggattataggcttgagccactgcgcccggcccaatttttattttttaatggttgttatggactgaatgtatccctctaaaattcatatattgaatctctaatccccaatgtgatgacactaggaagtaaagcccttgggagataattaggtttagatgaggacatgaggatgggatcctcatgatgaaattagtacccttatatgaagagaccagatagccctcccgccgagtccgtatctctccctgccatgtaaggacacagcaatatgacagacaagtcaagaagtcaagacaggcaagtcaggaagagggtcctcaccaagaacccaatcagccagccccttggtcttggtttcccaaccttcagaactgtgaaaaataaatgtttgttgtttaagctacccagtctgtactattttgttatagcagcccaagctgactaagataaatcgcttgtacctctactttttgttttctatataatttaagagactaatacatttaaaaaaattattaacctaaaagctattcttgcaactttggtttgaaactccactgtttgttgtctacataatttaagagaagaatacgttataaaaaacaactattactttatgttttttgatacacagtgtataaagatgtaattatatgacatcaataactgaaaagattagggacggagctgtatagaggcagttcatgtatgttactgaagttgagctggtataaattcaaatgggaatgttataacttttgggtgttaaatataatccccatggtaaccacaaagaaaatagttatagaatatacacagaaggaaatgagaagggaatcacattttactaccaaaaaaaaaaaatcagttaaatacaaaagacagtaatgcaggaaatgaggaacaaaaaagctacaaggcatatgaaaaacaaatagcaaaatgacagaagtctctccctatcagtaattactttaaaaataaatggctcaaaatcttcagtcaaaagacagatattggaaaaatgtattaaaaagcatgatccatctatatgctgtctccaacagactcattttagatccaaagacacaaataagctgaaagtgaaaggctgaaaaaagatatttcatgcaaatagtaatgaaaagagagcaagggtggctgtagtgatcagacaaaatagactttaaatgagaaaagattacaaaagacaaagaagagcattataaataaaaggcttaatacaataaggtataactattataaatgtttatgtacctaataatagtccatcaaaataactgaatcaaaaatggacagaattgaagagagaaatagacagttccacagtaatagttggagacttttgtaccccactctcaatggatagaacaaccagacagaaaataagtaaggaaataggggacttgaaaaatgtaataaacaaactaggtctaacagacacacagaacactctacatgacaacagagtacacatttttggcaagtgcacatgggacattctccaggataaaccatatattaggccacaaattaagtctaaatagattttaaaagatatataaagcatcttctcagaccacaatggtatgaagttagaaatcagtaacaggaggaaaattggaaaatttgcatatttgtgtaattaaacaacacgctcttaaacaacaaatggattaaaaaatcacaagggaaattaaaaaatacctagagatgaatgaaaatgaaaacaacatacagtcttatggaatatagcaaaaaagagcaaagtgggaaatttatagctataaatgtttacattaaaaaacaaagatgtcaaataaacaactttaccacttatggaactacaaagagaagaacaaagtaaatgcaaagccagcagaagaaggaaataaatattagagtaaagataagcaaaatagacaacagagaatagagaaaattaatgaaactgaaagttgattctttgaaaaaatcaacaaaatcgacagatttaggattgctgtgtcttcctggtgatttacccttatataattgtgtaatgtctgtcactagtaattttctttggtctgaagtctattttatgatattttactatgaagcgtatatgaaatatattttactttgaagtgtacattaagtgtactttataatatgttaatatagccacttcttttaacttacttcatcttacattaatatagccactttttcttttgattaatttttgcatagtatgtcttttgtcatctttttactttcaacccacttattatatttgaagtgggttttttgtaaattgaaaacagttgggtcatttttaaaatacattcttccaatctcttttaattggcatgtgtagaccatttacatgtaatataattattgatctattaagacttaagtctagcatttatttgttttctggtatctcctgtttttgtttctgttttctttttctacatttctatgagtaaattgaaccttttttagaattccattttgatttatctatagtgtgttttagtatcccattgggtagcttttttattagttgcttaggtgttatgttataatgtagcacaatctactggtatggtcattttaccagtttaaataaagtgtagaggccttacttccctttgcatgcctttacttactctttcccatttgtaacaattgttttaaatgtttcctctatatrcattgaaatccacatagacaatgataatttttgcttcaaccatcaaatacaattcagaaaactcaagagaaagaaagtctatcgtatttacccctatttttgcatctctcattgctctttttttattaatgttctaagattccttcttttattatttttcttctgcatagagaactttctttagccattcctttagagtagacctgcttaatgacaaattccctttgtttttctttatctaagaatgcttgatttccccttcrtttctgaaggatattttcaagagatatggaattttgggttaacagttcttttcttttagtacttgaaaaatgtgccacttctttcaggcctctgtggtttctgataaatctgctgtctttgaattttcttcctgtaggtaatgcattatttctctctggctgctttcaatatttttttctttaattttcagaagtttgattatgatgtgttttggagtagatttctttgggtttatcttgtttggtgttcacttagcttcttgcatctgtatgtttctgttgttgccaaatttgagagaatttcagcaattaatttttggaatagtttttcaactctattctttttacccttgccttaggagactctgatgacatgcatgtcagatcttttgttatagttccacatgtccctaagctctattcattttttttccagtctgttttctctctgttgttcattcagattaggcacattcagttgtttggtcttcaagttcactgattcctttgtcccttccattctgctggtgagcccatctactgagcttttatttgtgttactttatttatcagttctgaaatgttcatttggtggttctttataactttctttgctgggactttctattttctcatttgattcaggtgtgttcataattgcttgttgaagcatttttatgctgtctgcataaaatccttgtcagatagttttgacatttgggtcatcatggtgttggtgtatgttgataatcttttcgcattcagtttgaaatcttcctggttttaggtatggctaatgattttctattgaaaccgagatatttggggattcttttaagactgaattttacttaaaccttatattttagcaggcctcctctgatattgctatggcaggtgaaaggggccactatctctttacttccaggtggatatggagtccgggatctccacatgttcatcacttatacctgaggggagagagggtctccttgttactgctggaaggatggaagtacaagctccccgctagccttccaccagtatcaccctgactgtgagtggaaaagccaccttgttactgttcctgtgggtacagctgcccaagctataattgttctatttttctagaagaaaaataacattaattttrtctgcagcatcctttgaaaatgttaggatcaacaggacagaatcatctgaaagatgcttttgtgatgtcagttctctaggtttcctgaataatataagggctgtttgttagatacaggcatgtatccccacagggactccgctgacaccatggagagcactgagcagtgtggaattcctgcctctccattcgacctcctctgacactrttttatcaaggagagggaggtgtacctcattcctgctagttgggggtaggagtccagacttgtcctgtgggctgcactgataccaccaagagggggatggattgttcactaacgcccaatagggctagaagtcccagctttctcctcagcttcctgtgacaccaccctggtaaggaggtttcaatgccttattattgcccctcaagggtataagtctaggctcttcgctaagcctttgctggtgggactgcagttttttctgtggtattggctgaagtagaatggttattgtctaaaagttttctatcttggctaggttaacctttcctggtactttatctagatagaggagttcagtctttcttttcttctttttttattttttccttctcttccctccctcccttccttcctaccttttctgttttcctttctttctctcctctctcttctttctttttcttttctctgtactcattggcatttctgggttaccagttttgttagctgcaattctggggcttaccgggcmtttaaaaagtcaacaggacttaccattgtcattccttaggtactcatgtccctaacctgacttctcttcttcactgtttagagtcttatgtttcattcatatatatattccagagtttttagttgtatttagagagaatcaggaaaagtatatttactccaccttcccagaagtagaagatcagcatgtgtggtttcaaaaatccctcacctctggtgagattctgatctgtgctttcctaacccttctcttaaaaatcactggactctcaaaatgattttctrtgatttttccaagtttagagttttatttcttgtccgtgtcacgtatgaaatatttcaggtcatggcatgtttctactactcattgtttatagaatttgcaggcagcaaaacggctcattttgggcactgctgtcactgtttgcatccgtggaattgatgattgatatttcctcttcctctggatccatgcctgtgtctaacaaatagtccttatattattcaggaaacctagagaactggcatcacaaaaacatcttccagatgatkctgtcctgttgatcctgaaattttaaaggatgttgtagattaaattaatgttctttctttcaaaaaaaaaaaaacaaaaacagggaacatttgtagtttgggcagctgaaatactggcatctgcccaactagactaataacaaattgcaactcaaaccaattaatctcatctgtagtttaatggagggttttctcttcccaactgtctagttagaaaagccgtttgtggccgggcgcggtggctcacgcctgtaatcccagcactttgggaggccgaggcgggtggatcatgaggtcaggagatcgagaccatcctggctaacaaggtgaaaccccgtctctactaaaaatacaaaaaattagcygggcgcggtggcgggcgcctgtagtcccagctactcgggaggctgaggcaagagaatggcgtgaacccgggaagcggagcttgcagtgagccgagattgcgccactgcagtccgcagtccggcctgggcgacagagcgagactcgtctcaaaaaaaaaaaaaaaaaagaaaagccgtttgtattgttagaatgccttgatgaaattcttgcaagctggcaaagagcaatttccaagaaattaagagaattgttgcttcttgtctgattatggattatttatagaatcttgtgtagtttgtaacagggaacagttttcaggttaccataaaaatgatagtgctcaaaaaatattggccaagaaaatagaaaacaaaggggagcttattgatcaagctgttttcggttaaaaaagacagtgtgagatgtctttaaaactgcaaagaccatgatttccttgccatcaatactcactctctaagttggcttcaagagcacttaattagaacatgaacatgaacctgtcaaatgatttaagaatttagcttttagccctagatttgaaaaacaagacctttaagaataaaatgcacgccctgtaaaaagtgtctagcatttgtcatttccaattttcattaaatgctcattttcagcctaaagttagtcctaagataaaggaacatattgcataaaaatgagttcttagacaaatgttaggctcaagattaattaattaccctgatattaacacctgttccctcaattctgcaaaaaagagaacaggaaagataaaggaggttagagacagaaccttggcaaagatggaatttgacagatggttgaagaaaaaggaattaggagaagaggctgagaggaagcagtcagtgaggctgaggaagcctgggcagtgggagtcatgaggaatcacagttcaggaaggaggaagacgtggctatgtggtctaggagagagctgctggctgggmctatagatgacaagaaatcatttgtagtggtacaagtactgggtcacttatgcttggattctaattttgcctcctagtggctgtgtgaccttaaacaagttactttgcatcttaattctctgatcagtaaaatggtgacttactcattcaacatttattaagcatcctttgtaccagggactgtcctaagtacttggaatacatcggtggggagaaaaagacaaaaccctttctttcatagggagaccttaccatttacagtttcaggaggggatgaagacagacaataaacataataaataagaaaataatgtagtgtattaggaggcaataagtggtatggaaagaaaaaaaggtagagtaggttaaggggagagcaggagggccaggggtaaattgcaattttaaattcagaggtcaagcccacatttggtaataactacctcctgggattgtgatgagaaggacatgagaggcccctaaactgccaatgctggaccaagtactttgtcagcccctggtaagcattagctgttactgttgttattactgttgtcattcctaaaagaatattcacygtgcagttcctttatctaggagtactccagttcactcatgttgcttgattaccggcacctccttagagcatacatgtttaagccagtccagtcatagctgggctgcacttcccatggtgccatgtcactgcttgaygcccctgtaaatccagagacctggttactggttttgcttctgccacccaggagctgggcagctttgggtgagtttcctcatgtataaagyagtgctcaccatccctgcctctcagaccactgcgggaatggtctgagaggcaggcatggtgagtgcttctttatatgtgagaatgtataaagatgagaggatgggctgggtgtggtggctcatgcctgtaatcccagcactttgggaggctgaggcaggcagatcacctgaggtcaggagtttgagaccagcctggccarcatggagaaaccccatctctactaaaaataccaaaaaaaaaaaaaaaaaaattttagccaggcatggtggtgggctcctgtaatcccagctactctggaggctgagacaggagaatcgcttgaacctgggaggcggaggttgcagtgagctgagatcgcgccactgcactccagcctgggtgacagagtgagacactgtctcaaaaaaacaaaacaaaacaaagaaaaaacgatgagaggatggaggaaagagcaatttgggaagcctagagctggatcccaatgtgtcctatcatttgtaaattgctgggggatttgttagatacaagaagggctaattcagactcaaagtcagggctgtactgagtgtctgatcttcactctctgtccctctcctgcataaggaccatttagtagcatctaagtgagaaactagccctgttccctacttcctcctcccttgaagccctgttgggggttgtgggaggggaaggccattctcattaggttttctgcagcttccttttcaagaatcatttctcttccagcaagagaaatgagctgtcagaaactctggctttttttttttttttttttttttttttttgagacagtgtctcactccatcgcccaggctggggtgcagtggcatgatctcggctcaccgcaacctccgcctcctggattcaagcaattccctgcctcagcctcccgagtagctgggattacaggcacccaccaccatgcctggctaatttttgtatttttagtagatacagggtttcaccatgttggccaggctgttcttgaactccttacctcgtgatccgcccaccttggcctcccaaagtgctgggattacaggtgtgagccagcgcgcccagccaactctggcatttttaaacagctggccattgagcacaggtagctgcctaatgaagtttatatatctgttgccacgaaggtgggtttaaagttgttatttctaactgttttttttttttttatgtttgttttgtgaaaacggaggattgaatgtaaggactaaagagaatctgtgttggggtggggctgaggcatgcagggaggatttgaatcaagagcaggcttatgagagatccctcttagcatagtggtcggagtacccttatagaaatttcatgcgaaccaaatcatgttcttagctcctactgaagtctgtttcattaagttctgtaaagacataaaggcaggacaggaccctgtctttcacacagtatttgggagagagatatattcgggaggaacttctttgcagtggttttcaacactggccccacattaaattcctagaggtggggcctaggcattagtaacttttaaagttcaattccaaggtgtaaccaagtttgagaaccagtgcttagtgtagaggacttagcggagagtggccgtcagtgtcttggttctggcagattttctcatgagcctgtctctccctcttccaacgccgcaggtgtacagagctgtggactggaagcttgaaccatcatcagtgagaatcatctgatgtagcctggattgttattttctcttttaagctgcacaataggaatgccaaggctagtttctctgcctttgagctgtattatgcttttagaatccctccactttagaattaaagkacctgggaaggcataaaagacaaagccatcactaaacatgtttccttttgatctgttgcaaatgacaaaagtgcacattacaaaagatcaaaaagcatgtgaacaactctcctctgtttccaagactcattgttttgaaggcaggaggctcacaatgagacttggggaggtgaagtgatgctttgttgctagaaactgtgatgtgcagtggccgctcacctttctgacatgcttacagggccgccggatgattgacttgataaacatgttgcctcgggttttttgttttgttttgtttkattaaattcctggtagctaacctaaatatcctgaggttgtgatgccaccaaaatacatgacagctttgaatgagctgttctgaaatctagggccatcactgtcaaagtggaccgagaaaccaagactaaatcctgcccaagcagcagtgtgggggtggaggcaacctagcaggccctcccagccagagctgactgggagcagcctagtgtggatttctccatctggtcatgtgttttggtctttccctcataaacaccatctctttttagtcgaaaagccaatatttgttaaggagcagaacactattttttaccccagttctttctctcccttgtgccttaccccagtaggctgatgggtdcatcagcccacctctgagtggtacggtaatgaagccagcctcactcacccctgccatcacacactcttttttttttttttttttgagacrgagtcttgctctgtcgcccaggctggagttcagtggcacagtctcggctcactgcaacctccacctccaggttcaagcaattctcctgcctcagccatccaagtagctgggattacaggcatatgccaccacgcctggctactttttgtatttttagtagagacatggtttcaccatgttgggcaggctggtctctaacttctgacctcaggtgatctgactgccttggcctcccaaagtgctgggattataggcatgagccattgcacccggcccatcacacactgagtaaagccaaggggtgtacttgttgatttttcctgcaagcccagccgtatgctttgcacacaattgccttttaacctcacagcaaccctctaagatgtgtttcattgcttctgttttctagtagggaaatgtggtgtggccacaaactagtgaggatgcgaggacttgaacccaagtcagatggctccagggtctttcctgagaccatactctcccaggctctttcctggagcaaggagtgtgagcctaaggaggcttcagtggggcacatggaaggtggctgagtgctgtgattcttccttcacagaccaagtattattttataccaggaacagtaaggtaggcctccgtgcctcagccttcttagactttatcactgatgaatcgctgtgtctcaggagctgctggccagactggcttaattgttaatttgtgcagagtcattgaggtatgggtggcaggtcgcaaaagatgatgttttgagcctcacttgtgttctaagagagctcagattgtgtgttgggctctgtggttgcctgtgaatgtgcaaaatatttttaatgctaaaaaccaggtattacagaatgtagaaatgcagcttggaggaacaattctagttggaatcccagattcrtaaatttggtctcttggcagctagattgcactttctagagctcaggaagatataaaagttgacacttttatgtagatttatgtggagtgtggctgaattgccaatgcttttgtagctataactttgaattgcctgacttttgtattgaaaacaatggtgcattaacgtaggcgttggcttatttgaaaagcaggccaaaggaaaagactttttatttgacttctgtggtggtctccctaaggagtcttacccacaagctatcccacagcttgtgggcagatgtgagcaacaggaagccccaccccacagacacagggttcccccttggagttgcaggcagggttcagtctggaatttgggtgctgtggggcagattctcatagatgatctttaaacgtttagttgttcaacaactattttatgggaagggatgractcatgttgtatcaagaaaaactgtatgcaacttcaaaataggaaatttactacacaaatttattatgtagattttccaagtcagacaactacttggaggcacattaaatgatttaaaatttaggtagtaaaatcaaccacttattaccagtgaatagcattatgcacacataatagagtttcagaattttatctgcctgcaaccccagacttgacatgtctctcccctggttggtctccgagttggtagaaggcttggtggtcgcatcatgcagcattcctgtgtgcgctgcaagtcatgcttaacagagatagggctacccccgatggagaagggcaactcacttaaccgcctccatctttccacttttgctcattgatgtttaacatgttatcagtatgtatagaatggcccccagagagttgtttgattgatgcttctttaatcagcctgtgattatagactcaaactgaagaaatctgaactcacagatcggggtttctccaccttggcgctattgattgacatttgggactgggtgattattttgttctggggactgtcttgttcactataggtttttaaagcagcatccctggcctctatccactagatgccagtagcacacatacagcatacacaccccagttgtgacaaacaaaaatgtctccagtatttgccagatggtctctggggaacaaaattttcccggttgagcactcttcctttagagaagggaagaaaggactattaacatcacctctgtgggtactgaaacccctagaagacccttgtctacagaactgggttttgaataggcacttcccagtgaaaatatgaaaatagactcttgatttctagccaggtgactaaaataaaagcttttcagcagtttaatttcagaaagatggctttgattattttgattgagataaagcattagaagactcaaaatagctgtttttgttttgctttgttttaatgagaaaatcagggaaggttccagagggctctatgactttcaggagatgtatttctaagtggtgtctgttcccaactgtgtttatgatccttgtgagactgaactcctggtgagccttgcgagtgtctgttctggcatttcttcatggagtggacattactgaaggtcggtcggtggctgggccctgtgtgcagcagatgggaataaaagggacaggagcacagtgtcttcctcagggcactcccagcctcctctgggcaggtgagtcacgcatttcagtacgacggaacttatgagtgctgtgaatatgcctggaaatgaacccgccagtgattggaataatggtccggaagcagtggttttcaagctgtactcttttagcagttgaggttgctttttcttcaaatgacatgtgcagaaatgtaatataaataaaatagatcagatccaaatttgaagccagggtgaaagcaggggcctgtaattccccacccctccctttgcctcagagctgacacttccaaagagaatgccctttcgttacaggtttgactgaaagtaggctaacgcttggttggatgaagatcattgtttttcctgactagatctatcctcttttttttttttttttctgagacagagtcttgctctgttgtccaggctggagtgcactggcgtgatctcagctcactgcaagctccgcctcctgggttcacgcccttctcctgcctcagcctcccaagtagctgggactacaggtgcccaccaccattcctggctaatttttttttttttttttgtatttttagtagagacagggtttcaccgtgttagcgagnnnnnnnnnnnnnnnnnnnngcatgatggttcatccctgtaatcccagtactttgtgaggctgaagtgggaggattgctaggagataggagttcaagaccagcctgggcactagcaagcaagaccctgtctctaccaaggaaaataaataaataaaagaagacaaagaaaaacactatctccaaatacagtcacattctgaggtactggggtttaagactttaacacatgaaatcttacattgtgggaggccgaggcgtgtggatcacgaggtcaggagatcaaggccatgctggctaacacggtgaaaccctgtctctactaaaaatacaaaaaattagccgggcgtggtgctgtgcgcctgtagtcccagctgctggggaggctgaggcaggagaatggcgtgaacccgggaggcggagcttgcagtgagccgagatcccgccactgcactccagcctgggcgacagagcgagactccgtctcaaaaaaaaaaaaaaaaaaaaaacaatgctgtttcattgctgtgtaatttttactctcactctaggaagcagattcatcggcttagagaaaaaaacacatatttgtatattttatatatgtgtgtatatataaaatatgttgtatatatgttacatatataatatatattatgtgttatatatttactaaaagaattttgatattatgaacaactcaatagaaaaattgagaaaagaaaatattgaacctctatcccttagatttaacaattctcattattttctcaaaattatttcacacacttttctaaacctctagtgggtaaagattttttaaaaataaaaagatatatccacaatgaccaagtctaggaatatttttaccatactacctccaccccttacccacatcccctatcccagttcatcttggggacaacagtgtaataatttgaattttgtggtgaaacctacatgaaggaatcaaatttgattcaatgtcagtagttcatatctctatctagtttattcttccttcaacaacaattttgggtgcctcaatgtgccaggacctgagcatactacaatgagcaaaatgaaatagaccaaacatagctcctgccctgggttttgttaacagtggaagtttttaaatttcttgtctagaaaactgaggaaaacaagttctgtgccatgctagctggaggggtagctgtggaggaaaagatgatggatgaggatgaatttggaggttttggggagcaagcccattggcagagtgctggttaggttcttgagttggtgaagatctttgtgcacgacacccctgtagacatctgtgaagctggaagccagagcaggctgcgtcgtatgcatggctcagaaattatggctcttgtgttgtggaagctggcctaggtggacagctacaatgtgggcaaagccctttgactggctggtggttcactagttgccttgaagtgggaaggtagagccaatagtcagagttgtgttattttccytttaaaagaattgttttctaatagttattactctgctgtttttataaaacagcacaaaaaaggactcaggagtcttacataagaaaaatagcccactgggggcacagatgtttacctgacaccttgcttagttcctaccacatacccaaagtccgggtttgaagctgtctcatttattcatcttaaggaagactgaattgtttgcacttttggtaaaagtacgctttctatcaaaagtttattacaaggcgtggtggcacacacctgtagtcccagctactggggaggctgaggagggagggtcatttgagcccaggagttcgagactacagtgaggcacaatcacaccactgcacttcaaccttggtgacagaacaagacttctgtctcttaaaaataaaaaagtctgttacaaacggagtcatttgaaacattccctcccatcattcatttctgcgttagtttttgaagttaaagagcactagaaaagaaacgtgacagtatagaggttttatgcttatttgactttatcaactgtaaattctgtttttaagaattctataacaaatgtgtttttaggacagaaagtaaatttggggaacctttgatttaggcttggaaatataaaccaagtggtttcttactaagtttaatgtttttaattgttcttcctaagtaaacaacagcctgattcacataatggaataaatggaatatacgagtctaaaggagccactagaccccagttttatgtggaaacacaagatgtattttcaaatgaggatcatactgaggcaggcaaatattcctcatgaattttgtgattgctttcaaaatgagctacatttgtgaataagcatcaggcccccagtgtatgtttgtgctgacaaaaatgttaatacccaattttgtacaatgtaattcacttgttagtgccatagatgagtgggcaggaggtgtgcaaaagacttgaagttgagtttctcattgaacatgctctcagaaaggtgtaggtggcatttcaataacatctctttccagaataaattgtgactctccttactttacaaactggtgaaaatattttgagctggtaaatatttttgtgatttcattacttttcaaaattcagttgcaagactgagcatgcatggctggggggatgtttataatggcctgtacattatttttcttctttgttggcaggaaataactacgtgtttgccagattactacaagtggactcagtatctctttattaaactgtatgaggctgggctggcctatcaaaaggaggtaagttaaaattagctggacttttaaaattcagtgaatctctttaggatacatcattgtagtagcagcgaaaatgaacgctacctcaagttcataaaatcagtcacagcagacccagaacgtaactacttcctacttaagtttagtgtcatcaagacagggtctgggcttcttttacccttgaattcttaccccataacctattgtctggttcctgtaatgagatcaaggagagggcataagaagaaagaacacaggcttctcaaatcctagctcagctccctctcccagctatgtgaacagctgggtaacttaacctctaggaaacatggttttgtatctgctaaatgggaatggggacattttccttgtggggtactatggtttggatgtcccctccaaaactcatgttgaaatttaattgccattgtgatggatttaagaagagggacctttaagaagtgagtgggtcacgacagccctgtcctaataaatggattaatgttattattgtgggaatgagctcccaataaaaggatgagttcagccaaattctckgtgtgtgtgtgtcatacggtcacttgctgttctacttactgccatgggataatgcagcacagaggcccttgcagatgttggcaccatgctcttggacttcctgacctccagaatcagccaaataaacttctatcaataaattacccagtctgtggtattctattacagtagcagaaaatggaggaagacacagggttcttggaaagattaaaggtaatagttaaagaacagctatcacagtggtctcccgagaaatgaaagtgtttgttatggtgggagctcaataatgataggtaagacttggaatggtgggagatgaggcaagagcatcatagtgtggcctagaactgtccaggatgatagccactagccacatgtggttgcttaaatttaaagtaattaaaattaaatagtatttwaaaagtcagagctgggacagtggctcacacctgtaatctcagcactttgggagattgatgcaggaggattgcttgatgccaggagttcaagactagcctgggaaacacagtgagaccctgtctctacaaaaagtaggaaaaaattagtcccagttactcaagacggtgaggtaagaggatcccttgagcccatcaacctactggggtaaggcaaaaggaagaggaaagaactgaggtaaaaaatagtgttctattccttaacaaatattggctttttgactaaaacgagatagtgtttatgaggaaaagaccaaaacacatgaccagatggagaaaaccacactaggctgctcccagtcagctctggctggtagggcctgctaggttgcctccacccccacactgctgtttggtcaggatttagtcttggtttttttccaggtggatctctgtcttagttggtttgtactgctacagtagtgccaagaccagctcggtcggggagaccctaacccagtagcgctagaggaattaaacacacacacacacacagaaatatagaggtgtgaagtgggaaatcaggggtctcacagccttcagagctgagagccccgaacagagatttacccacatatttattaacagmaaggsagtcattagcattgcttctatagatattaaattaactaaaagtatcccttatgggaaaggaagggatgggccaaattaaaggaataggttgggctagttaactgcagcaggagcatgttcttaaggcacagattgctcatgctattgtttgtggcttaagaatgcctttaagtggttttcccccctgggcaggccaggtgttccttgccctcattctgataaacccacaatcttccagcgtgggctttatggccatcatgaacatgtcacagtgttgcagagattttgtttatggccagtttgggggccagtttatggccagattttgggggcttgttcccaacacaatagaatacttgagactggtattttaacagttttatgcagcagaaatgtatttcctcatagttctgaaggctgggaagtccaatatcaaggtgccggcctctggcaagggccttcttgctgcatcatcctacggtagaaggtgagagggcaagagagagggagagtgtgagggagggagcaaggggaagcttaactcactatttttttttttttttttttttttgagacagagtcttgctcttgttgcccaggttggagcgcaatggtgtgatctcagctcactgcaacctccgcctcccgggttcaagcaattctcctacctcagcctcctgagtagctgggattacaggcatgcgccaccacgcccagctaatttttgtatttttagtagagacaagtttcaccatgttggtcagactggtcttgaactcccaaactcaggtgatctgcccgcctcagcctcccaaagtgctgagattataggcatgagccaccataacacagctgaactcacttttataacaagcccactcttgataactaacccacacccatgatagcaacatcaatttattcatgagagcagagccctcatgacctaatcacctctgaaatgtcccacctcttaacattgttgcattagggattaagtttccaacacatgaactttgggggacacattcagaccatagcaatctctttttattggatagctattttcaaattggccttaaaacagaaaacattgctattagcattctatttctgtggtttatttcaaaatacaaatttttggaataaactttataaagttaactgactttagaaatatactttgtaaagcatatttaaccaaaataactcaggtaaatgaacatttaggaatagtatttgagcagagcattactaaacgtagctggagtgtttaagtcttttgttcttaacaagcactgtccaccaaatgttcagttctgttgcaaaaagaatctgctgttgctttcacaaaacaaaagtattttcagctgcaaatatgaacataaagacctctacttggcagaacattaatttcaccttttgaaaaacattttcttaaaactcttttttaaaaagttttattccatggatgtagttttagagggttttgttgttgtgggggtttttaaattaatatatcatagttgtacatactttacatgtgatatttgatacatgtatacagtgtgtcatgatcaaatcagggtaattgggatatccatcacctcaaacatttatctttctttgtgttggaaataattacatttcttctagctattttgaaacatacaataaattattgttaactataatttccctactgtattatcaaatgctagaacgtattccttttatgtaactgtgtttttgtacccatgaaccattgtctttttatcccccgctctctccccttcctttcccagccccagcagccaccattctacactctacatccatgagatccacttttttaagctctcacatatgagtgagaacatttggtattggtaatttctatgcctggcttatgtcacatggtaacctccagttccattcattttattgttttttatggctgaataatattccatagtgtgtatataccacattttttaaatccattaatccactgatggwcacttgggttgattgatatcttggctattgtgaatagtgccacaataagcatagaagtgcagatatctcttcggtaatcctgatttcaattcctttggatatatacccagcagtgggattgctgaatcatgtggtagttttatttttaattttacaaggaaccaccttactgtttttcatacagtgtatgagggttcccctttctccatattctcaccagcatctgttactccatcttttaatagaagccattttaactgagtgaaattatgtttcgttgtggttttgatttgcacttccctgatgattaatgatgttaaacattttttttcatataccttttagccatttgtatgtcttcttttgagaaatgtctatataggtgttttgcctgttttctaattggagtatttggatttttgtttgttttttgctattgagttgtttggattccttatatattctggttattaatcccttgtcagatgaataatttgcgaatattttttccccttctgtaggctatctctttactctgttcattgtttcctttgctgtgcagaagyttttttgcttgatgtaatcccatttgtctgtttttgcttttattgcttgtgcttttatggtcttacccaaaaaaaaaatttgtccaagccaatgtcctgtagcatttccctaatgttttattctactagtttcatagttttcggtcttacatttaagtctttaatctattttgagttttttttttatatggtgaaaaatggggatttagtttcattcctctgtatatggatatccagttttcccagcaacatttattaaagagactgtcttttccccaatgtatgtttttagaaactttgtcaaaaatgagttgactgtaagtgcatggatttatatctgggttctctgtttcatttcattggtctgtttgtctccttttatggcagtaccatgctttttgggttacaatagttttttagtataatttgaaatcaggtagtgtgatgctttcagctttgttctgtttttgctcaggattgctttggctattcagggtcttttgtggttccatacagattttaggggtttttttctatttctgtaaataatgtcattgatattctgatagggattgctttgaatctgtagatcactttgtgtagtatgtgcattttaacaatattcttccaatccacgaacatagtatatttttgcattttttgtttgtccttttcaattactatcatcaatgttttatagttttccttagagatctttaaccttgcttaaatttactcctaggtattttatttgtaactcttataaatgggattacttgatttctttttcagattgatcattgttaacatatagaaatgctgctgatttctgtgtgttgattttgtatcctgcaactttactaaattcatttatcaagtctaagttttttggttggaacctttaggtttttctaaatataaaatcatgttgtctgcaaacaagaataatttgacttcttcctttccattttagttgccagttatttctttctcttgcctaattgccctggttaggacttccagtactatgttgaataaaagtggtgaaagtggtaatccttgtcttgttccagatcttagtggaaaggctttcaattttttcccattcagtgtggtattagctataggcttgtcatatatggcctttatcatgttgaggtgtgttcctactataccygatttgttgaggtattttttttttttatcatgaaggatgttgaattttattgaatgcttttttagcatctatggaaatyatgtgttttggtccttgattttgtcgtatgacatgatatttattgatttctatatgttgaaccatccttgcatccctgggatgaatccctgttgatcatggtgaatgatctttttaatgtgttgttgaattctgtttactactattttgttgaggatttttgcatctctgtttattagggatattggcctatagttttcttttttgttatgtctttgtctggtttggatatcagggtaatgctggctttatagaatgaatttggaagaattccctctttctagaagagtttgagaagaatgggtattagttttctttaaatggtagaattcagcagtgaatccatcaggtcctgatcttttctttgatggaggactttatattactgctttgaactcatgacttgttctattcaggttttcaattacttcatggttcgatcttgctaggttgtgtgtgtgtccaggaattcatccatttcttctaggttttcccatttgttgatgtatagttgttcataatagtctctaatgatcctttgtatttctgtggtaaaagttttaatgtttctttttctgtctgtgattttatttatttggctcttttcttcttagtctaggtaaaagtttgttgattttgtgtgaattttcaaaaaccaagttttttattttattggcctttttctttcttttctttctttttagtctcaatttcatttatttctactctgatctttattatttcgttccttctactaattttgggtttggtttgttcttgcttttctagttccttgtgcattttttatctggagttgcttatctggagtcctgttgatctctcttcaaagttctttttcctgtatggtacttgttgattatcagtcttgtgctggtatttagccttggatggtggatatagttattaatggtttattatgcttggacattctagggaatgagggcgagtcccctaatttatgagtctgtctttagctgtctacatgaatttagtagcagctggtgatggtgctaatttacccacttggtaaagctaagtttgcagcatggccttggcttcaggaagcatactcaaagaattgctacacactggcacctcttccactgtacctccttgtggctttggaatgttgtgacagtaacaaacggtagccttgtgggctacccctggactcagtccaaattcaggcccattcttgatggaatggagcaagattgattttgagagctagatactttataagacctatgtgatgttgcttagttaagcatgctttgtcaagaaagaagctaatagaccttgaaaaaaatcagtaccctaaaatatatattttactagccttctggaacctgaagctgacagtatattcagaaaaggtctttgatagtttaaaaaaraaagaaagaaaagaaaagcagagcttgaggggagagaggcggggaaaacaatggagagtagccaagggccagaggagtgatatgctggccaagagacaaaagcatgctgatggtgggtgtgatctagaagggacaggcaccctgtgtgaagggcgaggcagggaggcaaggcaaggaggatctgagggaagaggaggaatggtaatgatgagatgagaggcgtgagggtttggaacagtagggctggctggggcagcaagcaccacagctgctgtgtcacagataggaaagctgataaacacaaaattaggagaatactgcccacatgatccccaagggagcccaaagtcacctacacctccaagagcctaatggcaaagaagagtagagaggagacaaaaatgcctgctcccactgatcactgtgcagatttgaccctttatgaacatggctcctttgtgtttgttgtgttatgaggtgcatttttaaaatgcttcctaaatgcttcccacagatcactcaagcaaaaaaatattagtcctaatgtttaaccctttaataagtggggaaactaccttctttggaatgtccaattccgtgatattcccagataactattgtgagggaagcagtgggtaaaatcgacccagagctcagtgtgtttgcaggtgttttaatgatttcagtgttaatttaaggttcatttcaatacaggcttgactttattttacaaataaggctagttaactacaaaggaacatggaattggcttcagtaggtgrtagacagcataaatgccaaccagggaaatgaatagagtcagtgaagttgcccagaaattatatcctattcataagactgtgcttgcttaaaaatcagcatgttcatccaagtaaatgttcaaaatatggaaatccaggattgctggatgagggaagctattgatagagacagttgtgtaagagaggagacctgagcaaagggatttaggaagcaactccagggcttcaaggggttgcaggtgctgtgctccctgagcctcagggccctggattttgacgactccaaatttaaccacttttggaaagtctgagcctgaatctgcaactctgtggctgaggtggattggagttctggaaagaaatcatgtggattctcacagatgatgcatcttttgagacactatttcttttggtgttttcccccttccccccaagtctttcattagggggataaattgcctttgtgttttgctttttttttttttttgtctttcattcaatgcttgggttttattatgatgtgcaaacctcttaggagcacaccttcctcattgtattttgtaatctagagcctgagagatgccaggccatgtgggaaatgtagataagaaaatacagtcctatttgttcttgcaatctgcagtaccaagtattcacttcttccaaatcctctgaggtttgccggggacaagagacagaggtggagggatatacggtgctctttttctacctttcttttatgtttcatacagttttagttgtgcatgggttgtctggagtggggagatgcctcttgaatgaactgtctacattactaagcagtacttggtcctttctttctacctgttattttaagtggaacccttccagaacctgtgtacactgtgggtagaaatgtaaattgctatagccattatggaaaacagtatggaggttcctcagaaaatgaaaaatggaactaccatatgatccagcaatcccacttctgggagtatatccaaaggaactgaaatcagtgtgttggagggatatctgtacacccatgttaactgcagtactattcacagtagccaagatatggaatcaacctaagtgtccatcaacagacgaatgaataaagaaaatgtggagtatatacacaatggaatagtattcagcttcaaaaaacaataaaattctgtcatttgggaatgacagggatgaatctagaagacagtgtgctaaatgaaataatccaggcacagaaaggcaaaaatcatgtgatctcacttacatgtggaatcctaaaaaacattgaattcatagaagtagagagtagaatgatggttaccagaggctggaggggtaggggtggagcaagggaatgggaagttactgtcaggagtacaaagtttcagctagactgcaggaatacattttgagatctactgcacaggagggtgactctagtcagtcataatgttttgtatatttcgagataactgaaagagtaaatttatcaccacaaaaaatgttaagtaagtgagrtgatgggtattttaattgcttaattattctacattgtgtacatatatcaaaatatcacactgtattctataaatacagttatgatttgtcaattaataattgttttaaaagaaataattaagactgggtgtggtgactcacgcctgtaatcccagcactttgggaggctgaagcaggcagatcacctgaggtcaggagttcgagaccagcctggccaacacggtgaaaccctgtctctactaaaaatacaaaaattagctgggcgtggtggtgggygcctagagtccccgctactcgggaggctgaggcaggagaatcacttgaacccaggaggcagaggttgcagtgagctgagattgtgccactgcacccctgcctgggtgacagagtgagaccctgtctcaaaaaaaagaagaaataattaagtggtacccttctctccaaccccctaatacaggcagggataatagataaggaaatggacctttggttcattaaagtttttagatctaaggtacttttgtcccatattttgtctctatgtgcttattaagtcaaggcttttgggaaccctatcttagaagggaaacaaatgcatgtctttcccacccaactctagacttcacatacttaaattttccaatgggggtactgcttctatatgtaaaatygcagcccacaaattacaacccacagataggttagcctcccctcacccctactttttatgtaacttttagacatgtctctggatcagtcagggtcccagcaggaaagagagagcacacccgaaaggagtcattgaagacaatttgatgaaggactatttgtgtggagttcagggaaactcagaagggacggcaatgcgtttgaccctggcagcagaaggatgcctttgctgcctgtaggctgcaggggcaacgtcagggggcagttaatagaacctgggagagcagtagctttagcagcacgggagacctgcccaacagaggtgatgaccttcactagaggcacatgacccctgctagcccatggccaggaagcagccagtgtgyctgtcattggttgaacccaaccggaagataagggtccaagggaatgcaggtcgcagaggtcaacttcttgggccacagatcagggcaggaagagggtctggaggggcaaatgggtaatagtgaacacaatctcttattagaattgcttattaaaaattttacggctaggcctggtggctcacgcctgtaatcccaatactttgggaggccaaggcgggtggatcacctgaggtcaagagttcgagaccagcctgaccaatatagtgaaatctcatctctactaaaaatacaaaattagctgggcctggtggcacatgcctgtaatcccagctacccaggaggctgaggcaggagaatcgcttgaacccaggaggcagaggttgcagtgagccaagattgcaaccattgcaatccagcctgggtaataagagcaaaactctgtctcaaagaaaaaaaaaattacaaaaaatgtgtatgaagtcaggatattttaagtccccaacacacccctctgtactcattcccttctttgtaccaagtggtacctgaatgtcataaaggcgtgaatgtagatggcagagttatttattttaaatgaagatagacactaactagaactctatgagataatgaatcttcataatagttaagactacatgttttatgtgctctatcagctgaatgaatccatggagacagagctcagaagagctaccattgtgggggcaggtattgattggtagaaggcacaacagagttttctagggtgctggaaatgtgctttatcttgaaatgagtgatggttacatgagtatgtaactgtaaaaatgtatcgagttgtacactgaagatttatttccctaaaataatcctattctgtcaaattttaaataggtaccattttttcttcttttattctgcttgctaaaattttccatcctataagttcatcctttcatataagataccaaagttgagttagacacatccttaaaggcttccttcccaagcctattgtaataagatggaagcacagaggaaattaatgtgttctttgtacaacttgcaagtggtttctttaccaagcagtactccacggagcagagtcattgcatttgcaggccctctcccatgtaagaaacctgaggatggtctcataaaatgagtactcacctaggtcaggcacagtggctcacgcctgtaatcccagcactttgggaggccaaaacgggtggatcacgaggtcaggcatttgagaccagcctggccaacatagtgaaaccccatctcaactaaaaatacaaaattagtcaggtgtggtggtgggcacctgtaatcccagctacttgggctgaggcaggagaatcacaggaacctaggaggtggaggttgcagtgagtcgagatcacgccactgcactctagcccgggcgacagtgcgacactccmtgtcaaaaaaaaaaaagagtactcaccagattgtgccattttgtttcatgaattatacaggccctggttaactgggacccagtggatcaaacagtgcttgccaatgagcaggtggatgaacatggctgttcatggcgttctggagcaaaggtggaacagaagtacctcagacaatggtttattaagacaaccgcttatgcaaaggtgagtgtcagcctggaggctccccactaatgccttacatgctggcaggcaacaccaaaggcttctgggtatgagagagcctcactgttggggttgagctctaggaagggctgggagccatggatgtacagacaggaagcagctgagcctcatcactcacttagctggtgatgggctggtatcttcaactgtaagtcaagtatagcacctagaggtcattgtaggccattgtttgctgacgtttcaacttactgccacagaggtcaaaaatcatccataattatatcagtgataaagctttaaaaaagagagaggggggcctttaaaaaaagagagagaaaagtgtcttcaactgtgtagttctgatgagacctccagaaagatagaatgaaatctcagataagtaaatggacttttggtttattaactttggtgcatgtctttcccacccaactctagacttcacatgcttaaatttttcaatggaggtccagaagagattatctaaaagaattgaagagatggccggcctccatgagagaaggccaagtgaaaatgaactaagccaggcrctaaagcttgataaactggttcttgggccttagttttctcatcaatacaatgagcaggttggaccaagcagtctttaaggtgccttctagctctttccgtgttcagagattcaaggcaaaaccaatcattgaaagcargggcttgcttattaagtcaccaagagcctggacaaaaaatcggttctgtaggtactggaaccactctgtgcaatttgccctttgagcttaccaagtttcaaggtgctggagttgaggggtcactccctgaaactccagagagaaatggttaaagcaaattagggacattcacatggcaatttggtgacctttgtattcttatgcatgcatgagactggacataagtagggtctgaaaaggtaagggcatcatgaaggactacttatggcatgtcatgttgttcttcccctgtggtagtcaccataagaagtatagttgtccccttccatggtggcctgtgagttgatttgtgagtatcaactgaaatggactctgggttagatccaatactgttgttcttacatacaaagaaagcacaaggttctcaatatcccatggtcactacaaaactttgtgaattagaattgtaggacgccaactcacaataccaatgccatacagaaatatgacctctagtttcctcacataaaagacatgtcttaaatgaggttgtttttccattttcatttattctgaatgcagcagagaatagcatatggatttggagaggtgctcattagaacttgttaacatggtgccttgctccttttaagcacagcaatattggagactgaatgtgaagaacaaagctgaggatgttgcattctctaacaccccaagcagtgggagcccctgtctgctgacagttggggtccactacattactgggaaggatgcttggttacctcttggacctgtcagatgattctgttataggcattgttggaaagtccacctaattagctcttttgttttgacctctgcctctagttgaaaatgtaataacctaactgaggagcattattctttaaattgtcagctgtgaattttcaactgttcagtggaaatggttagttaccatggtgactcacctggttcttgctgaactcctgtgcagatgtattgaaaaaactgtcttttgaagtcagcacttggtttactctgaaaatctggagaagagggagagtaagactccatgaagcctaacagagaacaatgctatgggtctgagaacagaacagagacacagacatgagggggctgtgcagtactggaaaacattggcattatgactcagccaagggtatatagttgagacccccaaaaaggccatgtattagagtagggatgacaccctaagactaatgacaaaatcaaaatagactcattttaataaaaaataaaataagcctgagtggttcaaaaggaacttacagaacaaaactcaacatctttaaagggagacaatgtaatccagactcccaacgttgtatctgcaatgtccaacatataattaaaaattactagacttgaaaagaagcaggaaattatggcctaaaatcaagggggaaaaaaaggcattccaatagaaatagatcctgagatgacccagatgttggaattagtaaataaagccaaagacatctattatataaatggtctgggacttaaaggaaaacatggtcataatgaatgaacagatgaggaatctcaggagagagtagaaactttttttttttaaatgaaccagttagaaatctagaatataaaagtttaatatctgaaatgaaaaatccactctttggggctacagatggataagtaagggttaggtagacatgaaacttcagggaagctcccccctcacacacctatgtagtgaacagcatgtgtagtggccttaaaacagaaaagtatatgatgggtttgaaaaactaaaaggacactgtagcttaagtgaaaagagccaagcagaaaggctcaagatagggctggagagatgtttaggggctagatcaggcaaggcctttaggtcttaaggaatttgcactttaaccatggggaccataggaaaccactaaaggattctaaggaagggaatggcatggtcagatttatgtttttataagatcactgtggaaggaagggcaagtgtggatgcagagagaccagttagaaagctattgcaatggtccaggcatgcaaaatttagatgtgggtgagaatagtagagagaagtgagtaggttagaaaaatactcaggtggcaaaatccatagagcttggtaataaattggaagagagtatgtaggagatggtaacatcaaggaagccgtggcttgaatagcacacagggagtcctggaagagacatagtcctgacccttttcagtttgaaatggccaggagatatttgagtagagatatgaaataataggaaaattactatttggattatttgggaaattatttgggaaattaggtccaaaacttcaaagattgagtgagataggacatctattttaaaacctggtatgataaaaatcgtcttgagttagtgaagaagtcctgctatatatagataagattgagatgttgaatcagttagtaatgctttcggctgcaagcagctggaaacctgagaaatggtggcttaaacaaatgggaaattactgtacccacataacaggctgccaagactgaactgggatagggttctgggttgtcatctcagtagttctcttggccctttcttcctgtcaccttaaggcgagatggttgctgcagctccagacatcgtgtctccattcagaacaggaagaaaagggctgggtaccgtggctcatgcctgtaatctcagcactttgggaggatgaagtgggaggatcacttgagcctaggagttcaagaccagcttaggcaatatygagaccccartttctaccaaaaaaarraaagaaagaaagaaagaaagaagcagaaggggcagtgccaaaaactgttccttttgtctagaaaacaaaaacttcctcaaaaatccccagtagaattccactgatgtcctgttagccccaagtgtgttttggccacctccagcttcaagggagactaggaaagcaggcttgggctttttagcttctgtagttgagctggaggggggaagaggatgggcagtaggtgctgggataggcagtaagctgtgcccgcacagttatctttagagctttgtatttgcatctcgttttgcagctctgtgggctgcctctgtgatgtatgactgtggtcttcttgggcgcatggctgtgaaggagccctcctttcattcacttaacttcctaattttaaagacagtgcctgatgtgaaaattacagagaacccagcaagataaagatgctttattcaggctgttctgtgatatatttgatttttctcctcttacccccaacccagtcctcctaggattgtttgctttgtgaaacattaaaagtgatttcagccactcattctgtgaaaaagaaaacttgcagtaggagtatctgaagaacatgaattagtcttggcagagctgtgtgggcggtgtcttgtgggcagcactgctgaggtgacagcaaggggaggaggatggattggagccttatatacagcaagcgaaagggattcagagtctgatggaatgcctcagtcctggcagcagagtgacaactggaaggagaggcaaatagagagaaggcctcccatttgaatttctctattagagttgtgattttgatttctcctgctgactccgctggcccctctcggctgcattgcaggctttcagcccctgggcaccatgcacgcgcccctccttggtgttaaatggacataagcatgccttcatggtgcttagtcaacccccataccaaattggtggttatgttttcaggagttacttggcagctgctgtaatacaaagtctgtgtttgcctctcatttcctacctgattatctcagatcagggctcaggcctttctttgtaccatcttactgaaccctcactttaatcttttgagggtaggtactcctcttatcttcattttactgatgagcagactgaggctcatactagtaataagtaatagcatggggattcaaatctgagcagctgagctgttaacccgcagtctctcctccttctctgtggtctgaattcattcattttttttttcctgagatgttattgagtgcctggccagaccctaggcagggtgctaagaatacagacagagcagctgaggtctctgcttttaaggagcttagactttagtgccacagacagtggtagacatgagctgtcacatctcctgcaaaagagtgcaggggagacgaggaggaggaggagccccagatctgcccagcggtccaaggaggtatcactgaggaagtggtgaaagatgggaagcacagaatgtctacaagggagcatcttcttgccctccagatgtgcaggaaaccttattcttcatcaaggatttctaagtaggatgaacttctgctggtgagaagcagatgggcaacagtgagccattatgaaatcagtgggcactggaggtaataagcgcccatttccctgccctctttgttcctgtcctcctgatttcacctgtgagcttgtgggtaaagcagaggtacctttaccagaacacactggtcttgttttaccctgcagagcatgcacacatggggctggaggaaagaggaggtgaggggagagaagggaagtttgtgccaggagttctttggaggaggtggcggaggatgttagagcgaagagacagcctcagagaagcagtgaggcagggtccagcctccaagagtcatctgractctggaatgaagaccgttagggggacctttgttccacctctgaggcactgggatacttatgaaagcatttggctgccctctagaaattgggcctcttgcctggctttctgctcgtaacttcagatcctgtctcagccccagaacagaggctgggtcacaggtagcaccaggaagtgcctctccagtcacatcgtccccttaatccccttcacccctgtcactcctgtgttgctctagaagctttgcaaaggaattgttagagaagtttggtaacttgaccctactctgccctctgacctcaagaaagcacctcctcctgtttgtgcgtcaaagcacttcctcctcctgtgtgtgcatactgcgccttctaagggggaggggcggcagcacaaattagatgttggcagaagaggcaaaatgacagaactgagaggagcaagtgagaaatgtttagcaaactgtcagcttctctgcagggctctgaggaccaggccagggctgggatttggtgatgatgatgctgcttgggtttatctacaatgagggctttttcttaaaagctctgtggcttcgaagctcttactgcatttatccccaccatgcccctctgtrgtcagacagggctgagggtggctttatccctcctcactttaaaaatgattagatactgtggggtaggaggccagagcccatgccggctctggacccctattctcagaccagtgctgagccacaccctcagagccctcagcctccctgccaggattctccctcatgctggggctgtctcttctcttggctacagtagattctgctcccagtcccagggatctggttttgactccctgtctcacaaagctaattaatagttaaattctgctccttcttayataatatctcctgcttctgttttctgttttccctgcctctccagcgtcttttctctcctaagctattctaaactgaactctctgcttttctatcctccatcctatgctctcagccctcctcagcatgattgctggccagagtggccagtgccacagggaccaggtggaagttgttactgggagagccagcccctcagaagtccttctagggatgggactgggcaggggtaggaagggcacagaggccacagaaaagtagacaacttgaggctggcttttccctgtcacttcccaggcaagcaaaaagctgcctgaatagagggagtaaaatctttaataacagcccggggccaaggcgagatgctgggaggaggcacctggctggctctcagcaggcctgagagggaacttcctccaggaaaggtcctccaggggttggtacagggctgggccttcgctctgggattcagaaaccagtggtgtttctaaatggtacagagacagtacaggccatcaggtttccctccctgaatgcagggccttcctgctgacctcccagatgtcccccaccaatgcctagwcacatctgtatgtagtctctattaggtcaattctctatcatcatctcatttcccttagccctgacttcttgcgcacactccactgtccgtccctgtcagggaaataaagacaggtatgcttggtacatgtactccagatgtatgagaataaaagaaaacttctgcagtctctgggtcagcaacctgctctgcaaagagaaaggttttcatgttttgtttccaagatggaatgactgcaaaggaaaaatggaagaaataatttaatagtatacttcttatggtatatggacaatgaaatacattgtaaatttgatcaggaaccataaagatagaaaagcattttgtgttccttttgaaccctgagtggcctttttgagctcctgtttcttgggtgtacaggtcttcttgaggtgtcagcctggactccatgggaagagatgtatttagcctcttgttgaggggtctcagggatcgctgcacaggcctggtgagtgtcaccaatgaacctcttcagcttggagagttatttgaacttcaaagctagaagaaacttgagagagcatttagctcgggtctctttttaatccctgccctgatctgaaaaacataaaagcaaataaacagaaaacccctcatgcctgcatttactgctgcttgaaattgcaaaatcaatatgatgtctggaaacaaattaaaataaatgaataaggtgttgcgttattttgagcggcccacatcatgtccttctcactccttcccagggggctgattgccatcctgaggtgtgtgtcccatccttgaaaattgctgacccagcccacatcttattatataattgaggtgccaagagcagggaagggccagaacccaacttgggtctcctcagtcccagtcctgccttcttttttattattattatttgagaccgaatctcactctgtctcccaggctggagtgcagtggtacaatctcggctcactgcaacctccacctcccagattcaagtgattctcctgcttcagcctcctgagtagctgggattacaggcgcctgccaccatgcccggctaatttttgtatttttagtagagacggggtttcacctgcattgtttacccctgctcttggggacagttcccaagcaacygagtatttctgagaatcatgtgcagacaatagccagtcagcgtgtgttgcaggaaggcagcacattagcgataggaaatgcagtaagtacagaatgggcacaaatggccaggtaatggaaagtgtggtgattagaggttttctgttttgttcttggtggaattgactcattgtcctctctgtcttgcttttgtcattatttactccartgctctgtccttaccctgggttcttctgagcccagctgcagagagaccagtaaagaccratccaatggctgctgctatgaaggaagcaaatagtcattaacagatacatacatgtcaatactgtgtttttcaaaataaccattctcttatgcagagagacacttttccacagcacctttccacttctctgtgtatttgcttactgctaccagatggctagctctaagtgtcagatttgctcaaaatagagacagtagagctgtaataagttgaaaactcaggtaaaatacattctgtagttttaaaagagtatattaacaacatgctcttaactatgtaaaagcatatatataaacacacatacaagattttatcaatcctgacatgattagttttaaattgaatgctccattaagaaagaaaaatgctctcaatatattgtaagataccactgattgtaagacatgtcccagtgtcagagtttttgggaaaatgtatgtcttagagtgaatagaagatgcaatataagtaggatggaaagatataaaacaaaatattaatagtcatctccctgggtattttgaccaattgtgggtaattgttaattttcttctcttccaaattttccataaaaagattattgctgggcaaggtggctcatgcctgtaatctcaacaaggtagccaaggtgggtagatcgcttgagcccaggagttcaagaccagcctgggcaactggcaaacctcatctctacaagaaatacaaaaattaactgcatgtggtggtgttcacctatagtatgcacctacagtcccagctactcaggaggctgaggtgggaggatcacttgagccccaggaggtcgaggctgcagtgagccgagatcaccccactgcacttcagcctgggcgacagagtgagacactgtctcaaaaaaaaaaagattattatcattttgataatcataaaataaaacagcatgatatccgggttagatcatcatttatttacacatcttctttagacctgagtgtcttagaaagggatggtcttatgttcttgcaaatattcaatctrtagggaggcttccaacttgaaggtaagtgagtagaatgtcccctgggatggctgttaccattttgttttttatgattagaccaataaaagctttcagccttgccctcaagactcccctttcctggaataataagaccacttttcaggcaaggatagtcaatgccacagattaggctgaggacaattttcaagttgtagctattggactactccctccctctcctgtggaagcctctctcttatcttgtagacccaggggcagggaggtgacataggtggctctgagaatcagaagcaatctcatcagacargtggctctgtcattaggagagtttggccttcatcgtctgcattcttaccagtgtagtggtgacatttgagaacctgtagtcaccttctctccaaagttagtggaattagaattgttctgctgctgaaaaggtgggtcagagggggaaagaaaagatggataagtgtaacctgagtggatatgtggataagaagagattagtcaaattggctgctgccatacttcctggttccctttactgcatccttttccacagatcacgtacatggggctgtgtaatgaaatcctcagggcattccctgatgggcatacctagaaagcacatccctcttttctagcaccagtgacaccatttacatgtataggagtcctcttattggaagctattctataaagcacttggtttgtccctctctttcccatagctctgggctgtgcacttgtatgtgtggctgcttggtgcctcttttcctcttgccctgaaatcccatgaaaccacaccttgttggcaagtcatatatcattagcaggatgccttgctccgaatggattatttccctgctgggttaacagcacctgcattggaattgagattcttggatagcacagtggtatttgcaaataaatgttttgcattgtgatgctacaacaaatggattttgcttggaatacatatcacattccaatgagaggttgacgcagggctatcatagggaggctttactatatttatgtatttgtcatgtcttctctaaagtcaaacaaggtaaacatcatgccaaatgggttttcttgttttttgtttttttgagacagactctcactctgtcacccaggctggagtacaattgcactatctcggctcactagaacctccgcctcctgggttcaagcgattctcctgcctcagcctcccgagcagctgggattacaggtgcctgccaccatgcccagctaatttttgtatttttgttagagayggggtttcaccatgttggtcaggctggtctcaagctcctgacctcgtgatccgcccgcctcggcctcccaaagtgctgggattacaggggtgagtcactgtgcccggccgggtttttttaatgtataaatcttcatgccagagtcaaagcaggacaggggactagagtgcgagagaaaggtcattcctccagcacattctagagggaatgtctatatttttaaacatcttgctgccttcrtaattggttttccttttttagaacttaattatatattgtgcctccccccccaccaaaaaaagaaattttggcaacaagagtaagttttagaaaaatatatataaatcataattcaaaaataattgcaaatcaaatcataccaatttataagtatgctaagtgtcaagcttttaaaaagtgtacattttaattagatgttgttgttcaatcttgtgtcttccattctctcaaatctgtgtccagctcttaaggtttttgattatccacccttcccttagtagctaatacatccacttgttttacagggtctgtacttctcagtttgcttgcacttttttttacctgggtcttctaaaacgtatcatgttttaaacccactttttctagaattctcatttgtggtcatgtcgtaccttgttcttaatgcttcagctcaactttctgtcttaggaagtatggatttattcttagcattacttctgcttctttgaagagaaagtcatattagccgcgttatatttaatcctctttttatccccagctttttagttttaatgtttctctctcttattcctgattgtattttgtattagtaaaacctttttgattggatgttacttcagcccatcttttattggtgcatgttcttaaacactggctcatcttgactcatgaatgcctagttctgtttcaatttcttcaaacatcttcgttcagatggtgtaccctagagtgacagtggcagtcttttcagacacatcctagcacaaacggatttaaggcccctttgcaaaccacattacttctatataggccaaatggcaaccacagggaaactttataatcagaagatctggataattcattatcttggatctgctgctgatggagtttagggaaatcacatgacctctcaaccccatttttaaaatttattaaatgagaggcattgaataagttaatgatttccaaagtgtttcaaagccttgggagtcgatagggaagtattgaggaattagaggagagaaagggcatttctttcaactcttacatattgggttccctcagattcgatttgaaaaaggtttcatagcacttttaaaaagaatctaaaaacctgatattttcccaggtttttggattctgtgagccagtgggattttaagattggccagtatatggaagaggtacacgtaccagtcctgtctgccagatgtaaagacatgaaatgaggcgaataccatctatcactgtaattacaacactaaaaaaaaaaaaaaaaaaaaaaaaaaaagaaggatataaactaaacaaaaaccccaaaaaaacaaaaacagctctttaaacagctgtagcaccgtaactactcacatcttattctggtggagccctgctctgggccagcccaggattgaaggaaaggttatcagcagctattggaaaaggtactttctgaagccctgttcatcagaaaacagtcatgaatcatgtgtttattatacagtggggaccgaaaagagcttgcagagttgttcgagatgttgatttcatttagttaattttaaaaatttcttttggtttttcacaatattcatagatttggttaggttttaagcaggcattgttccagaattagcatatgaaaacattcayatttcatcctatttgaatctgtcatcctcatcaagatctgaayattttaagcaaggtacctccataagaagtttcccagccttgacgattacatctagaagaaaaagcacaatgagagggtgaatacactagtggctcrgtaatgctggtaaaggaatggacgtaaagtgctatcagaattggacttagtcagggagattgagccaattttcagatcatgtaatgtggatttgatatgatggaaagacatcagatcccattagaccacatatggatttgcttggaagttaaatggagcctcattggtctttggagaggaaaagctattggtcattttcaaagtttataatatacttgcgtgctcgttgacatttaagaccccctacattgctctaaaaattgaaaagcattctagagtacttaattttattagaagattaattgtttattaacatattagtatataattaacatattcaagatctacttttgctacaatgacatcgaggcattactgtatcagctaatatagatatatatgtatcaggatgttgaaacttttataatccattgatgttagttaggcaacttggttgcaaacaacataaagttactctgattaacttaagccaaggaggaattgattagaagagaatcaggttactcacagttgaatgagaatgccggggatccaagctcaggcagaaattaggggagaacaagggcacagccacaatcttttcccaaaatggtctggttaagccattgctgccattggtaccagcatctccagcctctcaatctggtgtggcatttaagccagttgatcctgtgcctctgggtcaccctacagtgttctgaaactgtactgagcctatgactggttatactccttagtgtcagtggggaagggagtgggatgtggtggcaagtttgtcccctttcaagcgagtaatgaaccaagagacctgagtacagtggtctcaggcctggttccaattagctaagtgatatggggcagattgctctctcctgggcctgtctgtcctcatctataaagagagaggattctgatgacaatgtcagccccatggctctatgaccagagtcttccttctaggaataaaataaaaatataaataagataatagaagcagatggatctctaatacatgccttttagttagagtatgataagctgaagccatctgaaatacagatatgggaaagctgaatttaagaactgttgttataaagtagtaattgcatagcagagtatcagactgaatatggacttgggagtcagctacatcttgcttcaagtgttgcttccacagctctatcccatacttgtggagtgacttggggaaaagttctgagacttgtttcctcatctgggatgtggagtattactacttgacttgtgctgttgatgtgaagattaaatgaggcaacatacataaaagtgcctggtacttaggaagtattctgcaaaggttattacttcccttcccagatgcctggggatctgcttctgtagtactgctctctaattctctcccttgagtacagggaattaaatggtaatttaatgagcatttgcccaagataaggcacagttgtaggctttgggccaggccctgtgtggaatataaagaaaaatcagagtttgcattagagccatagagatcacaggccaacatttccctgtgccatactttctgaattcagatcaggagcactgtgggattaagagttgcagcctacacaataacaaacttagcagttatgtttttgtcattgttgttgcttttcatttttattgtaaaatgaaatatgggtgatcatataagtatatagcctattgaattattttaaagcaatagtttgcatagatagatgacaaatatgaaagatgctttgggtgcgtgtgtgtgtgtgtttttgtttttgttttgttttttgttttttttttgagacagagtcttgctctgtcacccaggctgcagtacagtggtgtaatctcggctcactgcaacctctgcttcagggttcaagcaattctcctgcctcagcctcccaagtacctgggactacaggcaagcaccaccacgcctggctaatttttgtatttttagtagagacggggtttcaccatgttggccaggctggtctcaaacacctgacctcaggtgatccgcccacctcagcctgccaaagtgctgatattacaggcgtgagccactgcacctggcctgttgttgttttttttttttttttatcacacattaacataggaatctttgtgctgtagccaaatgtttatacaaattaatgtcatgtttcccttatatatttataaaattaatactttttaaatgcaaagataaaatttataatgtcctatgtatgatattgtttagttgtggaacactcatgaatgacttagggtttcaaaattcataaacttgaacttaatttttttagttcctagactatgggagagaatgtactagacacacttgccaaagatgtgaattatgacctttgtttgttaattttcttctttccgtgaaaccgtgactcccttgggacagcgaaatcggtcaaacccatctcactgaactgagtcataatgaatgcatctgtttctaacctttcctggcttcctctgacttagtgaacaaggagagagctaaatcctggatcttctttagtgtccctgcttytcctaccttaacaagctgcaaatcatttgctttttcttaaataagccttgtgcctctacttctttgttctcctttcatttgcacaggccatgcaggacgcgttggcagaccttccagaatggtatggaataaaaggcatgcaagcccactggattggggactgtgtgggctgccacctggacttcacattaaaggtgattaagtaatagcagctccagcaattcatgatcacaaatctcctctacatttgggactcactgagtaaaccagcaacttgggactccacagcaccacagtccaaacgtgtacaattttaaattttctagtagccacattttttaaaagtgcaaagaacaggtgaaatgaatttcaataacatattttatttaacccattacaaccaaaatgattccatttaaagatgggctcaataaaaaatgatttattaaagaaagagtttacattttagtacagtctttgaaatctgtgttctacatttatagtacacattagccatatttcaagtgctatgattcatagccacatattgctactggctaccatattggacagcacagacacagagggtcttcaggggtccatgaactccctgaagttttatgtgcaaaatgtttgggcattttcctgagcaatgggtccattactctcactatagtctcaaaggggttcatgtcacaaagcagattaaaagccagggaagcagaagctaactgtgacatcatttcaaaactagatagacttagagcttagggattgtgtttgaaactgctgtggaaacagtgctgaaaggtcacaacataaggcccacctattctagaaggggtccctaaaacttctttgtctctactgactagagagttgttctattgatattttttttacctgggcattctttttttatccttctgatttctccttctgtcatcaagacttttctgctctgttcatttagcgtcaaacctgccctcactttcgtccccgtcaaaacctttaggaggaggaagcagcagctgagacaaagttggccttcctttctagactcttgcctgctgacaaccatacctggtgtctgcaagcacctgccgcttgccactcagcttataattccctgtgcagcctcctcacaaaagtgatccaacttactccaactgcaaacatggaaagcctcccataagggagtgtgtactttggaaacatttcaatacaaatcctggactgagcttttcctcttaccgctttcccaagaaggtggcgagagttctgaaattcagtcctgctgtgacttgtgtttaaatctgcaaggccatctctttcagggcctttgcatttgcctgagtctggtcctcatgttgaaggcctttgcttcttaactagcattcggtgtgggtctctgggcctgtcagctactgtgtgtggaatatcttctacrctttcttctttgcccaacattttactgtgaacatgtttttatstccattcctggaaccacctgaaaataagatggggcaacatagtgtctcaggaaggaagcatctcagtcctacagggtagaccacatctatgcctctgtgtccccaattctggctccataggtgacacctaattggcagttaggccaagtggtagactgtcttttagttcattattggcactctgtcaatgtgtttgaataaatgcatgaaggaagtagcacctgtccactctgtgtcctccatgtctgtcacattatttggcactcagtggatggctaatgtgtgcctcttccttaaaaggcattttaaccagctctagggactcatagtcatgaactcagctcaggccatcctttctctcttcaaagcagtaataaccttggcacctgtttttcttgttagaaaagtagatgccttttttttttttttttaccgtacccttatatccttgaagaaaatatagcttctttctcagaacacaaacactataacactaatagttatttttgatttgtaaacaaaggagccagaaaaaccaggaaagtatctttctgagcattcttggaccaccttcaacttgggaatgcctgcatgcctggtgtggggcaagtggtagggggtgtttctgaaagaggaactgtgatcctcttctcagctycttccaggcaccatctcaatccccacacccctggcccagtggtcagagctgtggtcactgttggggaatgaggagggaaggggaaggggatacagttagggagcaacacagcccaaagggaggactgagaaatgacatcactcttctttcctatcaccaggttcatgggcaagccacgggcgaaaagctgactgcctatacggccacccctgaagccatttatggcacctcccacgtggccatctcgcccagccacagactcctacatgggcacagctctctgaaggaagccttgaggatggcccttgtccctggcaaaggtgagctggcaagttaacggctcaggtggtaggattgctaccttacatttggatggcgcctcccagagttcaaggtcctttcctctatgtcatcttgcgtgggttgttctttgccttagcctgattttttatgtttttattttgaaacatgaggataaaaaagagctctgaaaatatttttattacctctggtttctccatgagatactagtttgtctgtgtcttgagcttctgattgaaagctcagctctctccctttcagtataatctaaagttcttttctcctagttataaattaggagaagatataggaatctattctattaggaatagaatcttctcgtaatttataatttcaccatcaactaaaactacactgtcagagaccaaagggaagccagtaagaatgagagcaaacttttccaactcaattttattgttttaaagaattcatgtggtcatctgagcagtgtcctgctccatacagagttttaacatacctgctttatgaatggatcaagctgacctagaatcggcatatcaagttgtacttggtctgtgaagatttgaagattctgtggttgcaagcaacagattccatctctgactaacccagaggaaaaggagaacacattggaaggctgtggggaagcccgttgctagaggaacagctgaagaggcagtccgaagggggacttggagagtgcagccccaagagtttggagaacaggaactcacagacagtcccctgagtgccactgtcagtaattctactctaacaccgccttcagtgcctgaagcacttggttcaagactcctcttgcagggaaaggtgtttgactgctgtaactggggcccccagcctatttcttggcaaagagaggccaggcaccttccttggtagaccacaaagattgtccccagggagggagggggagctctccaaaacaaacttgagggctcttaccagataaggggatatgaagcctgggtagacaaaaagaaatccattctaagttagaaataagtctctgaagtaatttaaatatttccacaaatatctcatccctattctctttcatgaactataaacttcaacccaaagtatacaatctgaattattggggtctgaaatagcatttgactaaaaaaatgttttggatgatgatattaagttgccatctctgaaatgaccagaatgaaacatttcctaatactaggttggagagatagacaatgtcatcccaatttctctctgcttaagactttgtttacttagaccattaaagccggattcaaatcagtgagcactttctaaagagcctgctgcatgcactcttggtggggcatagatgagccattccagtcttaactggatgccccagagaggcagaacagaggacagccagatgcatatgccactcgccccacacaaggcagatgtcacctctcagtttcacctctttgcaatatgtattgaaatagagaaaagagtcttttgagttaaaatttctatgcatgcttataaagcccaatatagctgtctctctcaggtttattttctttccttgctcaaaagaaaaactggatatgtttcaactgtttagtttaaagggaaatctcatagttttactctcatgagcaatttgatattccttgagggctatggtggctgaataatatctaaaattgaaaaactaaaacatgtaaacatctctagcccttacattttctcttatggctaaatttggggacacaaatgaaaataaggtactattaataggggagctatgatttgttaatgagctaacaaattatagaggatggagttcctgagatgaaaggcactgtataaattcaaaacattttcatatgtaggaaatggagaaattttttttagtacacgcaaacagcactgttttcatgaacacatggatatcgacacacctgacctggcctagtcatttcattttggcaaatttagtgccaagtgtaatgttccatttgaagggctcattagttactttctcccctctttttaataatctctgaaattattccaaatggaacattacacttggcagtaaaattttccaattctaattttcagagtagaaatactctttttgcagatgtcartatattcaaaatctctaaattaatttgcacatcacgtccctggatttttgacatcatagtcacagaaggccagtacagtgcattgagtgtaatacaatgttcccaaaagatgaattcagattacctaggaatgtatgatttatgcctcttctggcctttgggattacattttaaaccaggatgttgtatcactgctgtcatttaccattgctgaccacctcattttttttcattgaatgtcagattttaaggatgatttgtgttgaagcagtgaccaccgagtgtcatggcagcacacagttgtgactaaatttatcacttgcaggagtttcaattctcaaacatgagctcctgtagttgctaagtttgtttctacatatcggctcctgatttggcctgagatgaccaagattctggtcctagagccatccatatgacttaaggaaggtcacgtaagctttgtaagtttagccttcctggcagagcttgtattggggctgtcagccaaggtggtcttggaggaccttgtgggtagagaagaagctttgaggggccctgtggaggagagtgacacatgtggccagggtgatgctagagtggcaggctggctgaccccattaattgtggaaagagatggcgaggcccccagaacagcagggatcaggatggagggagggaacaggtctgagaagtctgtggaaggctgcgagggtggaggatccctggatgatttcttgatttctagctggccaactgggttgccgatgttattgactaaatgtactgttttgtgcttagcatccttaatttggcacagattcctttaagagaggaaaaaaagcaaggtgctcccctagagctcttgaaatttagtttatttccataatcgttgacgtcgcctccttctctcagctgaccaaatctgacttaagtcatgttatgtaagctctcacttgataggaactagaagccataaaaggcatcaatggggaaatatgatcagaattctagaagctgttctgtcttttcctgaaatcttttcttgcattcctaatattaaaatattcaaaccctggggctttggaaccacacacttcagctctgagtcaccaactatctacacaatgcattttttgctgaaagggcagatgcggtctctccaaaggacaacttggaactctgttgttattgacacattacaggcacattagagagcaagagcctccctggaagccccaggtcattaaataataattaattgctcactactgttttgtccttgtctccatagtatccatatggggtgaggacaaagggtgagagcagatctgtaattctggggtaatggtttggttttccatcaaactgtttcaagtagaattctttgatgttatgtgaagggaaaagcttctgtgctcaaaaaatctggaataaacaaaaaaaaacaggtatctttgctttggacttctcagaacctttgctgtgctaatgtgcactgtgactgtctgagagaggaagtcataggcactcttgtcacacccagttgaccacggagccctgtttccatgcagtatccctagaaactagttatatggactgccgccttggtgaacaccaaatgwaagtcatttgtctgtttttccagagggtgtgagagacctgccttctttccagtgggtgccctgagggcaaaggacagatacctttttgtctggaatgtttcctttgtaattactaaagtgttttgctgttatctaactactattgtgaaatgcttcagtttcttctgatttcaccttcttagattcctgcatcacatcactagcacaggagtgattactgaacacattagtaattaggaaggaaggaagaaatatggagaacactagagacctattcaggaactttggattttaattgtgttgtttctaggaaatagattttgaccaggtatagcatgcgagctgctaccgtgcattcattgcaaatctgctaatatttaagttcaaagaccaatttttgtcctaactgagaaactggtataatataacttttacatgtaataagaagcagttcaactctttcaagcagtacactacatttttttatattactttcttttgtaacaactgagcataccatataagaacctacttaatatatacaattccatggtttttaatatattcacaaatttatacaaccatccccacagtcaattttagaacattttcatcatcccaaaaagaaatctcagaccctctggcagtcatccctccccaattcttgcctaatctccagccctaggcaatcactaatctgccatctgtctctgtagatctgcctattctggacatttcatgtagatggaatcaaatataatatttgtcatcttattgtctggctcctttcacttagcataatgttttctttcctttttatttccaartaatcctccattatatggataggccacattttrtttatccattttattaattgatggacatttgggttatttctacttttttactatagttataaataatacttctatgaacattaataaagatttttgtgtggatgtatgtttttatttctttggcaatatacctaggggtagaattgctgggccatgaagtttaaggaactgccagactattttccaaagtggcttcaccattttacattcccaccagcagtgtatgagaattccagtttctccacatcattaccaacacttcttattgtctgtggtcattttgattatggtcatcctagtggatatgatgtgatacctcagtgtagttttaatttgcatttccctgatacatcttttcatgtgtttattggccatttatatgtcttctttggggaaatgtctattcagttctcttgccccttttaaaaaattcattttcattttaatttttaattttagtttgtctttttattattttaaccattttttatatattctagatactagtctcttatcagatacgtaatctactaagttgttctcaacttctgagagtttgtcttcatggtgccctttgaagcacaagtttttcattttgatgaaattaagtttgtctgttttttcttttgttgcttttgcttttggtgttatatctaaaacgctattgcctaataaaaggccacaaagatttatacgtattttattttctaagagttttatagttttagatcttacaattggatctttaatccatttggagttaatttttgtatatggcatgaagtaagggtccaacttcattcttttgcacatggtcatgttactttttaactcacgttcccacattatcttaaaaatcaggctgcttctgcctctttattttctggccttcacttaatatgctatcagaaaacatttctgtgttttcatgcgggcttcacaattgttttttaatccatacataatgtcctatcaactcaatgtaccttaatatcctaagtctttcccatcatgttgaacactgggcttttttcatgtttggggctattatggagataactgctgtgaccatttatgtccacatggctctttgcttcatagaattttccttaggagatattcccaagtgtggggttcttttggtcaaaggttacaaacatttttctatttttctattttctatttctatttctacatggtttctgagagggctatatagagtgccatatccaatgatgtatgcatttcacagcaacttcacaaacattagtgtcaccttgctaaaacgttttgctaacttatcagatataaaatgataatacttcaagatcactctaattttcatctctttttaaaaactaatytgttttttaaagtccaagtgatatatgtatattatatgaaaagtcaaagagtactaataataacaagaacaataaaagcagcctccttaaccaaacacttttatttaggtatatgtttcttaggatacaagttcagtggctatgacagaggcttaaacaggagtttattctacctacatgaaactcttgagcatgtgtgaaaagtctactttgtgaggtggttagggcagttatcctctgtcttgtcttcctgctctgcccttctagagtcctgtccttctctgtgtttctaagttggtctacacttgatctgcgttccagtgaagtaagaagtggggaagggtggggagaagggcatgctccttccctttgaggccgtgacctagcagttgcttctgcacatcctccatggccacacctagctgcaagggaggctgaacagtgctttcgttagctaaacacactagccatgtgtccaactcaacattctattgctgagttagaagaggaggcaggtacaggggtcaactggtagtctgtgccacctgctgtttctctggcatagacatccctatctgtatgtctgtccatgtgccgtatatgcctatactgctgtcttttgattcaccagttctagatattacctagtgacttttattctataacccctcacctcccagcctcctggtaacatcatattataattgcaaaatttgcaaatacacatttcttctttgagaaaagatagtgtggaggccaggtgcaatggctyatgtttgtaatcccagcactttgggaggctgagacaggcagatcatctgaggtcaggagttcgagaccagcctggccaacatggtgaaaccccatctctactaaaaatacaaaaattagttgggtgtggtggcatgtgcctgtaatcccagctacttgggtggctgaagcaccagaattgcttgaacctgggaggcagaggttgcagtgagctgagatcacaccactgtactctagcctgggtgacagagtgggaccctgtctcaaaaaaaaagaaaagaaaagatagtatggaatcagaaatatgggtctctactttgagaagtgagtctgcactcagccagctgcagcaacaggtgtctcccagctaacacatctgtaccatggctgctggctggagacccattggggctgcatttcactgtttccctaccatatctcattctgtgcttcctgacacccaaggtgataaaagataagagctggcttagatgcctatagaatctgtcactactctttgagatatagaccctggccaggcacagtggttctcacctgtaattccagcacttcgggaggccaaaatgataggattgtgtgagcccagtagttcgagaccagcctgggcaacatagggacatcctggctctacaaaaaattaaaaaaaaaaaaaaaattagctgggtttggtggtacatacctgcagttccagctactcaggaagctgaggtgggaggatcagggtgaaaccctatttctaaataaataaatatcttaaaaataatttaaaaaataaatatagatttaattcttaggcttattttaattttggggtttgcaaagtagataattacatgaaatcttaaaacatggcaagtattataaatagtaagaattcataagttataactgttaattgcttatattgtaaattaagtcaagtgaactcactaattgtctaccatctctcatctcttcttccactgggactttacttaggtcattatgcttccagctctccgtatagtcacatatatgcacgtatggcttgtctccttgttacagtagttgtaatacacttcatttaagatgaaacagtgttagctgggtacaggggctcctgcctgtaatcccagcgctttgggagttttaggtgggagtatcactttagacctggaattttagaccagcctgggtgacatagcaagacccctgttttttcaaaaaaaaaaaaaaaaaaatatatatatatatatatatatatatatatatatatatttaaaataagatgttattttaaataacaatacaatgtaatagaattattgtattgtaacataatacaataatacaatgttagaataaatccaaattaagtgttttattagggccacataaatattgttcaactgagccaaatacattttcctttttatataactttttatttttcctagagttcataatgtcttcctttttttttcatttactttgtgttctttgaatttctggctaagtcttcctgtacaccccccatatttctttgaaactcctctcagtgcagttttctgcacgttccaacctgccaggtaatctatccatttccttattttcccaaagatgcttcccagggcactgtgtactgctcagatctgacctggtcattctccaggcctctgctgcaacctggcctattagaacttccctctgtctttgttctgtgagtgtcctcatacttttttctttgttggatcccttgtttcctggatcctatgtctgtctctttcttgatttaccccttcattttgctggaacacattctgtagtatcccctaagaaaagggtaagtgggtaggaactcttttgtcttaggatgtctggaaatctcttcccttctttctgctcagtcattttctactccctctccacttccatcttcaagtgttatgrtggtttggaatttctgatgtccctggtttcactacagatggactttgtgtttctcatcttctgtatatttgaggtatttttcaaaaggaaaagacagtgaagggaatgtcattactccacatctggaaagcaaaaatgttttttcacttttcatgagcatggaagaacattttttcatgtgcrtatttaatcttttgattattcactggtgtgaattatctattaatacccttcaaaggacaacttatttaacaattagcagaaagcacagaagttctagtgcttasttttctcacttgtttcctctgagattcagatggtgttggtgtctcagttgagtggcatccacagttatttgctctcattttcagattgcctcacgcctgtaatggctgtgaacatgctyacccagcaggaggtccctgtcgttattttggccaaagctgacttggaaggctctctggattcaaaaataggtaagcagctattaaaatgtaaccacaacggtatattttgcagatttagaatcaaaatactcccctgttgctgtcatctggaagagctgactatagattccatggtctgatttgcctcctcataaaaatgaataacccttcatttaatcatcccttgtttcagaactacattttgaaaatatactaggtatattgtactttgctcgttgctactgawaataagaagtatctgacctacaaatcttgccagtagagtttgttgttaagacttgtacatatgatacgaggaacaatgcaactcagatgaaaatccaatttcaagactcatagaaccatcccaggtatactaccagctttaaaaaaaaaggaagaaaagaaaactcatagaaccaacagcaactgctgggacgggggttcaaatgaagcacaaatgatagatgtgggctgggttttggtgaaggctttgtggaggaggcgaactcgagctattcaagaaaaggattgtgaaacagcagtaaaattgaaggcatatttagaactgtaaattggatgtccttggcagccttactcattcgtgagcattctaaactatcgtcatgtaacaggaagtctgagaatgaacaaagagaagggaacctaaagacagctctgtccaaaatctgcctcctttaggacagacctgtgcatttttcattccaacattcctactgtagattccagccagtccccagagtcccgaaaccttgcagagaaagttatttccacactatttcctagcacacagaaatagcatttcttcttaaattcacatttttcccctcataacgctcagatcagtgtttcawgaagttgtttgaagaaacgtcaaagcagaaaatcgatgttactctcttctaaccatttaaacctagaaaatgtgttgtttaaagaaataattccttctgttacttttatgcattttacaattagtaaaatttattaatataaccagccgggataaacataaaggcagtttttattgatgtggcttttgggggagttttttgtttgtttgtttgtttgatattttgaatcattactgacacaatattgagagttttgaaggaaaaaaatcggatttttttaggtgcatatggaaaactgtttctcctgttgtcttgatttcccatagtttcttaattaactttttccaaatttttgctttttgccctccaagaagaacaagagcagaaataaacaggagataaagtggtgtttttgcctcccacctgcactgttagaaatagttcacattcaactgagcacaacatgactaccaccatggcctgaggcattctttatackgccaaatacattctgtggttacagtgtctccttttaaacattactcctggttcttccaaattctattttagaatgtagtaaatgactattttcctttcttgactatgaacaccttttggtagtatatttattgcttgccatttgtcctcaaccttcaactccactcaacatttattcaacgcattagatgcattttgtctataatctcagctagaacactacaaaactttccatcatgtcacagagcttttcatcatgtttgggacctttagaacatgtctcccaaacattcaaccactgttttagggcattgttccgagatctgacttaagcaccttgtgtaatacccttagctttatatctttcagttttcacacaatgtgttgtatccatgagtatgtcagcagcttttacagatgaccctatagcaggggttctcaaccaggggagattttgccaccaagagacatttggcaattttggaaacatttttgtttgtcacaactcagggagtgctattggtacagttcaacatcctgcaatgcaaaagacagcccccgcaacaaagtccacaatgtcagtagtaccaaggttgagaaatcctgcccttacaaaaccaaagagctggggggaaaagaaaaaaaaaacccattcttatgaatacccgaagccaaaacagcaggccttggccccsctgggtgagtgatttattaatgctcaacttctcctcaaggacatatgtgagttaaagaataaatgtctacttagaatgtactattgcctttgggaacaaaacatagttaccagtttttgacttcctgactgagtggatttttctaggactgctaggaaatgctggaggagtcagccccgcttcttgagagaaccccactgccctctgccactgagggaattcaagaaagaggcttccacaaatgcttataatttttagtggcaaaaaaaagcactcaaaaatgtatatattaggattgtaactattaaaaaaaaataggctggacacagtggctcacacctgtaatcccagcactttgggagggtraggtgggcgatcacttgaggtcaggagtttgagaccagtctggtcaacatggcgaaaccccttttctactaaaaatacaaaaattagccaggcatggtagcgcacgcctgttatcccagctactcaggaggctgagatatgagaatcacttgaacccgggaggctgaagttgyagtgagcygagatcgtgccactgcactctawcctgggcaacagagcaagactctgtctcaaaacaaaaacaaaaacaaaaactaagcagaggaaaaagacttaaaggaagtaataccaatatggtaaactagttgtgttttggcagtgggtttctccaagaccgtgttccattttcccaactaatgtgatgtggttttaaaacttctataactaaaagagatagtctcctttaagaagctaaacctgggtgtcagtactgtcagttgttttgtgatttgggcacttgtgaaggaaatgttttcttttcttctcctctgaataggaattcccagtactagctcagaggacaccatcttagcccaaaccctgggcctggcctactctgaagtcattgaaactttgccagatggcacagagagactgagcagctctgctgaggttggtgactaagaacttacttccagaatgatcrccttgatacgactttgatagacattttccttcaggtgcaaattacaacctgttccttcactcrtccccatacctaacagccttgtggcctcatatctatcagaacaaaataatattcttcaagatctagaagtttgccaattgtaaatcaaattcagtccttgaatagaatggtatcgaagtaactaattttgtgttggtaatctctgcttgagaaaaattatcttttctaaggaatctctggttccttgggagaggtgactgaaattgtttctttttcctagaggagatatctgttctctccagattactgacattatttctgcctaaagtgtaactcacttatagaaatgaacagggaagttcagagtcatgtttatttggtcagggttatctcttgctagcatgaaacagcagcacttaaagatggtacatctggcaggatttgagcccagcctctatgttgaactaacctggaaagtaggatggaagaggtagggtgagggatgggagcaggtagtgggagcagtgattctcaaacttgagcacacatcagaatcccctggtggccttgttaaatcacagcctggcccccacccccaccccagggatactgatttagtagtcccaggtgagaccccaaaatttacacttctaacgagtttccagatactgctgctaatgctgctggtccagggaacacattttgagaatcaagggcttagaaccttgccacttaatgtctggtccctggaccagcagtactggcatcacgtgtcttagatcccaccctagtctaataagatccctatatgatttgtatgcacattagaagtttgagaatactggcttagagcactcttaaacttaactgcacattggraacacctgagagttttaaaataatactgatgcctgggtctcactccagatactccaatttgatggttattggtggtgaggggggcatggatcagacatcaatagtgttcagagctccctagttgattctgatgtgcagcagagtctgggaactactgacttaacatagtgatgccacacctggccatggctctgaatcacctgggaggtgcttacaggtcccatcttggctgatcttgattcagtgagacctgaagatccaagtttttcaggtttgtgactatctggctatatttatatctatagaataaaggaataatggtcaggttttctcctttgtaaggagtccatgttttataaccccatgtttgtggctttacttcataaactgcatccccagacatgagtcatgctctaagatatggacccttaggcctttttttagaccttgtttgagcaggtttcctggaggtagagcagagcgaaatcacagtgtctgtaaggagccccagttaaccctctacagggcaagaaaggggacacttgtggccaaaattaggcttctgaagtgcctagtgaagcatccactctttagtacagtactctgagcattaattatgcttcctggcttctttcacacagcttcagatggtctgttgaagcctctcctggctctaggctgaatatctagagtaaaataattatttcaataagtagaaggagaatggctggggaaaagccgctttcatctatgagcttctggaatggaaagacagtggtgttaggagaagactgactttcaggagagctttttatgatttgcatcacgactgtgataatgggagtgcagaaagacacttcagaccattcatgaaaagggctgcttttgataaacatagctgtattttcttattctttatgcctcttgactgtaagctccttgaggacatgggaagatcatatttatctttgtggccccaatggctagcacgagcccagcacgtatagatgcccagtgggtcttcactgaacaaatgcgagggtacccgcaatccaggttgttaccaagccacactggctcaattcatataattagtttggctctctgaaaagcaccaagtgaaaagataatttctcttttgtactgttagtggtctgtcctgctgtctataaaacgggagcatttaaatataaaaagagtggtctggttcttcaagccgaagcctcagaatgttcctctgcttgcctgaattccttctgctttaggataatattggatttttcttttctgaatattttccccccaacaggggagtagtcattaaaaatccatatcgtgcagttctgtactggcagctaaaagctgatatttgatgatctctgtaggtgtcacagggctctggtgataaagcaagccacagaaccagggccaacttagacacattagacacagtagacacagtgcctagggcccacaatacttttagaggcctctgcaaaagttttaatttcttttaaaatcagaagaaaaaaatgaacttttagggtcaaaagttatatttgtctttatattgatgcagttgtaaaatataatttttaatattatctgaaggagcaaggagcctacaaaggcagaagcacctagggctcatgaaagttatgacacagctctgcacagaactggtcccttgggagagccacacataaacatggcaggactggtggcagcatcagggtggtgactggtgctatgcggagaggagtgagctttcttttctttccctgtcagttcacaggtatgacccggcaggatgcttttctagccctgactcagaaagcccgggggaagagagtgggtggagacgtgacaagtgataaactgaaagactggctgatttcacggcagcggtactggggcacaccaatccccatygtccactgcccagtctgtggccccacacctgtgcccctggaggacttgcctgtgaccctgcccaacatcgcrtctttcactggcaagggaggccccccactggccatggcttcagagtgggtgaactgctcctgcccaaggtaaggagccacatccctgcagtggtgactgtgcctatggccccatacctgctagggcttcagacagcctcctccctcctggtgctaactctsctccctttttccctgacttccatgaggctggaaagaacactgtgggtctttggggccctttaagagaagggtctggaatctgtggccctgcctctgcaatgggcatcctcccttctctgagctgttggaagcagcagtgtcagttcagatctatcccagaaacatctgatccaactgatggaaaagctctaaattttccttacagctttgtaaaaaaccactttcctccattttgatattccaaagagccacgtggagaggggagaaaatgttctcttctccaccttgcagttttccaatatagtgactgtaacaacagtggagattttatcatgagtagcagagtagttgctaagagarcaagtgtgctcagggctgcattctttaatatgctgaagcaccatggttcctttctcctcattttggaagtgggattatgtttttctgtctattcactggcatgtctcaagcatgatttttaatgatgctgtccatatcagctaattaaacaaatagcagataccaagttccagtattttccttcttctgcggagaagccatttttctctgccttatagatcatgatgaggatattataaaataattttgtattctgccagtatagagctgagttactaggttgacaattaggtaaccacgtagtgtaattggaagtcttgagctgggtgtcaaatcagtgatggattcaagtcctggctctgcctcctaactaactgtctagccttgggaaagtcatttaccttctctgagcgtgaaatccctcatcaggaacaaaaataaccccattgaagggcttttcagaagactagaattaacacatgtgatcctgcacagtgataccttctaggccttcaataaatagaaactttatggccatccagccagggacttgccagccatcctcccaggtcctcactgaggcagttttgaaattcaaggtggaacttggagggaggtatataggaaggcccagaccattttagggtagaaatgttggctccaggaggaaaatagcacaccctctttgttgataagcgctgacaaagggcttccctaccagagatgttggtggcctgcatacagcacagcagttgtggccttattgatgaggataaggtttcctgcttggctgcagaattactggagggcagaacctaggccttggtgttgggcaaggctccctggatgatcttttttttttttgagatggagtctcgctctgtcgcccaggctggagtgcggtggtgcaatctcggctcactgccagctccacctcccgcgttcacaccattatcctgcctcagcctcccgagtagctgggactacaggtgcccgccaccaagcccggctaattttttgtatttttagtagagatggggtttcaccgtgttagccaggatgatctccatctcctgacctcgtgttctgcccgcctagccctcccaaagtgctgggattacaggcgtgtgccaccacgcccagcccctggatgatcttaatgagcatccaaggctgagagctactgagccagtgtggccgagcaaggcagcccagtggtacagactacaggcaccagagcccaccagatgtggattccttacccttgaactacaagaccttggacaaggttcttaacctctctgaatcctagttactcatctgaaaaatggggatatgagcagtatcggtctcataatccccagggctactggggattaaatgagataatacttctgcggtacttggctcagttcctactacccagtattattattattactattggagctaatcctgataacattatcaccattatctatcacttctatccctcctgcttgccacgtagcttcttccttatcatctagtttttagtatcagcaataaaacatgttagttgccttcaagtccaacaagaccattaaaaaggaaatcagcatggcaaatgttagccagctgttattccttttataaattgagcccgcattttctccctcacttggacctcacttgcacaaggtaagtgaggaagatgaagtaatctttattttctaattatttcccaaartagtgtctgtgttctggttgattgctctccaaataaaaagacctggcttcaatttagaggcgcactgttgagatcagcttcttagagcagccctgggtggtaggaagctgggttccccgagggctctctctgaaaagcttctactcttagagaccaccactgttctcattgggaggtcccctgattaaaatgcagggggtcccaaagccctgccagatctagggcgcccatgctctctgctcagccactgcatttaaccagctgacgagggagctggaggactatgtgggggactggccatttccttgggtaatatttgtaaagctggtatgaactacttcacaaatggaagacagaaatacaacccttcttttattcttaaattaaaaatacactcaagcccatacatgctaaattagcagaagatttatcagttcctcttgggattcctcatcccttctccccarattctccaataacacccaaagacttacactgcccaaagcgcaatatttggaggggcgatgagcttcacatccatgccttagaagggagagcctgctatggcttcccactgccacagaaggccctgttgatagctggtcctacccatcagacagaaggtgctggttctctgctgatccaggccttgaggagtctccaaggcagctaatccccgtcctgtgctaggcttgactaagggcaccttcttttgagttcctaggtagtgtggcttttggcacctggttccttcagtcccacaggcccacaactctaggaatgttcttaagaatgagtgtagcagctgggcatgatggctcatgcctgtgatcccagcactttgggaggctgaggcaggcggatcacttgaggtcaagagttcgagaccagcctggccaacatggtgaaaccctatctctactaaaaatacaaaaattagccgggcatcatggcatgcacctgtaatcccagttactcaggaggctgaggcaggagaattgcttgagcctaggaggcagaggttgcagtgagctgagatcgagccactgcactccagcccaggtgacagagccagactccatctcaaaataaaaataatgagtgtaacacttgggcccttgtgagaccttggtcctgctggacatgtctgtccctaggacagggattcctttttctatgcaacccttcacatatcaaggatctcactttattctctgtcttgaacaccagggctttcttcactcttccataaggaacctacctttaggcagtggtctcatggtagatatgtaattagctttggaggggggtcctgatttctagcatttgccaatttccgtgatgtacatactcccatcagggccagtttcaagctaccaacttgccatcttttgtcacagtgttgtgaagagatgccccaattgattcttacaggctggcatgagctggagcaaccattgcctttggggcttccaagttggtttgtcttcctcgagtcatcctggtagatttctgcacctgtcaccccagaacagaagtagaagaaaaatccaagttgattttccacacatctccctatatttggttctcatttgtcttcatgcattgattggcttcataagcatcataaagtaggcattggcgaaggcaatcttgacatgcctggaacagaagttaaggcacaaaagagatacctaatcctgtcttgtccttttggatggtgaggctttctaccaggttaaattcagagaagtggaaaataaggcttttaattgttgaaaattgaaacttttatttgtaaataaatttctttaaaacatcgcatactatacaatataaaaagagagctttccctgaattgtcttttcatatgtggctttattcttttttttttttgagacagagtcttgctatgtcaccagggtggagtgcaatggcaygatcttggctcactgcaacctccacctcccgggttcaagccattctcctacctcagcctcccaagtagctgggactacaggcacacgccacgacgcccagctaattgttcgtatttttagtagagatggggtttcaccatgttggccagtatggtctcgatcttttgacctcgtgatccacccacctcagcctcccaaagtgctgggattacaagcgtgagccaccacacccagcctgtggctttattcttatgacattttaaattcatacttatagctctctcaaaagctgatggaaaactgcattaaaatttaaaaagaaaccaattgatgaatttcatttctttcttaggtgcaagggagcagccaagagagagacagacacgatggatacctttgttgattctgcttggtactacttcagatacactgaccctcataatccacacaggtaaaacgtccctgctgatgtctttgagcatttgtcagtgtggctcctcctagaagcaaagaccaagatggaattagacatgcaagagatttcttggggggaaatgcytgtgcagattaaaggggagaagaggaggagtgggcagagagtgctcttagaccacgatggagctgtgacaggtgtgaaaggagaagggaaaggaaggaggatcaggtggaggagcctcagcccacagcacaactctgagaaagcctcgacctggccagtgggaaggcccaagcaaagcttgtccattagagtcttacagtcaggctaaaatggctctgctccagcccctccctctactctcctgggagcagcctgggagagcaacatgggctggcaggaacacaccagagtgggtccacagatgcagcagctggaagctgtcagtcaactgtgcacctcggaacaggctctcttaaagggagagtgctacatcattaagttagattattcacagccaagtaaatcccaagtacaacacaaatacaaaacggaaaaagaaggaaatgctactgtgataccctccttgcagtgaactgcatttgtatgattgtaaagatgtaatgttatttatttaactgaaaagaataatgtaactctacagagaaggtagcaggtagggagggtgagaccgctaagaagcctcacctcttactacatagtagatcatttcctaaattgataaatcaataaagagtataaacatgtttttttttttcaataattgctgggagaaacaaccaaaagaattaaaagtggctaagagacaggcctgaggcaaggaaagaattggggctggagaccactgtttttcattgtaaatctttcagtaccattttgatttttaagctgtattcatgtgtttatttgaaccccgccccccccaaaaaaagaaacaaattaaggaaaagagagcagtaggtagccttataaagagagagaatgagaaccgaaagaaactcttccagagcccaggaaaaaacacagcattgtgcttaaaagggccttgcctaattgctcttgtccatggcagaaacattctggaaccctgttgcctacatataaaatatgcctccctattcttcgtggttctaaaataatatctttctagtgagacagatactcctgccctcaccctgccagaatttcaacctgcagtgttgtgattctgtaatttgagttcatatcagatataagggggatccttgtcaggcatggtggctcacgcctgtaattccagcgctttgggaggccgaggcaggctgatcacctgaggtcaggagttggagaccagcctgactaacatggcaaaaccccaactctaccaaaaatacaaaaattagctggacacggtggcacgcacctgtaatcccagctactcaggagtctgagacaggagaatcgcttgaacccgggaggcagaggttgcagtgagctgagctcgtgccactgcactccagcctgggcaacaaagtgagacttcctctcaaaaaaaaaaaaagaaaaaaaagaaatgagggggatcctgagtgaaagacaccctgcaaaggcaggaagggtgcaaggtgacgactgtggctgggaaccaccagcatggccttctctggcccacagaggggctccccttcagggccttccctctataaggggccattggtgcatttcatgtagtaacaactggcttagaatgcaagtgaggtcaggctctttcctttctcagagtgcttcaaaggaaagccttcacacagatgagagagacctcaagttaccgtggmgggagagacatcctgagaccgtcacagcccccagtttgtgaacagcagtgagcacttcatttccctcatgacacactgtagttagcttcagccccagcacgagttcttcctggggtggtttcctgagtggatcataaatctgagctgtagctactttcaacatttcactccttaatatatcccaaacttgttttccggccaaataccatccttcactttcctttcttttctgtcgcctggattggcagttgaatttctttagggaactgtttttcacgaagaaaaaaagtgttttttaaaaattttatcagaattctggtacagtgactggagaacaccaaactatattaagatgcaaatatgtggtggtagccaggctcttttttctagcctcaaagctgaagccagccaagtctatcctggggaaaaaggtggcttgaggtgtcagggaaccaattcacaaatattcgaagtcctccaaaggcaaaggtttgcttgattggctgacctcaagggacggcattaccttggcaacacagaggtctgtcgccagccagtgctgcccctcccaccgaaggtcccagccagaaaatggaaatgacatttcctttcctctccagtgtcctttaggacccaagagtatgagaaagcctttctattagtatctgttaggtgagagttattgggctattatatgacaattcaccttaaatatgttgcatcgcattcagtaagcaatatacagtctctagctgagtatattttcagactgctttaaaaaataaaatcaaatttctattttaaaataaacatttacagctggggcacagtggctcacatgtgtaatcccataacttggggaggccgaggcaggaagatgacttgaggccaggagttcaagaccagctggactgaacgtagcaagacctcgtctccataaaaaatgttttaaaaaaattaactgatggccaggtgcagtggctcacacctgtagtcccagcactttgggaggccgagttaggcagatcacctgaggtcagaagttcaagatcagcctgaccaacatggcaaaaccccatctctactaaaaatataaaaattagcctggtgtggtgtcaggcatctgtaatcccagctactcaggaggctgaggcacaagaatagcttgaaccctggaggcggaggttgcagtgagccgagatcacgcccctgcaacccagcctgggtgacagagcgagactccgtctcaaaaagaaaattaaaaaaaaaaaagaaaaaattagctgggcatagtggtgtgtgtctgtagtcctagatacttgggaggttgaggctggaagatcgcttgagcccaggagttggaggctgcagtgaactatgattgtgccactgcgctccagcgtgggtgaccaagcaagacccaaactttaataaagaaaaaaaaatgttttttaatgtgaaaataaattaataaataaacatttagtatctgcatgttaatcttcattgtaaataccacattgccctctattggtaggaactctgacatctcaattgtgtaatcataataataaaaattaaagtgaatctagatattcaaggtgcattgtagcaagatgcctttttttgctggtatgttttccttttgtcctcattttatatgcaaattgcttttgttgaaatatgtcagtaatatcttctgtaaccatttttataatttcataaattaacacttacctgacttttttcttttttattatataagcttttctcatatatatatttttgtttgtttgtttgtttgtttgtttgtctgttttgtttttgagacagagtctcaccctgttgcccaggctggagtgcaatggcacgatcttggctcactgcaacctctgcctcccgggttcaagtggttctcctgcctcagcctcctgagtagttgggattacaggtgcccaccactacaactggctaatttttgtatttttagtagagatggggtttcgccatgttgggcaggctggtctcgaactcctgacctcaggtgagccacctgcctcggcctcccaaactgctgggatgacaggcatgagccaccgcgcccggccttctcttatattttaaaaaaatcattgttattccctgatacggttcatttcagggcatatgcatattacaataggcctgtttaatttacacaattgtggcaaagcaggtttttaaaaatgcctccatctcttttttacagcccttttaacacagcagtggccgattactggatgcctgtggatttgtacattggagggaaagaacatgccgtcatgcacttgttctatgcaagattctttagtcatttttgccatgatcaaaaaatggttaaacataggtaagcacttayactgctttgcaaaataattgagttccatgaatagcaactttaagcaggtgtcagttcttctgaagcaaggtaaatgcatgtagtagaatactagttttctagtatgctttagaggttgtcaaccttaatcatttgaggtccatttatattgcgtagtcagttctggcatgtgatgttgcatgcttgcatagaacctagccttcagtgcttctctgtttaactgagttaagtaattaagaattgtacctgtgaggcagagaggagtggcccatagtgttttatagcatctcatgtgaggtcatgcttatcacccagtccttccatgtcagctcttgttcctaagcttggctgaatcccaccttgatgcatccctctaaaaaatgtatagagtggatttgaaatagagaatcacattgtaaaaacatcagtaaattcttttcctgttggcctattgtaaccctttcctcataatgttcagaaaaatgtgtgtgtacttttccccatgaaacgtatcatrtataaaaattacatatttaatgtatttaaagaatggtacaacacattaaatatggaatttttatatatgaacatacatgccccactcctcagtttaagaaacagagtatttcaggtaccttagaatccccaaggtgccccctccaattgtgtatcgctcttctacgcccaccacctcgcccctagctaataccgatcccagatttttaattcctcactttcttgcttttctttataaatgtatcgtttctgcatgtatttttaaactatatattgtctggttttcctgtgtttgaagtttacataggtagaattatatttcaggtattctgtcttgctttcctcactcaacagttttttgagattcagcagtgctgacggatgaagttatatttcattcctgtttcactgctgcgtgatattccattatatggaatgaaacttccaaaatagaactcagtttatgtatcataccaccattaatggtggttggactgttttgtgcaattatgaacaaaactgctatgaaccttcttgcacgtggttcctgacatatgcgtcaccatttctttaaaatgtgtacctaagagtagaattgctcgattgtaggatacgcacgtgttcaactgtcttgagaaacaccaaactgttttccatagtgattacctaagcctatactcccactagtagaaatgagggatccgatcactctacgtcgtcatcaacattttgtactatccaacttttaaatttcaccaaaccagtgggtatataatgggtcacgttgtgagttaaatttgaatttcaagacaccgatttttttttaattttttaatttttaatttttgcaggtacatagtaggtgtatatttatggggtacatgagatattttggtatgggcatgcaatgcatagtaatcacatcatggaaagttgggtatccattccttcaagcatttatcctttgtgttacaaacaatccaattatactcttttagttatttttaaatgtttaattaagttattgttgactatagttgatttcttaatgaagtttatcatgtttcataggtttatgaatctctgtgatcaaatccctgtttgtatcctatgcttttattttttctagatcgtttctcttttattgatttgtaaggggttctttaaatattcttgatactaatcctttttcagctatatgtattgcaagtagttttttctagttcttggcttgtcttgtttttatggcatcttttgatgaacagaaactcttaatgtagtaaaaattaataatctttcctttatggctactgctttcggtgtgtcagtactgttaatggaatagtccatccttttccccactgatctgtagtgccctctccatcataaatcaagttgtcatatatcccagggcttattgataggatctttattctgggactacaggcgcccaccagcacgcccagctaatttttgtatttttagtagagatggagtttcaccatgatggkcaggctggtctcaaacttctgacctcaagtaatccgcctgcctcggcctcccgaagtgctgggattacaggcatgagccactgtgcccagccaatttctttatagctatcttccagtttctaattgtctctctgtctctatctgctgattaacccattctttgagtttttttattttaattattcttcatttctagaagttctaggtttttaaattttcctttatgatttttgtagtattttcatggtatcttttaagactttattttctaaaatagattaaacatactattttatattatctgataattctttatctaatgtcattatgggtctgtttagtcatttgttgtttctgctgttctcactcatgatgcctagttctttgggggatggggtgcaaggggtgttttaactgaccttatatttcttgaaccmttttttttttrtaggaactctttggaacctctctgctagaggtgattttgtgttagcttctccctgttgcctggagatgctaccaatccaagatcactttaaactgaattttctgcttgaggtttttaggaccatataggtaatacgaatacagtcccaaacccacatgagggtcaacttctgtctacagattctcaggagaaatacttttctttcctcctatacatcaccatggtcaagataggcaagtttccttgtttgtctcttctaaccacaggtttatttctagttcattgatgatttctggttcagtgacgattcctgccttgtttgagatcttcttctagactcccaaggttgcttaggctttaggtttggtgtcccatcttttgtgtaccatgccatgcacaaacatttatgatcacaggggttctatagctatgcccagggtggaagctggcttcagtaactgtgttttcctaagttgggtttggtttggttttgccagctcaaatgtattttatactccaactgactttttcacttgtttttcatcaggacaataattcaggctctcttgtctgctgtattaccagaagcataattgctggattttttttttcagttgttgttatgttgtttttctgtttgtttgtttactacaacatcctttagaatattttttaattacagagaaggaaaggggggaaatatctgattatttccctatccagataacccatgttgacaatttaaaaaaaagtaatacatgtctaaaccattttgtaactacacagaaagtgaacattgttgtctccctccctgcacgccactctttagccctttcctcgacttttaggtttctttttatttctgccaggaaaatattttgcctatccccacrtgtgtttttattgatatagtcattttaaatgttgcttatattgcatacatgtcctttgcttctttgacctaataatgtagcttggtggtctttccatatcagcacaaacagatatcacattctttttaatgtaggcatagtattccctcatatggatataccataatttatgtaagcggtcacctattcttccaattactatttttttttaagtccagtgatcctctttattatacgcttagcaaataattgggagcatatatgtaggctcaagtcctaacactggggaattctgggtcaaaaaatatgtgtctttaaaattttgatagatagaaaaatattacttttaaaacttttgaaatgcagacagaaacccattttcattacaatgaagcacattgaaagctccttcccttcacttaascctcggaccagatggccgactctgcacatgcatgcatggattaaaagaagtctactgtacagaaaattaatttagggtctaaattaaatgcttaaaataaatttattctcatcagccccagagaccttcatgtatgaaaataaactggtctgcatcagaaggacactaaaaacattaacagcattactcctcacataaacaaatttgttaaagtgtttgtactttaggttctagaatttgccagttctgctttgcatttcttatgtctggaaactaatttacctaactagataaagattgtcattgataatgggaattgtgtcctgttactgtcatggtctcacagatactacacatttttagtgttttttttgttttgttttgtttgtttttttttttaagaaattgagtttaggttggatgtgatggctcacacctgtaatcccagcactttgggaggccaaggcgggtggattgcttgaggtcaggagttcgagaccagcctggccaacatggtgaaaccccatctctactaaaaatacaagaattagccgagcatggtggcatgcgcctgtagcccccagctactagggaggctgaggcacgagaattgcttgaacctgggaggcggaggctgcagtgagccaagatcgtgccactgcactccagcttgggtgacagaacaagactctgtctaaaaaytaaaaaaaaaagcaaagaaaagaaaaagaaattgagtttaatcccttgaaacaaacagataaaagtttatattcttcaaaggaaatgttctccagttcatgcagttgtgcacacctatgttcttagctactccagaagctgagattgaggctgaggcgggaagattacttgagcccaggagcttgattccagcctgggcaacataggaataccctgtttctaaaacaaaacaagaaacaaaggaaatatcctccatgggctagagagaattgattcaaacttaagttaaaaaccaaatacaacttgagaaacatctcaggccaggcgtggtggttcatgcttataatcccagcactttgggagaccaaggtggaaggatcactttaggccatgagtttgagaccagcctaggcaacgtagtgagactccatctgttaaaaaaaaaaaaaaaattaatgagccaggtgtggtggtgcacacttgtagtcccagctacttgggagtctgaggcagcagaattacttgagtccaggagttcaaggctgcagtgagccatgattgccactgcatgctagcctatgcaacaaagtaagacactgcctacaaaaaaaagttgggggaatagctccttcttatgtaggtctggaaacaaagaccatatgtaagtgatttctagctccttaacagtagagcatatttctgccagtttctgaatgattttttatggaagtattcaatcagtaaattattcaatggccaagtatcctaaggtataggacagggtctgactatttttatgacttatttacaatagtttaagactatattcaagcaggaaaaagggtttgctgcatgctgatgtaattttaaaatgcagtttcaaatatgactttgttttcactcaaatgcattgccaatttgcagatcctccaggtaacacttggattttgctttaccatcaacattaaggaacaactatatggtgtaaattgaaatagacctatggagttttgtttttttgaatctgtttttaaattctgttcaagattccgttccatgctttcctcctccaaaagagacttattttaattactgaaaaggctgacctttgaggaaggtacagaaagtcatcttaactgttactcagtgctgctgtcagcattactcttgttggatcacatcagggcagcaacagcctctgaaaactctcccggtgcattacctctttcttagaggtgtattggtaaaccagtcagccacacatgaaatgaaaatcacccactttctgagatgagtaatttggaattctacagtcagaatttttgagagcctccaaacaactttatcaagctgggctgggaggaaaaattgagacctgtcaaccacatgtgtatttctgaaatctgtataaatcaggatttcctagtctagttctgtattccttttgattagcattgtaatttcaggaggctatttgagatgatagtacagctattccattttagtttaacatttctgagcccctcagcccttgtctcaagtagcagctgtgaaacaggaatccaaagacctctgtccatgttcagtggtgcccctgattagctgtgtggacaagaagctgaactcctttgggtctcagtggcctcatatgttaggaactcagttatctctgagcactcttttcactctgattctaatttcttcaaatacagacagcaaaggtttatgtatatctaatcatctttcctgttttgtaagagttgtggacattttttttcatcacctgcacagttaggcttgcagtttgtactttaaggtctccttaccttacgtaagaggctggcctccaagttaagtgtgccaccacacaggacagcaggtgccttagttgtgtgatctgaaataccaagttaatgattaaccgggaattaatgtaagcaggaaacccacaaaagaagatatccaaatgattaataaacattttatcacactataaaataataaacatcttacactgtaaaatgtttccgtcccagcacgatggctcacacctgtaatcccaacactttgggattgcaagacaggaagatcatttgagtgcaggggttcgagaccagcctgggcaacacagcaagaccccatttctatgatttwaaaaaaaaaaatttccctcactggcaaatataaattattcagcagtgagatgccatcttccatgtagtaaggaagctagcataagagcagctctcatatattgcaggaagtagcttggaacaatctttctgaaaagcagtttggcaatacatagtgagagccttaaaactattcatttttgggtgcactaattgcactgctaaaaatctatcctaaggaaataatcagaaatgcaaacttatgcaccaagatgttcatgtaagtgttatttcaagtagctaaaaatttggatacaayctaaatgccccaaaatgctgagacagggtaaataaagtataatccatctacgtggagcacacttatacaacactttcaattaaattacaaagaatgtttaataacatggagaaattcatctgaagtaatgagaaatagaaaaagcaagatacagcttggttatctttgtctttatatatacaagcacatatatacacatactcaaagcaagagaaaagacttgaaaaactcatgccaacatgttaacactagctatctctgggtggtgakcccaatatacttctgattttttccagattttttacaatgattgtgtaactttatcatttacagtatggtatatattccaaagaaggaaaatatgctgagcctcctgctgtggttgtgggtgtggggtaggatcagctttcagcttccctccttccggtggttagcaccaggttgaaagagagggggcacattagagcgtgggaacatgtcatggcccatcttcactgaatgagatcaggaagccttttctctccctttgtgggagaccgctgtaaacatggaatcttgtcactttttgttgtagctctgtaatgcaacttagacactaaattccccaaactgaatttctcccttcagtttggaatcaacagaaagtggtggctgtcagaagcaagcagctgctcagggagctcccatgagaagggcaggccgcctgctgaccgtggagagcacagcaagcccctatccacagagctttcttctctgttactctgatcatgccagaaacrgggctactgggaaaaggaacaggaagggaagagaagctttacttgggtcctgctgtattagtaaaccctccttctgcgccactaactggctgctaggaaatgggaatggtgatatttcaagaatgagccatggctaatacttagaaactaggctaattatgtgacatgatggccctgggcacagaacaaggaagaagaggaaggtaaacttagtctgatttaatgaaaagtccaatttggagaccattttcagagatctatggccttcaaagatctgcagcctggcaggccactctcgcaccaggtcaggggagtgggcagcaggctctctggggcttcatgaataggtaaatgtcatctgcagcaagaaggtggggctctgatacatcctgatattctttgctcatactgtaattagcacattccttgtatatagtgatttttttaagagcacttaacatggccaatcaatcaatgttctgaatttccttgtttatcctaataattagcaactcccttccttccctcccttcctccctctcctccctccctacctttcctcccctctttccctgcctccctcccttccttctttccttcttccaagtgggacaaatgtggccttcaatgcccagcagctatcagttgttgcaatttctgagttagtgcagtctaaactaatgaagaaattgtgaagatctccccccagttttcatcactgtgcttacatatagctgtgcttcagtgcaagcaagcatgatctacctccagggatgtaccgaaggagtaggaagaaagctgactcagaaatccagggccttcttcaaggcagaggccctgcctaatactcccgygtttgatggtccctgagtcagaacggtttgttagtggtttagagttgcagattttccactcacttataaaggcccctgctgtgcacagtcactatgatgaatgaataactcagttgcatacgcaagtctgttcccaagtaccatctgttgagtgaatgaatgagtgaacaaaagggaaacacattaccccaattgtgaatctgaataatgaacttggcaatgtgatgtgatctctgctccagcaggcctgggttccaagtccagcagggcccttgatgtcctttgtccttcattcctgtgcaccttgcgcctccaaatcacatttggtacgtctttcttgtagtgctgatggttatttatgagcatgtcctgggctgcctgttcttattgtaagctctccaattaattgcctagtgctgtgtacccaattatcatgtaaatacatgttgaatgaataaacaagtgtgactcattcagagctaaactacgcatgagagtagacatggccagcttcagccaagagtgaaaaccagattcccaactccctatagcccattccctggctccctggaaaagtggagggaaaacacttgggaatgagcaggattctaggagctgggaagcgcccctttccccactgggaaattccatgtgagcactcatcggggcattcccctgctctcattctcttgcttcagctgcttgggatctttcaatgcacccctccctgcaaaaagatggtggcactagctggaaagtatagcatccagtgccccacttcactcatttctttcttccctcctctcttgcctccactttgtcctactcacattatcccccacccctgctgctggtaggtttattcatccactgaaacaagcttgattgagttcaaggcaattaacattactgagcatctgttaggaactggagactgagagtggcctttaaggattttcaaggccaggagcagtggctcatgcctgtaatcccagcattttgggaggccgaggcaggaggattgcttgagctcaggagttcaagaccagcctgggcaacatagtgagacttcatctctaccaaaaatacaaaaaattagctgggtgtggtagtgcgcgcctgtggtcccagctgcttgcaggggtaaggtgggaatatcacttgagcccaggagactgaggctgcagtgagctgtgattgtgccactgcaccccagcctgggtgacagaacaagacyctgtctcaaaaaaaaatcatcctcctactcctcacaggagaaagacaggcaagcagcttacctaaatacacaataaaatgtaatagctgctagatacaattacaggcactacacaggatgcatcaggaaggaaaaaacaactaattctaattctgaccaggagataccttctcagtggagatggcatttgagttgagccaggaaggaggactagagttttgataacagtttgggaaatggcgtgagtaaagacgtggaagcacatgcaggcaacatttgaaagagcagagggagtggcaggggacagggagaagtcctggatggctatgcggaggaatttggacttgattgggaggaggagctcttcaaatatgactgcactctttcttttcctccctcacagctctgagagttgtcaggcattggtttggttcagtgatcgtaaacaggctggctccccaagggcagagattgctttgcccaacattatatccccagtgcctagctcagtgccaggcacatagcaagcactcaagaaataccaaagaaataagtgatacatttcacataataactctgtgctttctgattatatggtacgaagaagaattcagagactcgttctgagcaccaggagtgctgctgtcgatgaatggtgtctgggtggttgtaggcaagggcactggggatagttggctaggttttgccatccctgctctagatgatccatctgagatggcccctgctgcactgcaaccctcagagaagacagtccagaagagcttcaactgtcaagtttcattgttggaagctttcagacattaggatatattcatgtaactagcaggtcttggtgtgggtgcactgctgaggacctgcctgccagttctggggaaagcctcccatgtggacatcccctgagagctctcactaagaaatggctacaagcgggttagaaacaggcagatgaaataatagtgttagcagtcaggctataggrgcccatagtgaggagacagtgcctagaagcggatggaaggttgatttcacgttctgctaattgggctgaatgccagttacacaagtgtgttttatattgtgaagattcatcattataccgctaggacttacacttttcaatatgtgtgctatacctcaacagtttaccttaaaaaaaaaaaagttataaaagacgaggcaaaagttgcagccttaggctgaacagctggggttagtcagtttttcgcaggttgcaattctgtccgttctcggaaggtggcagtgttgtgccacttgataaaatacaagacctaagaataggattccttggattcccagccccttcttgaggcttaatgctgctgattttttttttttttttttttttggagacagagtctcgctctgtctcccaggctggggtgcagtggcgtgatctcggcccactgcaacctccgcctcctgggctcaagcaacccctgcctcagcctcccaagcagcggggactacaggtgtgcgcccccacacctggccaactttttgtattttagtagagacggggtttcaccatgttgcccaggccagtctcaaactttgagctcaggcaatccacctgcctcggcctcccaaagcgctaggattacaagcgtgagccaccgcgcctggccaatgctgctgattttgatcatcctacctatctttatctttgaatccagatcattctctcctaacttttgccctaaaaacacctttaaaaatttaccttgagcaaccaaagccatgtactggtgatgtttgtggggaacatcactggatctccaggaaatgagtgctcctatctgataccctgaacacgaaatacttaacgtgtgttatcagcagatatcgccatgaatcattctttgagtttggaataggtcttgctgaaatgcctcaaaattgaatcaggcagattcttaagaataaacaactgcaaatttgcaataatttcagtatgaaggtcaacctgttcttatcctcttatgagaaaaagtttatatgtcactatttacccagtaagggtataactaaaactactttttaaaacaggtactataaataagttataatcaattcatatttcagaacactaggtaactttttaaaaagtgagatagatctatatgaactgccatggagaaatccattcatatcattaagtgaaataccataaagtatacataaggtataatcccacttatataaatccccaaaaatctataaaaaccatatgtggataggtacacatttatgtatacaaaggcattgaaaaatgtctccagacttttccagggatatataccaaactattaataagaactgcctcctgaaagggacataggcctagaaaggagtggtagtgtttggatttgaacagaaggtttatagtcatatatgacttgtatggtttaaaactttttttaggccaggtggggtggctcacacctgtaatcccagtactttggggggccgaggcaggtggatcacgcccagcctgaatttattttcttatcacttatttctaaggagccatttgtttaagctgggtttataagtggccttggtcagcccgcctgcttttatgaggggcagctacttctgcccatccgagggaaggtctgcgttgctgttttctcaatgcctcatgtcccactcctcctgttttcttttcctgtcatctttcctcagggagccttttcataagctgctggcccaaggccttatcaaggggcagacattccgcctaccatctggacagtatctacagagagaggaagtggatctcacaggtaagaatggcccatctggtcccatccaggtactcccagagagccaaggccaggcctgagagctactgagcaagcaggcatctgcctctagagtggggaggatgcaggagagagacccgctggctgtgaggtctctaagcctcagctccctctgggcctgcgccccctgaagcctggtcctggactggccgtctgctcctctgctgcagcccccttcagccaaagtgccacctcagcttctggcagggttttcatttgtatgtaacagagtcaactcaggcatgacctcctatcccagaccatctttgaaagcccamctcagggatagagcccccaggcccaagacacattcttccagaactggggtactcccagtgtttctcccaacatgttctagtggcacatttcagaaccttggggggcagcactcggtttactcgtagcaccccagagcagccccctcttagcatttcccagtaaaacacctccccctgattccccaaacttccctcctgtcccagctctcccaagccttttccttccactctgcattttcaccctttaccctttacatttcacccttcattttcaccctgaggatcacaagatcttcaggtgccatggtgaggatgtatcacgtgcacccagcacacacgtggaatatatgacatgttagaaaatgggtaggggcaaggtgtggtagctcacgcctgtaatcccagcactttgggaggccaaggcaggtggatcacctgaggtcaggagttcaagaccatcctggccaacatggtgaaaccccgtctctactaaaaatacaaaaatgagccaggcgtggaggcatgcacctgtaatcccagctactcaggaggctgaggcaggagaatcacttgaacccgggaggtggaggttgcagtgagccaagatcatgccactgcactccagcctgggcaacagagcaagactctgtctcaaraaaaaaaaagaaagaaagaaaacagttggagacatgcagtatacatagggacagctgtgagaaayccccagcactgtgaccattacatttagaaaaactagtgcataatggatgagattaggtcacacgacaaccctgtaaatggtaggcagcctctccagccaaacattagagacagggtttagggaagcagtcgatgcaattacctcatcaaagcaaaatatatcaaggtttataacggtccgtgggagaaaaagaagctggagaagcagaactggcagtgtctctccagcatggatgacagagggaaagagctaaattcaggtgcacatagaattcagcctcacagttagtgaagtgttctctgtaacaggcaaggctgcccatgtatagctgtgcagtttgtgcgctacacaaaagaaccaagccaaggctgtgatttcagtagggcctgaaatgcagccgtttctcaagccatacatttcagggcaacatctgccaaacgagggtgactttttctaacttctcaacttttctgcccagaaagatacattttttcctaatttgcataacagtgttttaaggtctagacacagcctggggcagggtaaaggggccagtggttccctgagtctcaccacagcgtggataaacatctaggacttcagtctccccttctctgctgtcatggggtcaggcagtattgtgaacatcttttcccttcccacgtagtcttgcctactgggtgagaatactttgatcagcaagggcaggtttctgtctccttcatggatgtaactctcatgaagtatggagttggcttttaggtctgtacatcggtcccctgttagcttggttgctgttggaatcagagattatttggctggaaggaaaagaaatccacccaaacccagttgcagaaaatagagctaggccccactgctcataggaagtcaccagccactccttttttcttctctctttctcagctctctcgttcttagttcttcttcctgcttctctctgttcttctgccctgttctccttcatctgccagacttggattctcctctccccaatttcaatttaccaagtgaccttgggtagctgcagtggcaagtcttgccccatctccttaggacctgatggtcccagtgctcagcaacatggaaactgagtttctgtatctcttagctccaatttgtgagatagaggcttagccttgccaggtgctcttactagtcctctccagtagggcttggcaacaaggtcacctcatccaaatgcggccatttaagacccyttccatcagcaccatctagaccagtggtatgtgagtaggggaggagacagttccaaagaatagggtgtgggtggctggcaccacaaagggaccaacacatttaccatgagcccggtaagtgaattccatgtgccctgagagtatgagatcatgttttggtgactgcaacatggatgggacaggtcaggctgccaacttccataagagacccttaattcatcaagaaaatggcaacgtgtgcgagtttttcaaaattcttttttactttccttttttgtgtataaataattcacttgtaaagggggaaattgttttgttttatagaaaaagctggcacaggccattataactgtcctgtttattcgcgaaggtttgtgggaggaaggtgggcctcattcatttaaaaataaaaatatttttataacaatacagagggagagaaagcggcttgttaagtgaattagtgtgattcttcaaatggacactttccatcgctcacccagtttttacttwttgatgctatttctatagaagcaattcacaatgacacataccatacctatggattattttggcatctaggttccgttcctgttcatgcaaaaacgaaagagaagttagaggtgacgtgggagaagatgagtaagtccaaacacaacggggtggacccagaggaagttgtggagcagtatgggatcgacacrattcggctctacatcctttttgctgcccctcctgagaaggatatcttgtgggatgtgaaaagtaagtcaccttcctcttcctgacttgcttcctttgtgatctgccctggactttgaaggagtttgaggaaggaaatgtctttgctgaagacagtggtagagaattctaggaatcagttccatagagcaagtagcagcttgaccagcatcctgcaccactcttagacgggtgttgacaaacataagcgagcctcagaatcatttgggaaacatgttgcagatgcagattccagtgctccgcccatgcctgctgacacagcctccagaatggggctcaggaggtggcctttgaacaagctcagcggtgattccagtgcacactctacgaggaccatgctttgagagtggtttccttggagacagactggcttctgagctactcctaggcctgctatagtccaaagaggccagttccctctttcttgatgtaccctgcaaggttttttctagaacagtgtcattctccctcaccaatccagaaagccccgggaggggtctgggcctgttgttacctatggcctcttagtcacccacagcacccttcatctccccacttaggggagatttgtctctccagagttgtttagtactaaaatgacatgaagtaaaataatcttgagtatctggctattctagaataaacccgtccaacagtcattcatttttacttcatgtgatcagccctaagtgttgttgtgggaagaggaagtcagatgcctggaaacttgagccttgtgtgaagtatccatgtcatttgagaaatcactgtttattttgatttccaactagctgtggctagtgggaagtgtggtctggaacagtggtcacagatgccagtcctagaactagctgcctcagaatcactggggggcttgcaaagcacagacaggtggaggttctggctcccacccctaacccaggggacaggctccaggaatctttctaagaagcctcccagaaggttctgctgtgcattcaggcttgagaatgcctagcctagtggccagacagtacaaggacctggactgaccctaatttggctactggtataacccagggccaccaggtaaagccattcagctttaccagaagatcagaccagcagctggattggatgagcttgtgtaaaatatggaaaacacacatacctgcaaggacagggattgtgccaatgcacttcacactctacagcagtgtggctgcaagcacagtcatgctatccacaaggtaagagcttgcaccagcaggagtcagcactgtctccaaagcaccatgttaactccatggcatttttgtcccagcaagcttgcttaatcaaggcggcggggcaccagggctcatcttgaccaagcttctgagctcatgaccgttggtgggtggcactttgagtggccctgccatccagtgctctgaatctggscactaaaatgagatagaattggtcctggtctgaattctcagacactgaaggccagggaggatccttcagcctgccctcagaggaatccatcagggtgcagtgaagtgtcacatcaattcacaggtgtttttctctgcttagttataccaagtcaatcacccttatgttgcacgctctctctttctcatttactgatgctgaattcagctgatgctctccctggggtgctgagatggcaacaacgactgtggaccttgacaactcggtttattgaggccagggcttcygggaagtctccccagcctcagctgctgagtaacaaggagaaagcygaggccaggaakctctgggagtacaagaactccgtcatctctcaggtcagaaactctccaattccaggggttaactctgtaaccaagcactctttgggaacytttgcctgtggtctttgctgccctccctgccttgggttgggccactgtgggtcttccttcctggcaatggcggtccttcttgctttgattgattggccctactgttttgggtactttaccaaggtggatcaacagtgcatatgttctaatggaaagagatgcccccaggaaatggctctctgatgatgtctcacatttgtccatcctgggtctcaggaagctgccactttccatgtttccacatttaacacatccaagcagagaaccaaatccaggatcaccctgtcatccaggatgacaccgcatatgttacattaacagaaatacaattttagagttggaaggggcattaagaaactatcctctgtagcctcctcattgtacagatggggacagagatgatgtccagatatcttgcctaacgtcacacggctagtgaggaactgagcagagattagaatcccagtcctccacatagtgaggactttcccrctcagttactttgttacacaatatccatgtgaactattgtgggttaatttctgcaaatctgaagtcattgtaatgggtatctgatatcccaaattcttcttaagctgatttaaaaaaaaaaaagttatgctgattcagacataaagttaatcagtgtcgctcatctgcactctgataatgaacacaatgatgcrtggcaggtttttgcctctctggtttgtataacctgaagtggccctgggtccagcatggtcttatttgttgacacttcttcagctttatttctggcctctgtaccctctctatgtggaggaacagagctccctgaatgaatgtaggggtctgagtgatgcctgagcgattgagttcataccacatattttctccctggatttggcaaattcttctattctgtcagataaaagaattaggttatttcaacaagttggaaactcttgacatccttaaagatgtgttacttttctgtattcttgcctatagtcaaaatggaaaagcacagaaacatgaaaaagctgacaagctgtgttaatgttcttatgttgactgtacatttcaaaatgtaaaattgacaaggcgcagtggctcacacctataatcccagcactttgggaggccaaggcgggcagatcacaagatcaagagattgagaccatcctggctaacatggtgaaaccccgtttctactaaaaacacaaaaaattagcctggcatggtggcacgygcctgtaatcccagctactcgggaggctgaagcaggagaatcgcttgaacctgggaggcagaggttgcagtgagctgagatcgcgccactgcactccaacttgggtgacaaagcgagtctccgtctcaaaaaaaaaaaaaaaaagtaaaattaaccttatcccatattctaaaaaccgtcactgtgaagcaaagtcacataaccaagcagaagtggcatcctttattcctgttttctgttatgttgagtttacccatcagtgggtcctgcgtcctattcatgttactagcattgcttttttttttgacaaagtctcactctgttgcccaggctggagtgcaatggcgcaatctcagctcactgcaggctccacctcccaggttcaagagattctcctgcctcagcctcccaagtagctgggattacaggtatgcgccaccacacccggctaattttttgtatttttgtagaaatggggttttgccacattggccaggctggtctcgaactcttgacctcaagtaatccacccacctcggccttccaaagtgctaggattacaggtgtgagccactgtgcccagccactagcactgtttttctaagcacctactatgagaaccaacagtatccyagatatgtggaagaatagtcttaaacagtggaaacagtgttgactttgaattttaaaatatttgtgtagatgaaacatagcgattatktgagatagtagatayatttataaatatctttgcatcccattcattttcctttttttttgttttgataattcagtctttttgtggaaagcttaaaagaattttgaaataagtaaataattgaacctttactaataggtgaccacccatttcacagaggacttctcactgaattctgcaatttctcagctgatgggactcagcaatgccctctcggtaagtggcctgtcctcatttgctggtagcagaggagggagggagaggtgtggcaaggggccccacagggtcccaagagggacagagagcacccccactgtgtcaccgcctcagtgtggcttgattatcttaaggaaacatttttccatagtcacaacctagttttatgctggaatgttcttaaagattttctggtccaaacccccttctcccccaatattttacagatgaggacattgaggcccagggaagttagatgacatgtctggttgattagtgacaaatctaggaccagactcaggcctccctgtcttctggctctttgcacccccgctgtctgatttcatgaatgaattgtgatacctcctcggcatcattacatttgatattcatttaacctggatggatcaggatcgttctcaccaatgccaaaagtcagccttttcagtatggacttccttcttgctaagtgtgactaccatttttcttgccagggaaaggatttgtcaacaaatgttcttagctactggacaacaaaagcattcattaaagctattaacaaatgctttttaaaaatgaagtcctctccaagcttttaagatcagtgggggccaggcacagtggctcatgcctgtaatctcaacgctttggaagaccaagctgagaggatcacttgaggccaggagttcaagacctgcctgggccgcgtagaaaataaaataattaggccaggcatggtggctcacacctgtaatcccagcactttgggaggctgaggcaggcggatcacgaggtcaggagatcaagaccatcctggctaacacagtgaaaccccatctctactaaaaaatacaaaaaattagccaggcgtggtggcaggcaccagtagtcccagctactcaggaggctgaggcaggagaatggtgtgaacccaggtggcggagcatgcagtgagccaagatcacgccactgcacttcagcctgggcgacaaagcaagactccgcctcaaaaacaaagtaaaaaaataaaataattagcctggcatggtggcrtacagctgtagctgtagctactcgggaagctgaggcgagaggatcgcttgaacccatcctgggcaacagagcaggagactctgtctctaaaaataaaattaaaagggtaatttttaaaaagtaaaataaagataaaaaagaacaatggaagaaatttcaaatttgactacataaaacttgacattttcagtatgttaaaaaaatttataacatgtcagacagaaggttaatatccttgtaaagcactcttacatattaatatgaaaatacctaaccaaaaatggtcaaagcatatgaaaagataataactcatagaaaatgttatagaaatagccaatacatttgtggagaaaaaaaagtctgcctctctaattatcatgaaaggcaaatttaaaacaagatgcttttgtttttgtttttgtttttttttaaatacctgtcaaatttgctgagaatactttaacgtaactattcagggccaggcacagtggctcatgcctgtaattccagcactttgggaggccgaggcagcaggatcgattgagctcaggagtttgagaccagcctgggcaacataacaagacttcatctgtaaaaaatttaaaaattagccaagtgtggtggcatgcacctgtagttctagctactcaggaggctgaggcgggaggatcccttgagcccaggaatttgaggttgcagtgagctgtttggtgccactgtactctagcctgggtgacaaagcgagactctctctcaaaaaaataaaaataaaggcataattattccccatgctattgcaaagatggcagaatagacttttacacgccagtgataggtgtggttggtgtaaccttgccaggaagcacttcggctatcaggttgattgtgttatatcctctgatccaggagtgttcactgcagataatttataatcacagagactcggaaccccagtgtcctctgatgggggaattgtgaaatgacttatgtcatatcaataagaaaggaatgtgccaccacmattaacctcatgtcttgaagaatacttaatatcagaaactgtttatgatataatgttaagtaaaaacacatgacacaaggccaggcacagtggctcacgcctgtaatcccagcactgcgggaggtcaaggcagatagatcrcttgaggtcaggagttcaacaccaacctgctcaacatggtgaaaccctgtctctactaaaaatacaaaaaatcagccagggtgtggtggtgcacacctgtgcacctgtagtcccaggcactcaggaggctgaggcaggaggattgcttaaacctgtaggcagaggttgcagtgagctgagatcacaccactgcactccagcctgggcaacagagagagactctgtctcaaaaaaaaaagatacaaaagtgttcatatgagctgggtgcagtggttcacacatgtaatcctagcattttgggaggccagggcaggcagatggcttgagcccaggatttcgagaccagcctgagcaatatagtgagataccccatctctatttaaaaaaaaattaatttttaaaattaaaaaaaaggaagtgttcatatggcaagawtaccaatcctgaaaatgttacatgtgtaataagcatttatatacacatttttgcatttttggagacaaggataaaatatacctttttttctaggttgtataattatgagtagtttttcatttcctgtatattctgtgctgagtgtgtgttagytttttaatcagaaaaaataaagcaagacactgaaatgaaactgtaatgaatttctgtctttccattccggaatttgggaagtccttaataataacacacagagctaaacacaactatgtttgccggaattgaccaaaggtatttcagagaataggggtccctaagtagggtatagaggcccccctgccctaggtgtttcacagtttaacacctttgagcaggtctcagtgcatttctctgtggacctgcagcacagaggaaacctagcagagtgggtaagagtttgkctacagtgtgcctgggggcagattgccctcccttgctgatccttagctgcttcatctgtccaatggggtaagaataccaccctcaaagagtggtgaggactaaataagttaacatcatgtatttgttgttgctgctgctggagcttttttttttttttaaagatagggtctcactgttgcccaagcttcagtgcagtggtgcagtcatagctcactgcagccttgacctcctggtcttaagtgatcctcccacttcagcctcctaagtaactgggactataggtgtgtgcaactgtgcctggctaatttttttttattttttaatttttcatagagatgaggtctcactatagtgcccaggctggtctcaaattcttggcctcccaaagtagtgggagtataagtgtcagctaccacacctggcttgctgtagtttatctcagtgctatcattaagtaggggaagttcattgtcccaagcagaaatggatggcaaagggggtttcttcctaccagcttgtgtctctggacttcagatacattaatggtctttcttacccrtgcttatttttacacctcagtcttcttacttttttttcctcttccttagcaagcctctcagagcgtcattctccacagccccgagtttgaggatgctttgtgtgccctgatggtratggctgctccactggcccctcatgtaacctcagagatctgggcaggtacgtggcagagtccttttttgaccagttactactaactagaatttgtcgaagcctctttttgaacatcattcgggactcagatgtcctcagatayagggtccaacatttggcatctatactcagcaacctctctgtcctgtactctgaatggtagtacttcatccacatggtcacccctaccaaaaggaaagacacttccctgctttgaataatgtgcccagactaatgtgggtgttgatgttaccatcttaatcccttctcrtgactcagccccccagtatccacatattatgacctgcgtggtctttttaagataaaaactcatgtttaataccactgtacaggtggaaattaagttataggtctaaacttacactgtaattcagcactcttcaccaattattcctaatctaggcatcaaagcaggcctgactgcctgcttgaatttcagcccctagaaccctccacatcattgggactgttagcctggacaaaaccaggacttcacataatcatcgaactgggattaggccaagcatatagggaggggcaaagtgacatgtaattgagctcctgaaagatcatgcatgcatgggaaagtcttcagatgtttctagaaataggtcatctgaaatgcatgtgacttggcagtttcgttgacgtaaaagatttcttctaaaaaaaagatctctcctaattaaatttactgatgtggtgtcacagagaagaaatgcatgttgtttagttgagcaaaccacgagtctcagtgtaagcttgagtgataagaagaatttgaggattatttgaaattcccaccacccaagcaactttatgcctacaggaaataggtggaaattacagtaggatttatagttgacagagtattgcctgtgtctctcacaaagccttgtttattgccttctactttaaaacatagtactccttgttgatttgagggactcattgggaattgggccctaccatctccctcagagttgcttcttaattcctcaggaggagcagtggttcctttttctttttagctaagatgagacttatttttccagggtccccttttttacagtataagtgtctctgtcaaaaggaagtgtttttcattccttgaggaaaagcgaatctgttttatttcgctttcattgtaaacccatgagcttagtttggatttttatcctttttgatatctaaagccactttaaaattaaacttgttcagccaaatattgaagttcacgtagtgggaggatttgccagccagttttttgtttatgtaccatatctacagtttctgactttaagcatcaaccaaaaaagtggaaagggctttggaaatcaggaactaatcctaaaacctgggtaaggatttggatgggtctgactctgaagtttcctttggttcattctttgctgcttgcaagactgaatcaaggtccagtttactttagcaggaaagagatgtggtgtagctcccaacagattctgccctactttatatgctttaagacatcctgattgagtacaagtgtatttcattgtgtcttaagtcatcttctgggtctttccagttactcttttagttaccctttttaaaccaagcttttgcaactcctggccccctccaacaggtggcttagttggaagaagtcagagaggcctgggttgagtgtacccaagataagtctgaattctatattaattcctgtctttccattctggaattcgggaagtccttaataatagcatgcagagctaaacacaaccacatagcttaaatactagctaccagtcagtgtcagatgcctctttcataggggttgcaattttaagtgacaatgaggtagtgcaactgatttaaagtaggaggggaaagagagaggaggaggagaaggcaattataaggacttcatgagttgagcaagattttaaacgtaaagacraaggaggtgaggaaagatgggaaaaactgaaatgtgttttcagtggatctacaggggagacagtttttaagtttctcacattttgaatctttaagggagacaatttttgagtccgatttatgttagaaacctctttatacaattaaagaaatcataccattggataatcagaattgttttatcctttttgttctaaggaacctctcaaatgaacaattttgttcctatcaaaagttccccaaagggatcactgtcattccaaattgtctttggaaatttgtggcacttaaaaagatatgcacaggagttagggctgtaattagaaaacataaagaaagcctgtgcttgtggtggaggaggcagttttagattgaaaagaccaagacatgagccgcaacatatccatgggttgctgcttgtggaattttgcatcttggtgcttgatcaaagtcaagtcatcattgatcaggagccagacaaagcctcctgcttatcggtagacaaaactaacataaaagcagttctcaggaacacaagaacaagactgagggagaagtcattatgagattttgcaatggtgactcgggcacagcgtgtctccaagaagtaactgactgaccacttkaccacttcacccttagggctagctcaaggacaaatttatgggacctattcccatcctctcccagtggacaaacaacattcaagatagtacacaagcagatagatagggcattaggccagcagatgttagttactagaaaacattttcaccaaagaacaatagaattctgatcaaaaaaccaaatgtccaaartgggacctattcttaagaaaataagataaatgcaacagtaaaatcttcagtgaaatcctggagttcaattcagcatgaacgtagttcccagccaagggtgagtggcacctcatccaggtagagacacaagtgggtctcagatgcatgcactgtttctgagtcaaaggttccagtcaaaggtagtgagagtctcagttgaaattccatgaacctgcaattctatcagcatcctccagccagagaccaccaggaacacaccttcagataacaatttgggtttattaccgggggaaacactgggcatctcagagggtgctaggaaggacctgttatataatgaatttgggctttggtagaataatttggggaagggtctcaggaagtgaggatttgctctggattgagtgctgtcagtaagtggggacagttttgtgattgggtatcttaagaaatcttatcttgccgggcgcggtggctcacgcctgtaatcccaacactttgggaggccgaggcaggtggatcatgaggtcaagagatcgagaccatcctggccaacatggtgaaaccccgtctctactaaatatacaaaaaattagcctggcatggtggcgggcacctgtagtcccagctactcgagaggctgaggcaggagaatggcatgaacccaggaggtggagcttgcagtgagccgagatcacaccactgcactccagcctgggcgacagagcgagactccgtctcaaaaaaaaaaaaaagaaatcttatctytagggagrtacacctgagcaaggataaagttgtaattagtaaagaaatagcagtccctcatatctgcctagagaaggggatgtttgatattttgtgtgtttcacagtgaccttgtctttgtgctttgacaaaattatgacatggtcttgttttggtctccttttatgttttcagtgtgactgtctgatgttggtgttcagtgagatcatttgtgttgaacaggagaataatatggcctagctatgcacaactggtgaatttcttataacactgaggcctagctataattgtcagaccagttcccagatgataaggactgagaataaaaatcccctaaccatcaccctctagaaataaacagccaccatcagcatcttagcgcagatcattgcagtggatatggtggctgggtgcagtggctcacgcttgtaatcccagcrctttggaaggcccaggcaggaggatcacttgagcccaagagttcaagaccagcttgggcaacatagggagaccccatctctacaaaaaattttaaaattatctggatgtggtggcatgtgtctgtaggctcagctactcgggaggctgaggtgggaggatcacttgagcccaggagttcacggctgcagtgagccataatcatgccactgtactccagcctggctgacagagcaagagcctgtctcacaaaacatagaaaaagtaaaatgattgtgttcacttacctatgtgtattgtattttgtgtccacttgtctgtgttgtgttgtgttttgtcatgtctctttataaaatttaaataccctaaaatttacccattttaagtatatactcagtgttttaagtaaatttatatacttgtgcacccatcaccatgatcagttttagaactggatttccattactgaaaaaaggttccccacrccattagtcaatcccacacccactccaacccccagcatgactaatctttctgtctctgtagttttgccttttccagaaatgttatataaatgaaatcatacaatgtgtagtcatttctgttttatttcatttagcataatgcttttgagattaatccatgttctgtttatagtagttcattcccttttattgatgacttgttttattgttaagcgagaggtcatcttataacctgatttactcacttaaatattccatgaacatatatttatgggccattaaatacttttctacaacatcttttttttttttggagatggagtctcactctgttgcctaggctggaatgcagtagtacaatctccactcactgcaacttcccctcccaggttcaagagattctcctgcctcagcctcccaagtagctgggattacaggcacctgccaccacgcctggctaatttttgtatttttggtagagacagggtttcaccgtgttgccagtctggtctcaaaacttctgacctcaggggatctgcctgcctcggcctcccaaagtgctgggattgcagatgtgagtcaccgcgcccggcctacaacatcatttttaatggtcatacagttttccattgtttgaatttacgcactccctatcattgaacattcaaactgtttatagttatacattatttttttaaaagctaagtagccgccgggcacggtagctcacacctgtaatttcagcactttgggaggctgaggtgggctgatcacctgaggtcgggagttcgagaccagccgtcaggctctactaaaaatacaaaattagccgggcgtggtggcgcatgcctgtaatcccagctactcaggaggctgaggcaggagaatcgcttgaacccaggaggcagaggttgcggtgagctgagattgcgccattgcactccatcctgggcaatgagagcgaaactccatctccaaaaaaaaaaaaaaaatgctaaatagctaatgtttacrtgcaaaattatttcctaagaacacataactaactgtaattgcttggtcagaagagatacaaaagattaaggcttttgatgcacactctcaaatcaaattccagaaattctctgggtcttctgtgaatatgcctgaacagaaacatgagcagatattatgattccagatgttaaatatggacttttcaatccctttgtgataaacccattctgcaaactggagtagcccaacctgggcccatcccatgtctttgaaatcctgagtgattgctcacacctttgcagctgtgaggatgggtaacaggggcccatacacctgggcccagagcgaggagatatgtcttagaggagctcaagcagcaggctgtggtggtggtgtcagcatcagagccctagtgcatcctgtctggacagacttcagagagtcagtcaaaacacgacttcagagagtcagtcagaacacagagcaacagtttgaccatctttgctttacactgggcttaggtcggtttctcaggttagcaaaaaattaaattctcagtatttccagtttaacaatatgatatttaagaatatgatatttggagttttttgtttgtttgcttgtttgtttttgtttttttaacatataaacttttaaaataaccacattaggctgggcgctgtggctcacgcctgtaatcccagcactatgggaggccgaggcgggcrgatcatgaggtcaaagatcaagaccatcttggccaacatggtgaaaccccatctctattaaaaatacaaaaattagctgggcatggtggcatgtgcctgtgaagtcacatactcaggaggctgaggcaggagagttgcttgaacccgggagctagaggtagcagtgagccaagatcgcaccactacgctcccacctggtgacagagcaagactccgtctcaaaaaaaaaactgcattaattgtccatgtgtgccatgacttagtgtgtctaacatttcactcccataaacaatccaccatggacaattctgtgcataaatcttgttctcacttcatattatttccttgaagtggaaaagatatgaatctatttaagactcttgatatatattaacaaattattttcctaagaagttattccatcttccactctaggatctgtttttgaattgtacattgtgcttcartgatttaactattgcatttttacagacagttttaacacctggcagactagcctttcttcatttcttttcttataattattttacctcttctcacctgtttatttttctcagcaaaactctgcataatttgttaagtttccccaaaatcaccatgacatttcaattgaaatgtggttaaacttagaattaattcaggaaggtttcacatctttacctcatccaaactttcatcctagctcatggtctgtctcaagtattttcttttcttttgtgttcttgtagaatagaatctctttctgctatattttctgactgataatggctggcatatttttcttctgtaaaaccacattgacaccaacatttgttttatttcagttaagatttattgtgagttgatagtcttcttaatgttgtcaaataaaggttaataccatggaaatctgatcagttaagaaaaatatatgtagactgataaaaaactataagaaagaattaatctattaatctaatagattaatccaagtaacwtgaatcctctggaatatatgaggaaaataactcattattttcttagtataattgattttttaaatcttttaaatttttttaaatttatttttattttttgaggcagggtctcactctgttgtccaggctggagtacagaggcacaatctgggcttattgcagccttgacctcctgggctcaagcagacytygtgcctcagcctcccaagtagctgggactgtaagcacatgcccctacgcccggctaatttttgtattttttytttttatagagatggtgtctcactgtgttgcccaggctagtcctgagctcctgggctcaagcagtcctccctccttggcctcccaaagtgctgggattataggcatgagccactgcacccagcctactgtccttttaaaaagatgtaattgagaaaaattgcatatatttatggtgtacaatgtgttgttttgatatatgtacacattgtggaatgattaaaccaaggtaattagcatatccatcacctcacacatatcatttgttgtgatgggaatgttaaaaatctactctcttagcaattttctactaaataatgcattgctattaactgtagtcaccaggatgcacagtagatctccagaacttattccaatggcatataattttttaaatttttatttgcatatttgttktctatcctaattccctactgatcttactttaacaggtaaaatcctcttagattttctaggattctatgatcagcraataaggatgttttcttcttctaatagttatgccatggtgtctgattattttctttattatactttttagaaaaccctatgcagtgttaaagaatgctggctacaggcagtcaggtcttatttccagatataaatgcaacaaacgcttccctggttagatgtgatgttggctgttggtttgggatggatagtctctgtcatgttaaggaagcagccttctggttttgtttatcagcactcatattaggaatgggagttatattttacttaatgcctattgtccagttgttgaggtgatgtattatttgcttttaattttcycttttgccctttagatatgatttatgttcagttaattgattgcctaatattgagatatcctcagataaattcatattgaccatgtcatggtagacttaatataccattaaattctgtttgggaaaaaaaatctatttgcaaaaaaatctatttgctggggttatatagaattttgcagttattttactaagactagctttttctcaatatgcattgttaggttagtgaaagagggtttcactgacttcacagagggaatgagttgcctctgtctttttttattttttttgagacagagtcacactgtgtcgcccaggctggagtgcggtggtgccacctcagctcactgcaacttccgcctcccgggttcaagcagttcttgtgccttagcctcctgagcagctgggattacaggcacgtgccaccatgcccggctaatttttgtgtttttagtagagacgaggttttgccatgttggccaggctggtctcaaactcctgacttcaggtggtccgcccacctcagcctcccaaagtgctgggattacaggtgtgaaccacagcgcccggccacctctttttactgtgttacagcagacttcaggacaagatcttaacttgttccttgctgaatagacagacacccttaagggagggaggtattaggccctgacaagctgcagccatattatattatattttgcagacttttattatcttcttaagcaggaaacatggctctttcatttagctttggtggtcacattaagtctttttttttttttttttttttttttttgagatggagtcttgctctgtcgcccaggctggagtgcagtggcgcgatctcggctcactgcaagctccgcctcccgggttcacaccatttgcctgcatcagcctcctgagtagctgggactacaggcccccgccaccatacccagctaattttttgtatttttagtagagacggggtttcaccatgttggtcaggatggtctcgatctgacttcgtgatccgcccgcctcggcctaccaaattgctgggattacaggcgtgagccactgcgccggccccacattaagtcttttaagtagcctgctgttaattctgtcgtagtcttttctataaaacaatactgatccaatttgtgataaactcacccactctcatcgcagaatatatatttckcccgttcatcttccttctttggcccactttatctgtctacctccttcattttgtttctcccaggaaggactgatgtaaatgggattttcagaaactccctccagcatgcccctctctgcatctggaatacaggggtcagaggatctactctgtctagggtccttcctctccctggcaggtcttatggtagtgtacactgtggtttgcctctatcagtctgtccttcatttctgtgaccagatctccaacaggacatgttctaaagaagtgtggtagaaactagcccatttcaaactttgcaccgtgatttttctacacgtcaccccactggggcttttgtgatcagttttataataaagagtggatctagattgaaccttagttttgctacagtgtttcattcagtcattccataaacatttattgagcgtgtactatgtgtcaggcagtgttctaggcatttgtaggaaagcgggagagagcagttggagcagtggacattgtgttcatttcagttgcagtcctccctgaagttttacagatctatagcaactcattttttttcagttcaaagaagcagtgggaaacctatgtctcctgctctcccccatgagatgtgtattgttttttcctgaatgagcagctggggacatagcccaggcaagtgaggagtcgtatgtaccaggaatgtccccctaggtcattactcatgggtattaggtgcccccaggagagaatggggaaatgatgcctcctgcctctcccagcatctgaggagggttaatgtaacagagtgttgaaagtcctttgcagacagaagcactatattgtgatagggccttaatattgtcttctcagactgtcaagtcattcctgtcccaaggatctgggacagcttttatgcatatttcattttttctaaaacacttacctttcatataccttcagttttattcctgcatcttagaaagataactccagaatgactaaagaaaacatggtccaccaaggtggcatgtcagaaatgaccattcctagagttcccctgagaggctgattttcaaagaagttctccccaaagagcaacagaattgagatctatatcttaagggagatgtgaagtcctcttggcataatggccattattgccctggataaaaagcaaacattttagagacgccgaaagtacttagaacctaacagtcctctatcaattgcttaaagagtaaacagagaccttttataagaaacagacccagcgtcttggcagtttgcaaacaggatgaggaaatctttttttccttcctgaagcttcggatctgagaagctaaagacaccacatctgaattcacaaagtttcttttgtttaccataatattgtcctatctagatgagggtggtagctgcttgcctagggaaattttgagtatttggagccactgacactgtttctagacaaaagactcaagggttcctttgctggtcaacagtaaaagagcagaaaatcatctaacaggcacactggctcactcttgtaatcccagcactttgggaggccgaggcagacagatcacctgaggtcaggagaccaacctggccaacatggtaaaactctgtctctactaaaaaaatacaaaaacttagccaggcgtggtggcacatgcctataatcccagctactcaggatgggctggggcagaagaatcgcttgaacctgggaggtggaggttgcagtgagctgagattgtgccactgcactcctgcctgggcgacagagtgagaatctgtctcaattaaaaaaaaaaaaaaagaaaagaaaagaaagaaagaaagaaaatcaccaaacagcgagctccttggtggtgctcgtgttggagacgtaatttcaccatcctgaaaaatgacccaacaggcaacagcttggatggatcttaggggaatatgctgattgaaagaagctaatcactaaagcaatctaccatattattccatttatataacagtcctgagataacacaattgtagagatggagaacatattcatggttgccatgggttaggagttgtgggtggtggccataaaagagtggcgctagggagccttgtgatgatggaactcttctggctcttggctgtgttaactgatggtggttacatgaaactacacatggttatgctaagttacacacacacacacacacacmcmcacacmcacatacacacacattagttattaaactgatggaatccaaataagctctgtggattgcattcatgtcaacttcctggttttgatattgtgatataatcatgccagctgtgaccattggaggaggctgggtgaagggtgcacaggacctcacataggacctcctgaacatttctttgtaacttcctgtgaatctataattattgcagaataaaggattttttwaattgcctttctaaactcataagtcttgagtgttgagattctaattctggaaaataatatagactatgagaggaaggaagggaggaaggaatttatttccaattgaaagttttattttttatttttatttgtttattttttgagacagggtctcactctgttgcccaggctgagtgcagtggcatgatcacagctcactgcaacctcaacctctcaggctcaggtgatcctcccgcctcagcctcctgaggagctgggacgtaggcatgcaccaccacatctggctaattttttatttttttgtagagactagggcctaggctagtcttgaactcctgggcttaagtgatacctccacctcagcctctcaaagtgctaggattataggcgtgagccaccacacctggtctgaagaaggttttaacacctacacatacacacacacctaaccagatccaaccattcatcttactactgtctgaggcaggcattcctcctgctgtgtgtggcagagtacgtggaatgtgcctgcaggagcactcggagccctggctggcctgtcctcagggcactgctcctggggagtgaactcacttctgtatgtgcccagcttcgggagaaaagtgcctacaaccatctgcagaaaatctgtccagtttccagtgtgcctctctgggcttcttgaagcaaagcgaaacctaatttttaaattgaaaagcatgtctatacgtgttttgtaaagcattcaacgttacaagagagtgtgtcctaagctgtcactcagttgcttcccagagaacctttgtcaccaatgctatgtttaatctgacagaagcatgtgrtggatggatgtgacatgtctacctttatagagatgttaacatcctatacaaacattttttgctcttactgttctttagagtagttctgtatcaacactattccattctttttttaacagagatagggtgtcctaaccagtgaatgtagtgatgggcatttgggtgatggtccttcttttgctctgtgtgtgtgtgtgtgtrtgtgtgtgtgtgtctttgtctttgtgtgcctctttgagattagtcccttgtccaaaatatgttatttaaaataagtaagatctccttaacatttctgtttctctggccatttttatagttctgtgtgacttttccttctcratatttgcctctggtgtgtgactcgtgatctccaagtaatccatcagcaccttaattttgagagcacagtgagagagcctttacgtcccttagggattctgaaggaattctccctcttgaggtctcagtccacaaatctatttttcttcataaaataatttgggatgactttctttgtagctttttataaaaagtggttgtgaaatgtagctattgtgttttgctgtctttacactgtactcattaacttcaacaaaattataaacgtaaaaatcatgtaaaagtatgtgtgataattacaggggagaataagatacccactgatgctctgatagttttttatacatgaatgtgtgtgctgtgtagatgttgctgtttcaaaatactgtcaatgaaattatttctctgtgtaaaggataaagcaaagtggcctccttcctattcacttccttggaattgccaaggctacatgaggcatagcagggatcggacgccgcagagtccctgactcttcccccctggtgtgtctatgagtgcaggggtgaggagatgaggtggaggcaggcctgaagatggccaccaggagaggactgccatccacagaagccatgatcactctggggtgccatggtgacatggtgacctcaccacctctcagtgggaagaggaggcttgtttcggttattctgcaggaaagtctgcaatagtagctctctcagaggaggggaaggaagggggtgggctgtgggccatagccgaccttgtcaggtaggcttgtgtgccagggccttgccacttcccagcctgtgtttagactgtgtgtcctgaaggccagctctccacctgacctctccccttggcattaccacataaaggaatcattgtattttccacgcaagtgttaggtattcttacttccctaaaatgagcaaggaggcgaaaacgctacataaaaaccagggtcctgagtttctgttcctcactgctgaacaggatggccccactcccatctatatggaaatgytggcaggggcccaggctactataaataagcatcctgactgctccaggaaggctgggcttcctcattttttttaaagtggaatttgtaacagcttctgcccagaacatttgtgtccaaggtcctttcatctcccaggcatcctgtacaactgccatacggaggttttggaaatcttcccgctgcagctgggtcacaggacaagccacacaggaccagctcactaaaagaagtgatgatctctcttctgtgacctccgtctcatattcagatgtgagttttaataggattccatctgaggaacaagcaggaatcttctttctccttctgccaaaaggcacatctgttagacacagaataggttcattagcaagcgcaaaagccccgggccacaggaaccatctgggcagcaggaatctgtctttcataccacatgatcctcagctcctaaggagtcttcacttccctcaggctgactggcaacacagggttacagcaagagtgccaggtagtaaaacatggaaagctacaacaaataaggctatggcactggcacaagaaccaagacaggtcaacagaacagaatggactgatggacagtgcaagtcagagcggtcggtggaactctcagttccagtccacaacaagataaggagcttgtgctagctcctaagtcagctgtgtcaccgaggacaccgctgagttaggctaccattttttttccctctcaatgaaggaggtgatgtgttgatttacattctggcccaagttatttaccttatggcaaacaggcactttgagtagctcagaagtgaacagtttttgaaacagtccctggtataatacttgaaagaaaaatcacaaaccaatagggaagggaagatatattcaacaaattgggtttggaaagttgaccatgttatttttttttaaataatgttttttcacagtaaacacaaaagaaattactaatagatttgaaagttaaatggagaagaaaatgaaatcatgaaaagaacctaaaagaaaaatcttaaactgatctcacaggacgaaaaaatgttaaatattttttcaaattaaaaaagtaataaaatatcccttgtagaaaatctgtaacatagtctttaaaaaagaaagagaaggctgggcacagtggcttatgcctgtaatcccagcactttgggaggctgaggcaggcggatcgcttgaggccaggagtttgagaccagcctggccaacatggtaaaaccctgtctctactaaaaatacaaaaattagccaggcgtggtggtgcacacctatagtctcagctactcaggaggctgaggcacaagaatcgcttgaacctgggaggcagaggttgcagtgagccaagatcttaccactgcactccagcctggatgacagagtgagactctgtctcaaaaaaagaaacaaagagaaattacccatacttctactccccagagatactactttgatttatttactaccaatgttattactattttattgcaactgatattattactatttccttccaatctgttcatataaaatttttattaaactagggtcctattatatatataattgtgtgtcattctttgccatgaaattaaatatcattttaaaacatgggaaaaaagaacatacaaaactgtatttacagcatgatcttgtggtggtggtggtggtgttttgtagagttgctttatatatacaaatagttattaaatacattaaattactatattttaaaataagtttaaaatgctatctggggttgggtgcggtggctcacgcctgtaatcccagtgcttcgggtgcatcacctgagatcaggagttcgagaccaacctggccaacatgatgaaaccccatctctactaaaaatacaaaaaattagccaggcatggtggcaggcgcctgtaaccccagctactcaggaggctgaggcaggagaatcgcttgaacctgggaggcagaggttgcagtgagccaagatcgcgccactgcactccagcctggatgacagagtgagactctgtctcaaaaaaaaaagttaaaaatgctatctggctgaacgtgacttttatttttatattttgggcctttccaaattttctgcaaggagtgtgtacactacatttgtcatcaaggaagataaaacaaaaagttgtcattcacaacccagtgttattggggctggttttggtggaattgactccctctgtcacaaactcagcttcagcccataccstgagccatagacctatccctctaatgcattgtactagtctcagggctaataacaagggagaggtgtcaaagggccagttccacctccaccaccagtggaaaagctattcccaggtgaggactgcagctgccagggcactgctccagaatgggcatgctggccatattcacttgcccacttctgcccagggatctatttttctgtggtgtgtattccctgtgcctttgggggcatctcttatactcatgaaatcaacagaggcttgcatgtatctatctgtctrtctrtctatctatctatctatctatctatctatctatctatctatctatctatgagacagggtcttgctctgtcacccagattggactgcagtgggggaatcatagctcactacagcctcaaactcctgggctcaagcagtcctcctgcctcagcctcccaagtacctgggattataggcatgagccaccatgtccggctaatttttttttttaagagatggggtctcgctgtgttccccagccttgtcttaaactcctggcctcaagtgatcctcccatctcagccttccaaagtgctgagattacagcagaggcttttaagtcaaagctttccctgctaggacaagccctagttaaagtcctggagcactggccactgcagctgcacttggacagctggccctctgctacccttagtgccacctcttcttgggggctgcggcacgaagcactctgggaaacggggcttgagagggtttcattcctcagtgtttcctcgtgtttggcccaccctgagccaaggaaagctccttccattccactaaacggagggctcctctcccgagaggaagtttgcaggaaggttaggatccccctgcacgtggtgaggagtgtcctgccgttcactgcatcctggctccagtaattgtgagtaaaagaacaggttgggaggcattctcagaccatagaatgcataggcaagataggtagcgaatgctgctcagtactttggaatcagctctcagggtagcacaaaggcattccttcaccagcagaacttcagagagatgacccattcaaatcagcagccttgtttttccaaatgcacactttagaatggcttatccatccatctttacagctctgcgtgccatttgtgaaaaacaaaagctacccaacaacctgggattataaaccaggccaaagtggtgagcacccagcagccatggtctggcttcccaccggctcctcacacagctccaagccaggctgtgttgggatggaagctttggtcctgctctcataagcctccctgttcttagagtgaccccayrcttctgtgcctcggcattgcaggcctggcgctggtgccgaggaagctctgtgcccactacacttgggatgccagtgtgctgctccaggcatggcctgctgtggacccggakttcctgcagcagcctgaggttgtccagatggcagttctggtaagtatctcccctcaaccccagaacccagcagtccctgccctgctggtggcccctaaatactgtggtggttttgagaggtctattagcaggcctttctagctcactcagctcagccctcagccacaccttgtgaccggaaggcacaaaggcctgtctttcctttgccagtaccctcagttttgtaggtcaccacacaccagaagcatgtgagcataaaactctcatggccctcaagtgcttggaaaggggagtaataaacctggcccgccttacaggttctcgttatcttcctttccaactgtggaccgtgtttcagtcactctcaatttcactcgtatgctcctggggacttttgggggctggggaagggtgacagtgaggtgggtggctatggagtaatacctgtaaaacatatttcagaaaggctccataatttttacttgaaaattaggtgattttaaatacataagaggagtttatcgtttaaaccctttctaagagcaagtaacccccttatagtttatcctatatgtgatttttctacatttgtttaatttgttaaatgagacacatttatggtgaatatctcttaaatatgctgatgtgtctgaagaaaaaaagaggacagggagtagacttggaaccacatgtctccccggaaccacacatggggccaggtaattcacattcaaaattgtcatttcactcttatcaccctataacgtgggcgttgccattctcattttttcagttgaggagactcagcctcagtgaagttggtccaccttgcccaggtttattcacaaatgcttagcaagtctgactctacatcaggcatagtgctctggggatacaaaatcaagataggacagacaggttccctgccctcatggagcttaaagcatagtggaagagatagggaagaataaaaaggaaagagtaagataaataaaatggctgcaaattgtgaaaagtgccctgaacaaacccacctaggggctgagggagggcataaccccacagaggttggccagccaggccctggcccctctgcacctgtgcagacccaaggcccagcaggaagctggaggtttggaaagacaatattttgcccaggagaccgggctccttcacagcccctttgtctctgcaccaactcccctggcactgtgttctctgccaccccaccccaagggaagaggatgtgagggtgccctggcaggcttcttccaaaaatcttcaaaaccaaaaccaaccatccttgtggcatggaggaaatttcttttctttctttattgttattattattaaaaccatccttgtggcatggaggaaatttctttttttatgattattattattatttaatagagacaaggcctcactctgttgcctgggctggtctcaagctcctgggctcaagcagtcctcttgcctcagcctcccaaattgctgggattacagacatgagccaccacacccaacccagaattttttttttttatttttttatttttttttttggtgagacagagtctctctcactctgttgtccaggctggagtgcagtggcacaatcttggctcactacaacctccacttacagcaattctcctgcctcagcctcccaagtagctgagattacaggcatgtgctaccatgcccagctaatttttgtatttttagtagagatggagtttcaccatgttggccaggctggtttcaaactcctgacctcaagtgatctgcccacctcagcctcccaaagtgctgggattacaggcaggagccaccgcacccagccccagcccagaaatttatttaatttgagtaatgtttatgagaaataaatagctcatgcatccctgagaacttgtcctcagcccggttgagaaatgctaacttaagaaaaagagagggctttagtctatgaaaatatctatcttaaattaccactgcagaaaagaaattgagttttgatcgttggtaaaaataattttagataatcattgaaatgcaaacctaaaatgaaaagcatgtgtaagactccctgcaggtacacccagcttgagaacccaggctgggtcagcaccgtgccagcagcaaggacttctgtgaaggcctgggttctcgctccatgtgatctcactttgtgtcctggccagaaacaggctgcaagcgcagttcgatgtcattcagttcaattgtgcccatgttctttgtgcctrtgacatgctgggctctgcccacaccagggatacagagacaagagctaccgccttgtcaccttggaacaaaggtctgggggcacatgagctgtcacacacagtttatgtaagggctcggaagtcaggccatcctgggtataagtctcagttttacaacatatttaacacctctaagcctcagtttcctgagttataaaatggaggcacacacagtgcctgccttatccggctattgagagaattaggtaggataatgccaggaagtgcttagcctgcttctggatgcactaatgacaaaatcctcttaatacagagtgagcgccgacccagggccacgctctgccctagaacttcccaggtgtgagcttatttactaagcacagtggccctgtgaggcaggcttgttgttatccccattcacagacaggcagatgtgtgactaaccctatcttacaggcaaggaaatggtggcaggatggagctaaataactcactgaaggtcacacagctagtccagaatctactctgaatggtgactgctgctagcatcagcgttgccacttctggcagttggagaatcagaaaatacgttatgaggaaaaggacaggcagctttggctttgaaagaggagcagcctctccccagtggagagaagggtgtcgcaataccaggaacaaacataggggggcaggcccacagagacccgggctgagccagggaggtactggagcagagggcatagggcagtgctggagacaaagctaaaggtagggagtgtcccctcctcagaggccagacacccctcagaggacagggggctaccagggtgtgtgagcaggagagagaggggctgtgtcaggtcatcccgtctctwccactgcctggggtggagcctaggtggacaagtgacttcacttcatgtgcctcagcttccctatctgtaaaatgggatgggatattcatgcatcgactcacaggttcatacaagtgaattgcatagttcaatgcttggcacagagtgagagctcagcaaatggaagcttgtactgttattagccatcgcaaggctaccctcatgatggggacaggtgatggattcgagtgggaggaacacctgtggcctgggccctgtccggcaggtgtcagaaaagtccaggagagtcatgcttaggccttctccaaagatggaggtgcaagagccccacagcatagcagcctctttttgaagtgatgtcaatgtgcttcttcctctttgggcccttgaagctcaggctcagtgttgagtcccaacctgacttctctgcccatctcattggcgctttatgccagagacagggggagcatgattggcacctactcaccctgaagggactgccttggtaaggcaactcaggggaggcctggggagccagaaccgtgtgagggtgcccraggcagcaagggaaagactcagagcacgatggccacattcagagatcacatgccctgcccccaaagccccagctgtggacaagaatgactcaggtcccttggacaggctgtcaccagtgatgacttaggaccagcctgcccggctccagcaaagcacaggaagctcgaaggtttagaaatgggtcattgttgtgctgaggccatgcgtcaaagaggacatcccacagccagctccttctatcctggccagcactcttgacaaaggcagagggagtgcagcttagtgagctggtccctttacacaggttattcactccagaatctggagaattctgtccttaaggaaaaaaaaaaaaaaaactaagctcaagatcccacagcttgtaagaccaggcctaagagtcaaacctgaatctccccacatgagagcaccatgctccccctcacccagcaccccctctgtaggtggtggcccagaggagatgttgccctgggctgctcttccataggaggaaagacatgattcactaataactgcatgtcctgagaattccctgttggggaccccaggacttcactaggggcatggctcttgggtgacagttgggaggtctcttccagggtctcagtccagccaagcatgtggccttgcaagaaggcagcttctaatggctcagaaacaccagggcaggggggccacagtccttcacaccacacacttagttccccagcttcagaacgctttaaaacgctgcagcatggagcctcacgctttcaaaacagtatttcataatatgccaggactttgtgttttattcgtcctctccctgtgacctaggctaatgcagacaataaaaatgccaccaagttctgcraaactgaaaaaatgaagtgggtgattaggggacatttgataatgtgctttggttgaaacttgagaaattattcctagtaacttttcctaagactgtgactatattttccaagtgaaaaataagagctagtgaaagtaatgtgtgtgtagatttcggarcaatgggattgaggatttggaagcatgacttcagaaactgagccacgtggtcaccttccctcattgaatcaatattcggtgaatacccacctgtgtctggaactgtactgacccatgttaagcgagaaagagtgattaatgtgacaagatgtggctccaatttctaagtcctcacactagagcgcccccttctggagccagtcagcagagagagaagtttgactgtgtcccccttgaaaccgtcaactgtttggtccacttgagacctaggtaaaatctgaggggacagctcactctaacctggatctgaacttaaacttgagccccgatgacagaataatccctttctgcctggaaatggcccaagccatctcatgctgaggctttttgacataatctctaccacagctgtgtatgggagcagtgctcagaaaatgcaaggcggtcctcactccacgtacgggcactcacatgcagtctcagtgtcggtctctttctgcaggtctaggcattaatcctattcagctggttgcattttacccttatgggaagcagagtgctgacttcctcctttctccacctctattcctttcccctaaacaaatgcagccatgccctttacaggcaggaggtttggtattgggccgcctgccactctgaggatgttcctcattgtttatcttggcttttctccttctcagatcaacaataaagcttgtggcaaaattcctgtgccccaacaagttgcccgggaccaggacaaagtccacraatttgttcttcaaagcgagctgggtgtcaggcttttgcaaggacgaagcatcaagaagtccttcctttccccgagaactgccctcatcaacttcctggtgcaagattgacagccaggaggctgcagctaccacgagggcctctgaggaacctccttccaggcctgggatgagggggcgatgtctgctggcccaggggaagggaaaagacaaatgtcttgactgttgacctcggtcctgtggcagactgcagtcaacagtgtgcctctgtagtgtggcctggtgctggggtgaaggtgagctgggcaaaggagaaatatgagctactgaggagggggttggacatcctgcccctcaccccccacccacactgcaggtagaggaggccatctgatcccatgggaagccatcagagacactgctggtgggagcaggaaggagcagtgcccctcgagcagccaggaagcctgcggatctgggaaatggctctgccttaggcrcttctcgggaatttgaggccagcctgaggaactgcaggactcaggtgcaatgtgccagccacttggaactgctaactgagcctccagatggtagtgaatggtctctttgccttcaggctggatgaggaagtcatttaggaaatgttcaaataaccaatatgtggaaatggacacagggatcttctgaagttgctttgaatcaaaaggcaggcagtgctggttcctctgcctgtgtccccaccactccccagctctgtcatgcaggcctgtcctccccaaccccagctggaygtgcctcccaggcctgctgtggttctgacacacaggatcccaggcaaggcaccacttcctcacatgaatgaggagcagcaagtcataaccactcccttgggtatacaatttgctgtgtagtgaagtggaaccaggctcaggctgctggtcccaacctcagagccccaccgcagcccagtagggatgcagcacgccccagagggctcatgtgggccccagatggcaatgccaccattgttgatgtgactccagagccagttattaggaagagcaagctcaccacagaggagtggaactgaggccccccagatgttgcctccggtgtccaagccacagcggtctggctgttgggaagatggccaggaatggactcataccattggcacattaggctaatcctggttttatgtgaagtcagcaattaagtgttcccactagaactgacctaagccactgattaatatttaatgagggaaggtaggggagaatctagccattttataatgccagaaatctatatatgttatctgatgccatttttctgaagtagcctcacatgtggtccccctgcagttcagcagttaacagatgacttttttagtgtaataaaatgtttatcatctatgacttcaggacatatgtgtgatcctggaatacaccatattccaatttcagagttaattacaaacagattgaggtattccatcatcatcggaagcattggctgtgtgtctgactccacatggaatgctataaagtgggatacatgtggttcttcttgttccagaacttacagtccatggtagacaacactgatacaggcaaactagcaacagcaattaagtcactggttctcagacttaatactctgcctggtcctcatgcccagatattccaatttaattggtccatggtgtggcttgaacaccaggaatctttaaaactccacaagtgattctaatgggcagcaaagtttgagaatcactggacacattgatgcacttgagccatcatttctatctagttcttcctcttcctaatcttcaggttagcggggataagtttggtccaggaccaagagttggaccaaaagggaagacaggggccagaagtctagagtgctagagccgacttgaatgtactcagtctcattgcacatggcagtgaatatggattaaatataagcccatgaaaatatttggtacaaggaaggagtgagtgattttgattatcttgttatttcctagtaagctaagtggtcttgaacaagatgagggaagggagccctttatttgcatgtgatctgaccagagcaatgggccagtaaagcctcaaggctgctagactgaccagctggctgacaccagcatggctctgaagaaattgctccaagaggataaagcttttgcaaacaagagctcatcagtacatactaagagacagtatgggtaatggaacaactggacagaaaactctgacccctgggagtgaggtggtggggaataatctcagccatttattgactgtcttgttgaggtcagaaactggactcagcaggttcacaataattatcttatttaattcccacaaaaactctagagggaaggaattattctctcataaaagaagaaacccaggctctgaggttcaataattgtctcagttttcacagctaataagtaggagaactgggatccaagcccacatcttctgtcctccacgtttgcctccccgccatgtctaccagtcccctcacctaattgtccatgttgcttggtgtacacagtcaggtgagatggctcccaaaaccactggcattttgagcagagtgtggctggggtttccctcctggaaagcctgtaaacctgggaaatcacagaggtggtgtcctctctgcaggggcagtggtgggtgagaggccaagagcatgtggttagttccagagagctgggaaaggtcatccagcaagtggaagacgtagactcgtgggcgggtatcagggttatttctattggggcaataagagaacagagtttgtgcccagggaaagtggtgctccatggcaaatgctaccacaataggagccagctgtctgcctaagaaaattgatctctaagaccctaaaacaattagtaagctgggaaacagcacaggcatatttcatcccagcctaaatgcacaccttcaggggattggctaagaaaagcagggtacatccagtcaatggaaggcgaggcagccagcaacagatggtttttcaaaaacatgtagcttggaaattttctcatgaatgaaggaagatacatgcacaatgcaatcctgaccattttttttcaacgcttacaaagaaaattgagagcaggaaatttgcttgcatatcataggctgagactcctacaagtcatttttttccttctgtctacttttttgcattttctcatttttattggccatgaagtatttcagtaatacttcatgaggcaaaacatcaaaatgtacaattttgtgaagctctaaatgagctaaaaacctgtttcccttgatttttcttttcttctcccaggcaggatatctagctgcctgtgaggatgtatcctagctaggaaaacatgctcctttccttgtatgaagtggaatccaaagaaacaaaaagcagcccccatgaagttcctgctcacggagttgctcagtctgggcaggtgtggggagctccctttcttgtatctcagtcttaggctcttgcaaccttgcaacagaagaacggaaggcaacgttcccctaatggaactctcctgctcacttgctgtcagattcaaggttgtggataagaccgaaaaaggaggcattatcacctccttttgcagataacgaaacttgagaccatgacagtaagtgatgatgtatcttgacccccaatctgtgctcattccacttagagcaccccctccccgtactaccatcaggcaaagtgtagtgcaggaggtaaactttctttctttcttttttttttttttttttttttgagacagcgtctcacttcatcacccaggctggagtgcagcggtgcagtctaagctcactgcaacctctgcctctggggttcaagtgattctcgtgccttagccacctgagtagttgggattacaggcatggaccaccacacccagctaatttaggaggtaaactttcttaactggcgggcccagctggactgtataagtcaaggaaaggcagaggggtagataaaaaggagagttttccctcgtctttcttcctgtgagaagagcaagcagaaaacagctgtttcgtgggctgggtccctgcctgacactcagagcgtgggtggctaaaggctctcatccaagctgatgagcttggagaaaggaatctagggtgaccaacaacgagcaagtagggaaatcccccgagggcgggtgggtggttggtgatggtgctggtagggaggggagagcctggagcagccagggaaaggccagtcctgtaggcagaggcctcagatccaagggtgggcccartgacctcactccaggcctccagtgccctccctcagcctgtccacatgaggggctggaggcagctgtgcagagataatgaggccctggaggggaggtggtgaccaggactgctggaacccaatgccccatgactcatctccctgtgccttaagccctgaacttgaatttcagttcttattcagcctctggaagagcacacctaagacagacaccctgtatacaggggccatgggctgcaatctcccgacattacaacaataatatctatcatttctgaggactaattatgggccaggccctgttctaagtgctttgccacataaggagccttgcccaagaccacacacaagaaggtggcagagccgtgatcccactctgctccacctcgctggttcccaaagacctttatgcaaaccagcccttgaacctcctgaattttcccagatggtccttatttatagctttctctccagttgttccccaaatgccctagagcctgccaaaaccacacttcctcatgtgtatctgtgaacgttggctcgctgtgggcacacacctggttgaatgcatccctgaagttctgaggcacccaattcagcatgtggggtcggctctctctcagcctgggactgacggctcccagggagccatcacccctggcagacagagcctcctttggacaccatccctgggacctagaagccaggaagccatccttgctcaactccacctactgtgaggaaaatcccatggcagaggggagaggggagacctgttctagacctccccgatgataagcactccttggcatctcagcagccccatctgtgtcttccgcagatcatcttttccacaaacaatagaagagccccatctgggattaattgaggagggttcagccctggtcccatccaagggaggcctcacctaccacatctgctgctgcatactcatggctgccttcagaactcagaggagaactagatcttaggggaggggttccccttcctcaggcactgtcgcgggggtgtagaaaggaataatgtgtcctttacactgtgagatccatagaggaagcaggcacccaaagattgatgccattcattgggtctggtttgtcaatcatcaaggccagactgggccagaggggctttgtcaggtggactcagagagagactcacttgtcagtgcacaagagggcagccactgcacagacataggctgagagctgcgaagagggaacctaaagcaagtgtcgccagatatccccattattagttatcagctaactcttagttttcagttaacatcatagtttccaggaaatattttagttttctattaatattttaattaactactagcatcagagtcatcagcaaatatctaagtcatcagtaaacatcttaggtgtcagtttcctctgagtgaatgtagtagacctcttagtcatcatttacttcattattaccagttatgcactaataattagtggtctgctaatatctcgtctaccaatcatcttcagcaataaacatgctttaattatcagctgataattaatgtagccataacaaataaacccccaaatgtcagtggtctgacccagcaaactttatttctctttcccatgagtctaatcctctagagaagggaacaggggaggaggttctgttccgttcagttccagcttgacggagggttcgtgcagactacacagtcttcagctcttggctttcatggttgcccctgacatcaaatccagcccrcagataagggggagagaggtggagtgtcacagtggctttggccaggtctggaaacagtgtacatcacttctgcccacttcctcttggccagaattcagtcacgtgcctcagccaattgctaggggctgggtagccacttcccagcagcaactctgcaggagggaaggggggcctgatcttggagggcagctggctgcctctgccacatggacaatctttgttttcgaattgttgcttgtcagtgtacacctaagttaccttctaagtatctcaggtgtctgctaaccaccttgttttgcagctactcctgagtcacagctgtttggcttctaaatctgtgacagctgctgtgagtctaaaatagcagagcaatcacagactcttgttgcctgccaaactgggatggtgcctgccccttgctcgagactttgcatggagatgtgtgaagtcacagacgtgctttgtgccattttataaaataccgggtttactccgagggtttgtttattggtccccaattctccccaccttccttcttctgtgaggctaacacattggtttgtgagacagtttggagtattttgttttagggggtgtcaggacattttgaaaggtagagaaagtcaggcttcccagatgccctgcaggaaacctgggaaattctccagattcctgctcctaaaaggtcatggctgctcattcagggtggaaatgtgacacttccccagaagcctcactgtgctctggtctaggagactcacacctcaccccaacacacacacacaccccaccccaccccccccacacactacatacaccatacaccacctacaccacaccacacacatgcacacgtatacaccacataccacacattcatacacaccacacagctgagggcctgctttgggggaaggtaatttatttttgcctgacagaagaacgtgcctcacaccatgtggctgtggaggtggggagggcaacgtagtcttgagagttcatcagagtcacagctgttagggaagtgcctgggcctggggccaaggtggacagtgaaacaggaaggctgcccccatttccacatgtgctcacatggggctcccccacctgaggcctccaactacaggtgcacccctcccctgacagcacccacctctggtgggagtcttctgtatgattaataaaaagcgtagtaataataatcatatgtaatggccatggtatattgagtgttactttttttttttttttagacaaggtctcactctgtcacccaggctggagtacagtgtcatgacactgcagcctcaacttgccaggct

SEQ ID NO: 93249 - DNA, 51969 bp, Homo sapiens
tcatggacttcccagcctgcagaactgtgagaaaataaatatctgttgtttaggtcatgcagtctgtggtatttgttatggcggcatgagctgactgatacaacccaaatggccatccatattcatctatggaatactactcttcagtaaaaaggaagagagtattgatacatgctatcacaaggagaatcataaaataattatgctaagtgaaagaagccagacccaaaaagaatatataccatatagttccatttatatgtaattaaaaagaaaaaaaggcaaaacttcagtgacagaaggcagatcagtggttgcttagggctgggaatcagggcaagaaggaactttttaggatgatggctcttttctacatcttgatcatagtggtcattacacaactgtataaaactaacattctatacttaaagtgggtgaattttattggatataaactatacctcaataaagctagggggaactcagtaagatgccattgatgccatttcatacaagattggcaaaagttacaaagttgaacaagcaaggccaatgttgtggatcactgtgaattcccatgtgctactgctggaagtataaattagtataaccctctggaaacattttactatcatctgacaaaacagaagatgtgcctactgtttgagccagcaattccagtcctggaaactctcacttgtgcacaaggagacatgaacacacatgcttgttgcagcagtgtttataactgagaaaaatgtaaaacaatctaatatcaatgggagaatagagaagttatagcatacagtgtattgaacactatacagtggtgacaagcatgaattacatggaaaaattacatgaaaaaatctcaaaatcataatgtagagtgaaaaaaagtagaagggagtgttaagtatgataattttacaaaaaaatttaaaaccttcaatactacttattattttagatattcacgtttagtaagtatttttaaatatgcaagggaacttaaataccaaactcagagtggtggttactttggggagggaggaaaggaaattggggttgggaagggatatataaggggctgagagcttcagttataacccataagttttatttcttgaacttgatgagggagatgtaagttttcattgctgtttttttttgaatttttgtaaggtttcataaatgtttttagacaatacttcactgataaatgggaacgatcacatttaacaatcattagacatacaaatcttactgctgttgtttagcaagaaaaccccaagatcgtctttgctagccgatgtgtgctctgggctctttgggcctggataaggaatagcagggcccagcccagagtctggaggtgtggtgaatcagataggttagggtgggaggtgagacagaccatgttggttccagtggaattggctccagggctggactgggcagataattattactccaaattccagagccatccagttcctttgggaaacaagggcttggagggctcagatttcccccaaatccactcaacttgtcatagattgagctgagatgggaccccagatagcctggctgagagcctgtcttgtctgtactgcttccgtgttcccttgctggtcttcaatagggtccccaaagttcttcttgcctggaggcctgcagcagtgagtcctgactgtcaccagcatggtccctcacagggtagcccctcaccagagtttaaaagtcagtcccctatgcagttagacctaatgctacaccagggggaaaattcaaaagaaaaaaatacacaatttaggcaacagggttcctagctgcattactgctagcagcagttagttgcctgatagttgagaaatggttaggcaaatatggtagaatatcacgtgcccacgaacaggggtgagcatttgaaataggcggatcctagacagtgtccacaaggcagcctgccaggcatggcctgaagtgccaggtttgctccatgcagtgtaaacacatttgtgtacaatggcaagcgctaggagtggcttaaaaagaggtgacttcggggtttattggattcttttatttttctcctataaagttgtttacatatataataggagtcagatgagagatgaatttatagtttcagatataagaagaaaagattttgctcccacaaatctgtggatgcgtatttactaactcctccctgtctccacacaaaaaaagggggcggggatgcatcaggatgcctatctttatgatttagctccgagcttagcaccatgaacagcagctgtggtgcctagagtccaacagggcctcagttgttctttcatcctcagaattggggggtggatgcagaggtgggtcagggattaggcttgaatccccaaaaccaatgtgtattgggctttccttccaaaagggactcccagcatgcgttgggagaagaggacacagcctcccctgacctctgcaggaggcacctgccccacaggcacaggcatggggccgctcccaggcttccacctgagcaccctgtcctgtttgcttatttgttcatttattcatgcattccctcatctgctgagcactctgtgccatgctatgggctagggacacaaaatgagaagattccattcctggctaaggtcctctatgaacttcatcttgaaacgtgtcttctgttccccaccttacctggtggttttcaggctcttcttgcctgatttttccttttctccctcctccccagctccatcatctgtggattaatgtgaagtgtagaccatgccaacttttctgggacagcacattcagagcctcctgtcccatggtggggcctgtgtctggtcctcttggagagcagagagcagagggtcttgagtgggctgcctctgatcccaatatgcctggagttggccaccaggtgctagtgcaatacagtggctgcagttcagcagctggtgggggagggggatgctgatggccccagtggcctgtgactagaccatggtgtcagctgtggccccagacaggaaacatgagaaaagatgatcctttgggaccagctgacagataaaatgccacatgcacaaggaactaaataagggccgactctgctgaggcccggaagttctgctgcaggaagagggaagggaggctcacggggatcctctcctgatgcccaggtggctgcctctctctaggctgcactttttccagctgtgaaatgaggttgttgggatggggggggtcctttgtaaggtccgcggtgtaactcatttcttgcagagaattttgaatgcctttgcctcttcacagcatcctgcttcagacacttgacctgtggcgtgggtgttattatttcccacctcccagatgaagaaacagaggcacagagaagtaacttcccaaggtcacacagtggatctgtagaggacccaggatgtaggcccagttctgtctgacccaaagtctatttcttttagacacttttatactcactctggtaccctggattctctggcctggaaggcactggcgaaagctcatcttgcacaagccccttatttgtcaaaaatgatgaaagaagctcagagaggtgaagcaactaaaacccggaccctctcacccctaggccaggacttttatttagaggctttttccatttaagtagtgaatttattcttaaataggtaattcatgcacatggtgctaaattctgatgatgtaaaaggaaatacagagaaaagcaagcatccttctcccactcctgagcctgtaatcatagggcctagggcttctctgcagacagaacccagccaagacttttcgtaaatgccatgtgcacttcagggcttggtttgttctattatatttagggatgcggtgctgagatgcttgcctgcagaacagcaaaaacctctgacttcattattgttattcagagtaaccagggtcattgctctctggcttgccttaaagccagcaaaggcaattgcccatccctgggcttttggtctggaagagaccgttggcatcattattcagccccctcacttttcaggtaaggagctaatgaagacaacattcccagtgacacacggcaagttactgtggtgttggggtttcagtgtcaggagtctcctctcttcctctggcatttctgctactatgccaggctggctcctttcagtagacataacatcattgaaaaataccacaagtgcccctgtggagagcagagcagatagccattaaaattacaaaagcttatgctttttggcccaacatttccacttcaaggcattcaattcttcctatagatacactcatgtgagggtaaaatgatctctgtataaccttattctttgcaacactgattgtaataaggaaatattggaagcaacccagatgcctatgggtgggaggtgagttacataaattagggaccatccacacaaacagaatatgtgcagctgtgaaaagactgggccacctctccatgtgcaataggaacagctccatcttgccaggcgtggtggctcacacctgtaatcccagtactttgggaggtgaaggtggggcggatcccttgagcctaggcattccagaccagcctgggcaatgcagtgatatgctctcattgtgtaaataaaacaaaataatacattatttgctttgcagatgccactgccgccaggagccctgtaacatcagccatcgtcaaccccaccgtgttcttcaacatcaccgttgacggcaagcctttagacctgcgtctccttcaagctgtttgcagacaaggttccaaagccagcagaaaacttttgtgctctgagcactggagagaaaggatttggttataagagttcctgctttcacagaattattccagggtttatgtgtcagggtggtgacttcatacgccataatggcactggtggcaagtccatctatggggagaaatttgatgatgagaacttcatcctaaagcatacaggtcctggcatgttgtccatggcaaatgctggacccaatacaaatggttcccagtttttaatctgcactgccaagactgagtggttggatggcaagcttgtggtctttggcaagstgaaggcatgaatattgtggaggccatggagtgctttgtgtccaggaatggcaagaccggccagaagatcaccattgctgactgtggacagctcttataagtttgacttgtgttttatcttaaccaccagaccattccttctgtagctcaggggagcaccctccaccccatttgctcccagtatcctagaatctttgtgctctcgctgcggttccctttgggttccatgttttccttgttcccttccatgcctagctggattgcagagttaagtttatgattatgaaataaaaactaaataacaaaataataataatagtacattatttgcttctcagtgcatacaacatctctggaaagatctaaaagaaactggtagtaggattcaacaaggtggacagggggcatttttttccattttgaaccatgtggatgcattatatattcaaaatgtaaaacaaaaaactcacaagcatctcttactttttcaacttgaagaaaagagaagaagaagaaaaccctaaagtcagtaaaggttagcctgggttcctagacttaagcttgatagtaaccagaatgtcaggccacatgtggtgtaggtcatagggtcctggcttttggtcacccactgttaggctcatataacagacaaggaggtgccattgtccgttgtctgtcccttttacatcagctcatcttggctcctgatttcctgggtctgatatggaagattccgggattttattatttctaatcaacatcgccttcccaaaccccgccccttggcagccatagcaaggccacatctagcccaggatcacataaaaagggctgtttcctcccctgaggaccgactgtgtggaagcaccaggcatcagagatagagtcttccctggcattgcaggagagaatctgaagggatgatggatgcatcaaaaggtgagtgggtgaaatctccatggagccccacatgccccttcagmcagctggccctaaactgctctcttgcctctgccgggtgcctggggccattgccctctcaccctgacttgtggccctggtgctgcttgctttctgtctcatccctttttagaaaacccacaaacttttcatttaggcataatttcagatttacaaaaagattgcaagaataaaaagaagaatttccatatatcctttatccagattccctaaattattactgcatttgctttatccttctcgatcagtggacagatagatgatatagacagatagatagacaaatatatattttttgaactcttgagagtaagttgcagatattacattattaaatattttggtgtgtatttcctaaaracaaggacattctcttacgtaaccaatacaattatgaagaccaggacatgaacaccatttcaatactgttatccaacccacagattttatgcagatttcatcaactgtcccaataatgtcatttatagcagaagaaaatcctgggttaggctttgcattccgttgttgtgcctcttcggtctcctttgtctggaatagttcttctgtcattcttggagttttgtgacttcaacacttttgaagagtacagaccagttattttgtagaatgtctctcaatgtgtcctgtcctttctcaaggtcacctgatggatttccctactgcagagggtctgtctgctgctgtcagcagtgtcattgcttctcagagtggggaatagcagagcggagtcatgtgccaggctctgtgtcccatgaggatgcagccgcctaccaccaccaagagcagacaccagagccctcagttttacttcagggagtccgggtgctgctagggaacaacgaggctgggtttgaacccctctgctgactccccagcccacaagccctctgtaacctcccagcagggtttgctcagcagccttctctcttgcttgagaagctgcttgataagccaaggaatggctgctttgaaactctgcaaagggactaagccagaccctcctagtttccaccttcttttttggagggtgacattgcgaaataaatcagactcttctttttagtcccaaggccacagagttttgaattcctccttagatggctgacgcctcagctagactcagtcttggagggtacagagtccttaggactgagaaagggtggtgtggtgtgatgggaagcacctgctgatttgagagaagattcatgtctaaatagccctgtggctttgggcaggttacatcaatcccgtgaaagcactatataaattactgaggactacctgaaggaaaggtagtcctgacccacactgtcattttcaagaggtgtgacctgttcactggggaggtttgatgacttgactgaggtcccagccatgggtggcagagctgggacacaaacccggcgtgtgttcatttcatgccacactatgctgcctccctgctgggcacaatttgactttactctcaaggtctaaatcaccraagacagtcatctcctggccaccagtgttggggtgttggtgaggggagctgacgctccctgaggtgtcctttctgatgggcttgtgcaagtaaccatcacatgccaccttacaacattagcaagttgtgatgactccatggtgttttcatgaatatgatttcatttgttcttccaaccactctaggaggtcaggacatccaaatagggacctggaagatggtgatatgtgtgggataaaggtaggatttcatataaatggaggaaatgagaaattgtgcactttatggtattaggacaactggttagtatttagagaaaaacaaagccagatatctatctcatggcttatcccacaacgaatcccagaaaggtcgaagacgaaactgtaaaggcaatagaagaaaatgaaggcaatatgaaaaataatcttagagtagagaaggtgttacaaaggaaaatagaaaacctagaaacataaaggaaaagaacagtaaaactgactccagaaaaattaaaaatatgtgtaagacaaaacctccagagtcagaaggtaatggaactgtgaagggtactttcaacacatatgagaagcaaatgctgttctgtagtataaaaagagctctcagatctataagaaaatgaccaacatcccaaaatatacatggacaaagagcagtattaggtagttcaaagaaaaagaaatataaattgtaatatatgaaaagatgctcaaccttacttgtaacgagggtggtcatgaaataaaactgaaacagcaggccaggtatggtggttcatgcctataatccccaaaatttgggaggctgaggtaggaggattgcttgagcccaggagttcgagaccagcctggaaaacatagtgagaccctgtctccacaaaacaatttaaaaattagccgtggcccagcaaggtggctcatgcctgtaatcccagcactttgggaagccaaggtgggcagatcacttgagatcagaagttagggacaagcctggccatcatggtgaaaccccgtctctactaaaaaatacaaaaattagccgggtgtggtggggtacaccggtaatcccagctacttgggtgactgaggcatgagaattgcttgaacctgggaggcggaggctgcagtgagctgagactgcactccagtctgggcaacagagcgakactttgtctcaaaaataaataaataaataaaaataaaaattagccagacatggtggtgcatatcggtagttccagctactcagctactcaggttcaaggctgcagtgagccatgattgcaacactgcacttcagcctgggtgacaggccaagactctgtctcttaaaaaaaaaaaaggttatataaaagcaaaacagcaatgagatttcattttttcatttatcagattagccaagattaaaagtttaatagtaaatagctttaaaaaggcatcttctcatctttttgtaggagtatcactggtgcagtcgctagaaggctctctggcaacatttgctgaaattaaagatgcccatatcctgtgacacagcaattctgctttggaagatttctcttacaaatattgtcacacatgagtgcaaagatacatgtacaaggaagtacattgtagcatataagattttaaatggtctacatgtccatccagggggataatagctactaaaaagtaacaaggttgagaccagcctgggcaacataaggagaccccttcttcacaaaaaatgaaaaaattagctgggtgtggtgatgcatgcctgtagtgccagctactcaggaggatgaggtgagaggattgcttcagcccaggaggtcgaggctgcagtgagctgtgatcacaccattgcactccagcctgggaaacagaatgagactctgtctcaaaaaaagaaaaaaaaattaaaagaaaataataacaagatctacttgggtggttaggagataaatttcaagacatgtgtgtgagagagagagggagaaaaagagagagagagagagaagcaaggcgcagaatagtgtattgagaaagctcctgtttctgtaactaaagtaatggtttatggcagagaaaactggaaagatacctagatactttatagtgattttctctggagaaaggatctgggagtctgggatgggagagaaacttaatttttgtaatgggcatttattacttttrttttattattattattattattattattattattattattattattattatttgagatgaggtctcactctgtcacccaggctggagcacagtgaygtgatctcggttcactgcagcctccagttcccaggttcaagcgattctcctacctcagcctcctgaatagctgggattacaggcatgcrccacattacccagctaattttttatttttagtagagatggggtttcaccatgttggccaggctggtcatgaactcctggcctcaagtgatccgcctgtcctggcctcccaaaatgctgggattacaggcgtgagccgctgcgcctggcctcttctttatcctatttgtgattctttgtggttcctaaataagaggattcatgtctctcattcattttggaaagttttcaaccatcacctcttcgctgctgctccccattcttgattctctcctttcagaacaactatagtatatagtttagcccttttcatccaagactccgcgtctctaaactgcttttcatatttacttctattaatatttctctaggttgtattataggtatttgtttccagtctattttctagttcactgattctctttcagttatgtctatttgctgtttaacctgtgagtttttttcattttgagaaccatattttcatttttagaagttatgttttaaaaaatttatctggtcattcttaatagtggcttattcctttctcatcattctgatttattctcttaggtccctagccatttttgacttggctattttatggtctctctctctctctctctctctcwatatatatatatatatatatatatagtttatttaatttaattaatttatttatttatttttgagatggagtttcactcttattgcccaggctagagtgccatggcgtgatctcggctcactgcaacctctgcctccccggttcaagcaattcttctgcctcagcctctcgagtagctgggattacaggcatgygccaccaagcctggctaatttttttttttttttttgagacagagtctcactctgtcgcccaggctggagtgcagtggcgcaatctcggctcactgcaagctctgcctcccaggttcacgccattctcccgactcagcctcccaagtagctgggactacaggcgcctgccaccacatccggctaattttgattttgtatttttagtagagacggggtttcaccgtgttggtcaggctggtctcgaactcctgacctcaggtgatctgcccacttctgcctcccaaagtgctgggattacaggcatgagccactgtgcccggccctatattttttaatattttattttatttattattttttgaaataaggtctcaccctgtcacccaggctgtagtgtagtggtgtgaacatggctcactgcagccttgacctcccaggcccaagagatactcttgcctcagcctcccaagtagctgagactgcatgtgcacatcaccattctcagttaattaaataatttttttttaaagacagggtttctctatgttgcccaggctgatcttgaactcctgggctcaagggatccccctgcctcagcctcccaaagtgttgggatcataggcgtgagccactgtgcctggtccatagtctatatacgttattttatagtctgtatattatctgatttcttggacgaatacttgtgtggtttctgctgaaatagtgtattttgtgttttaaaatttggggctataagctcaccttgagtgtgactttatctgtgggaatgccataaaactttggtggagaatgaattactccaaagaagattggcgtttatcccctaaaccagtgacaactgtgactaggagccagtttctgcctatgagccaaggacaactgtttattttactttctcagtatgggggaatcccagacctctacagaaagaggtgatgtttgaaatttttcataaccggtatgcattctgcaggggctgtgctcccacaagcactctgggaaggagactctccaggagtgcctgctggcaggtggcagtagactcaggcagcaatatggacactggggggtgggggaatgtgatttcttgtggcaaaaagtacaaagaaaaatcagcaaagggaaaagcctgctggggtgaggtcctgagggagctaggcaggtcttccaagmgtcctctccagtgtcacacaggatgtgtttaattcctttagcaattagttgtgacatgttttttctctgtgtatctcattcattcagcaatcataactttattttctttttgtttttagtaatctcttattctcacccagacctttcatctggaatggttgtttgcaagagggacaaaagcatttttacagaaaaatattttaatacaacctaaccagaataacacatcatattctggaattggtcaggacaaaatcctgaattttcaaaaattttcaaaatggtagttcgggtgtggtggctcgtgtctgtaattccaacatttttggaggctgaggcaggaggatcgcttgaattcaggagtttgagaccagcctgggcaacatagtaagacttcatcaccactatgaagtgcactatggtgcacacctgtagtcccagctactctggaggctgaagtgggaggatcccttgagctcaggaggttgtggctgcagtgagccgtgttcacaccacggcactccagcctgggtgacagagcaaggccctgtattaaaaaaaaaaaaatcaaagtaatcttaaataacctctcactattttttgtcctgatcatttattcattgagcagcctagaaaaggtcagtccctttctggggaaagctgtatttaataatcaaactgccttaccagaaggaaggagaaggaaattgtattagyttattttctgttgcttataaaagaatacctaaaactcaggtaatttataaagaaaagaaattcatttattacagttatggaggctgagactccaaggtcgaggagctgcatctggtgagggccttcttcctagcgaggactccctgaggagtcccaaggtggtgctgggcatcacatggtaagctcaggtcttcctcttcttataaagtcaccaagatcctcttaagtgcgttttttcttgtcatttcaagagtcccacttgacccactcaaaaatatacatacagactggaaaatcataagcttctaaggctgacaatttcacaagagctcattagcaactaatgctaattttagtttaaaagcaactttgctttttaaaactccaaaagtatatcgccatctggagattgcttgtcttttatgttgtctccttttttccagaggcttcataggcaaaagttatagcaaaaattatccattgcagagacttttgttttttaatactcaaataatttaaactccaacccacacattggtggcaagaaacaaggacattgtattccactgacactttttctttgcaggtttccctggtcatcttgcatttatgacactgcaagcattaaactggtatatcaattttgaccatctatccaagtgcaatagctacaaaataaaaatacaaacgctttttttttttttttttttttagagttgaggtctcactttgttgcccaggctggcgtgttgtggctattcacagctgcaatcatagctcactgcagcctcaaactcctgggctcaagtgattctcccacctcagtctcccgagtaaccgggattacaggtatgtgactccaaaggcatttttttaaagacagccccagtgtggcttcctgtagttccaggattcctccagcctcccagatctgccttaagcagtgctcaggtcacagagcagtgcccaggagagggtgagggaggaggctccagtactggccatctgttatgtgctgtatgttggtttcttagggcattcaaatgaccacaaatgaggctgcttaaaacaacagcaatttattattctctcgttctggaagatagacatccaaaatcaaaatgtccgcagggtcctgctcttgcagaagcctccagtggagaatcttcccttgtctttcttggtttctggtggctccaggtgttctgtggcttgcagctgtgtaactccagtctctgcctccatcttcacatgaccctccccttgcctttccatgtctcttataaggacacttattcttggatttaggtcctacctggataatccaggataatataatcacaagatccttaatcacacctgaaaatcccctatttctataaggtcacattcataggctccaggtggagatatcttctgtgggaccaccattcaacccactatatgcccatctgcctaacattaatgatggcctgcattttgtcgagtgcctactgtgtgccaggcatgtgccaggcactcaatgtgcacactagccaccaagggagggactatgtttaccattccagggagataaggtcttaagaagcttccacagagatgactgcatttaggatttggatttcttaactgctctttcctgcttcctggtaccaaaacctatacctttaccccttgggaacccaggtcacccacctgcccagtccatgggggagcaggaataagtcagaacatgggagggactgttaaagcccttttccagctgtgattgctttgcgattggctctgggtcccacagcaggagctctgctgtccagggaaatgaagaagcctttcaggattgcagctcctgacagcatgctatggtttgaatatgtctccccctaaaattcaggggttgccaatgtggtgatactaagaggtggggcctttaagagttgattaggtgataagggcttcttccctgtgaatgagatgaggtgcccctctaaagggacctgaaggagggagttggtcctctctcgccctctgccttctgctatgttacaatgcagcaagaggccctcaccagatgctagtgccttgatcttggacttcccagcctccagaactgtgagaaataaatttctattctttctaaatgacccagtctcaggtattccataacagtggcacaaatgggctaagatgctccagctagccatcggcccaccccaaggtttcagcccaagaaggggaagcacctgggaaggtaggtctgtctgccaggtgggcctccctgctggaggcagcaggttcccaggccctgtgcgcagtgtgaagggaaggccacttgctgggacttgccttcctggagaacacttgtccagaccccaatcccaaagccactccagcaagaatgagctgtgctgtctccaaacacatcactggccgcatccccaaggtaggcatctgatgtgggcgtgaccactccacctattttgtagtcatgaaagcccagtttccatggctggcctccttgatctctgcagaggatgggtttcctctgtgggtgagccctcaggagcagaggaaggtccctgcatctcacctcactttacctcacaggccacagcggggcttcctaatctaggggttctccatatgtgcctccctgggccagcagcacagcgtcatcaaggaagctgctggagaggcaaattctcagccacaccccagatgtgctgaatcagaaactcagggtgggtctggcagtctgtgttttaccatgccctctgcacactcgaattgcctggaaagctttgaaaacatagaggctcagccccactcagaacaattgtatcagaatcgctgggggagaacataagtagttttacaacccccaggtggtttcagcatgcagccaaaacacatttcccttcatgactcatgagcctgggaatggtttgaattttagataaaggggaggggtttgggtctcaagctgaggtaatacgaaatgtcattataacagacacatggtgagaaatacatgtgctacagaaaagggtgtattatgcatgtggagattatttcttttactgaatgtacttttcactttagcattgaagaaaaaaatcccctgttttttttgggggggatggagtctcactctgtcacccattctggagtgcagtggcttgatctcggctcctgatctcaggtgatgcgccgcccccacagcctcccaaagtgctgggattagaggcgtgaaccactgcacctggccttaaaaatcccatttataatgcaagtagtcttggcctcagatcatgggagctccttggtgcttcctcctcaatttggataaaaaggcttcaccccagccactttgcaccccacccttctcttcaggatgtgaactctcacctcaggatggtgtctgacttgaagctgatgggagtctgggctgaacaggaaggggagcaatcccagggctcatctgttccctcctcagtttgcccgctcccctctttcccttcagcttttgtgttgattgacggagaacaccctggcaccaggtttgttcctgaggccatgtctgcagagagggggagttggggtgggaaacttgcctaacagccactcacagactcaccctgtttgaaactcagtttcctcacctgtaagatgggcgtgcacttacctattttgcggggttacatgactaagcacttgagtccactgctctcagctcatccccatgtaatcccacaaggtaggtatgtgcacaccagtcttacaggtgaagaaactgagtctcagacagattcataaccagctggaggtggagcagggatgcccgactctaaagcccagctccacctcaatgcactctcagattttgaacccagaaagaggtgatcagggaataaacattctctgtgctctctttccacatgtgctgcgttgctgacagagctgcaagttctccacattgacttcttgaatcaggacaaygcygtttctcaccacacatgggagttccaaacgagcagtcctgtgttccggcgaggacaggtgtttcacctgcggctggtgctgaaccagcccctacaatcctaccaccaactgaaactggaattcagcacaggtgaagcctcggggccctactcatggggctttggggagggatcacaagtgtctgtggatgctggagtggccctttctggtcagtctgagccaggagtgccttaccctccctgatccccagtttctccatctgtaatgtgggaataatagcgggtgtgaagagaatagaatgggaagctcagtcaggacctggcacatagtgaggctctgattccttggctaagcaggggaggggccagagcagagagaggaggtgactcagcgggcatctgccgtggtggggtctggaacattttgtagagatgaatcataggactgaggtatgctgatgccatagcggggtgggctggaggcaagccaataataatgattaaaatatcatattttggttgcaaagataataggaaatggctcatgcatttgttatagctaggtaaatatatgtgcataagtacaactaggggaagagagaaaatgtattagattttgtgacaggtggtgggataatggaggagggtcttacttctttaatgttgtttttaagttttaaaaatagatcaagtaagctgggcatggcagctcatgcctgtaatcccagcattttgggaggccgargcaggcagatcacctgaggtcaggagttcgagatcaacctggccaacatggtgaaaccctgtctctactaaaaatacaaaaattasctgggcatagtggcaggtgcctgtaatcccagctattcgggaggctgaggtrgaattgcttgaacctgggaggtggaggttgcagggaggcaagatagtgtcattgcacttcatcctggcgacaagagtgaaactccgtctcaaaaaaaaattagatcaggtagatctactttacaagatggcatacaatagcacttcctgggagagcgctccttttgctccttctctgagtgaacaacaggcttagggtctcctccaacgtgctggtggagatcagtcagaacagcctccattcccttcatccaagatgaaataagcacctactgtgtgccatgccatgagctacctgctcaacgcatggactgggaccgtgctgttgctgacttcagtgactttatagtacccctgggtccatgtgcattccctcacccaaaatttcctgagtacttgccacatgccaggtgttgcactgagcactctccatgtatgacatagtgtgaatcactcactcaacaaatatttgttgagtacctactctgtgccagggaacccagaggtaaagcagttcctgcctcctagacttgactgtactagcagagagagcagtaaacaaacaaaagtgcaagataatttcagacagggccagatatgatgaagaaaccaaaaacaagaggctcctccagcaagacagaaagcagcaggtcagggcggggctgactctgtcggtgctgactctgtcagggttggaagggcttccctgggaagtgaccctgctgagacccacgtcccaccaygtgaagagctgagagcagggtgttcccagccatgagcacggcaagtgccagggccctgaggagacaacacttgtgtcacatgctctttgtcatgagctaactctctggggaccagaaacccagtcatgacagggaggaaagtggggagctggggagaagcctcactgagggccacctgtgggctatggaaagaggttggatttgattctagtagtccctggagctcatgacataaactgaccgacctttcaaacaagatcctgcaacagcttgcagggtaggcggtggcatctgcctcctccagacgaggagtgaaggttaagcagttcccctgcattgcgtggagtgaacaagcatgttggtctgtggcacgagccagcagggttaaacaaatggtaactcgaatgagcatgtgacagaggcaggagctctagggagacctggatctgatgggtaaaaagggaggacgtggagaggaggcaggaagctcatctaaattgaacagaaaactaaaactggacatgtggggcagaaggaggcccctgcagaattagaggggctggagccaggggacaaatgagcctggaaaggaggggtgggggctccatgagtgggcagtaggtgggcccgaaccagaggagattgtcttgggggtggcccatggctgggccaatgttttcctttgggtgtctccagggccgaatcctagcatcgccaaacacaccctggtggtgctcgacccgaggacgccctcagaccactacaactggcaggcaacccttcaaaatgagtctggcaaagasgtgagcacccactgggctggcgggtgggctggctggcttctggcggaatgctcctaatgtgagcagcccctatccccttcctcacctgtcagctggtaacatggtttaaagccatccacagcacagcatgatagaggggccatggctccaaatgtctgtttccccactcagcctcctccaagcacacagtatcgctgtggccaaacctcctacatgtcacccttcccctttccatttcaaagggaacaatgttcactggaggacatgagcggagagaagtacataaaaataacccatggttccaccaactaagttacccatccttccttccaggctttttctgtgtcatggtcaaatacaaaatgggggtccatctcatgcttcactcacttgacaagacctaatggatgttttccacagtggcttctgcccgagtgtgtggcttacggtggctggttttccaccctttttgggagcactgggtgttcacagttgtctccaatcttccagtgttgtaaagaaccatgtctcggccagatctttggactggtttatggatatttccttgggctaaattcctagaagtttaatgctaagctaatgccatgatttaaaaatggcaactacattgggtttttgtggaagcagaatctgctggtggaaatgagatgaatgggccagctgctgctggaatcctcgctagtgccccggcctcttccttcctctycctcccatccagatcccagactctcaaccccaattttgcatctgagtgtttttcagggtatcatgaaaatctctcctgaggtgggcatgggttgtgggcaggagctgcatttctttactcaaaaagtgttatttttaattttttttaattgacatataacacacataaaggacacaaatcttaatggtttgcacaatgaatttttacatatgaatacagctgtgggaccaccagccagatcaaggtggaggccatttcctgcaccctggaaggctggttctcctgagctccattgtaatgaacagtgagggcacaacctcctccctcttgccacaagaggggtatggggagttagccttgtggattctggagttgtagcacagtgagtttgatcccagctccacctcttgggctacctctgtgaacctcagtttccccaccagcaaaataatgacaattaaacatttatatttattagctcatttaattttcacaatgctcccacaaagaagggggcctgttatcattccaaacttttaaacaagaaaactgaggcacaggagaggttaagtaatcagccaaggtcatacagccagtaagaggtagagctggccagcctgggcaacacagggctaccccatctctactaaaaaaaaaaaaaaaaaaaaaaaaaaaaaaaaaattagccaggagtgatggtgggcacgtgtagttccagctagttgggaggcttaggtgggagaatcacttgaccccaggagttcaatgctgcaatggcactcaaggctacttctgccatcgccagcaccagcttctctccagagggtgctggacatcttgcagcctcaaatgtggcacatcctatgtcaacccttttccacacctgccctttctcctggggccttcctgaagtcaaaagccatcagatgcccatgctagaagccagttgcactccagcctgggtgagagagaaggactctgtctcaaaaaaaagggggaagagtagagctgggatttgaactgagagcctattgctcctatgagttataataataagcatctcatgggaggaccttggaccacaaatggaagtgtattgtgacaaggatgagaattattattcttggtaccattgtggctacagcaatattgatgtatcctaattatctctccagctattatttatcctaaaaggctggatagaggcctggacgcccttggaccaatggccttctgggactctggctgcctgtattccaagagaaaggtgtttttttttgctccaaaagacagctgacatttaacctttcccctgaagttccagacactgggctaggcacctgtattagtccattcttgtactactctactactctaaagaatacctgagactgggtaatttataaaggaaagaagtttaattgactcacagttccacatggctggggacacctcaggaaacttacaatcatggcagaagaggaagtaggcacattttacatggtagcaggtgagagagagcgagaaagagcaggggaaactgccttataaaaccatcagagctcatgagcactcactgactatcatgagamcagcatgggggaaactgcccccatgattcaatcacctcccaccaggtccctcactcaacatgtggggattatggggattacaataygagacgagattcgagtggggacacagagccagccatgtcagcaccttatgcgtactttatccacagcatcttcccaacaacctggagatggtatcacctccaggctgtggtgaagcaagtggtgaagggagtgaatctcagggaggtgaaaatgcccagtctctccagggcccttgcaagacgtgccaaaacttcatgctgtatggagctgcttttctgtctcatgcatcctgcccttgcaggggcgctcctggctgtccagggtcctgaccattccttgtctccaggctggttccagatgggatgagttgttaggactgacggattcttctgggaagcatttgtaagatttgggatctggccagagggggagatgtccaccttatcttatggtttgctcaggtcacagtggctgtcaccagttcccccaatgccatcctgggcaagtaccaactaaacgtgaaaactggaaaccacatccttaagtctgaagaaaacatcctataccttctcttcaacccatggtgtaaaggtactgtgaatctcaggtctgctggggaatggcaggtgaccccggyaaaacctgctatgtgcaatgcatagtctatgagctttkgtttgctctcaaggtacttgcaaactagtttaagggatgtgacccaggaacagatcacagacaccamtggagcgttttctttgtgaccaggccccttagaatggaggtccttattccctgtttccacttctccccagtgcctygccctgccccagctggcttctgcctccaccactgtacagaggctgccttcgtgggggtggggaggggccaccaaggacttcttccttgccagctccaggtcagggcctgaattgtggttggttcctcccttctgctcccttagttctgttctcttctctccacttcctcatgtacccacctcatttcttcctgtggctacactggagcctttatgtaaatggtgcttgaggctacttctgccattaccagcactggcttctctccagagggtgctggacatcttcttgcagcctcaaatgcggcacattctatgtcaaccctttccacacctgccctctctcctggggccttcttgaagtcaaaagccatcaggtacccatgctagaagccaaggagctctttttttttaacttgtatttggaaatgattttgagctcacagaaaagtggcaaaaatgatgtaatgaacaacctataccctttatcatccaggctcacctgttgttaacattttgctccatttgcttaatcattttccctccctccctcctctmcacacacacacacacacacacacacaagctttttatttttgaaccatttgagagtaagttacatataagttggttctttacaacccctaaacccttcaatgtgtattccctaagaacagggatattctctcatataaccacagtacagttatcaacttcagtaaattaagtgttagcagccaggcgtggtggctcacgcctgtaatcacagcactttgggaggccgaggtgggcgcatcacgaggttgggagatcgagaccatcctggctaacacggtgaaaccccatctctactaaaaatacaaaaaaattagccgggcatggtggcgggcgcctatattctcagctactagggaggctgagacaggagaatggcgtgaacccgggaggcagaacttgcagtgagccgagattgcaccactgcactccagctctgtctcaaaaaaggaaaaaaaaaaataggccaggcgcggtggctcatgcctgtaatcccagcactttgggaggccaaggcaggcggaacacagggtcaggagatcaagaccatcctggataacatggtgaaaccctgtttctactaaaaatacaaaaaattagctgggcctggtggcatgcacctgtaatcccagctacttgggaggctgaggcaggagaatcgcttgaacctgggaggtggaggttgtagtgagctgagatcacgccactgcactccagcctgggtgacagagcgagactctgtctcaaaaataaataaataaataaataaaaataaataattaaaaaaataagtgttagcataacactttcatctactatctatattccagtttggtcactttttttttaatttttttttttttttttgagacggagtttcactcttgtcgcccaggctggagtgcaatggcgcaatggtgcgatcttggctcgctgcagcctctgcctcctgggttcaagcaattcttctgcctcagcctcccaagtagctgggattacaggcacatgccaccacacccagctaatttttgtatttttagtagagacagggtttcgccatgttggtcaggctggtctcgaactcctgacctcaggtgatctacctggcttggcctcccaaagtgctgggattataggcatgaggcaccgcacccagccggtcacttgattttatcatgtactttatagcattgttttccctccagtacaggatccaatctagagtcacattttgcatgtagttatgtttacctcctttaatctggaacaatttctttatctttctttgtcttttttgacatatttttgaggactagaagtccccttttttaacagatcattcatcatttgggtctgtctgatgattcatcatctttagattcaggttacgcagtccttgctggatattatgtaaacgacatgtccttcttggaaaatcatatctggaggcactgcctgcccctcattgggaatgttaaatgtgatcatttggtcaaggtgttgtccagtttttctgctatataattactatctttttctttttaacgagtagtctatgtggacacattttaagaccatccaaacatcctgatccttattaaaattctccacccctagatttagcatccactgatggttcttgcttcaaccattcttcactgtgatggttgcacagtgattttccaaggccagctctccaccatgtttacctgctagcccctggcatttcctgtaggcagagtcctcccttcactcccatctacctctctcttccatctgtatggactcatggactctctctttcttttcagtggtttatgattcatccttttcttaactcatgcttaaattgctccagattttcccaggggaagtcccctacagctggctcgggaagttcttttggatactttccctcccgcttacctccctcccccaacattgggtgttccaagcccctcacaaagaccttgaakctcccccagcacagacagtccccattggcaagcctgctyctgtcccagggcagaatataacctctgtggatgtgtggtcttgcttcagaggacatggttttcatgcctgatgaggacgagcgcaaagartacatcctcaatgacacgggctgccattacgtgggggctgccagaagtatcaaatgcaaaccctggaactttggtcaggtaatgatttgtcgtcttgtggctgcaccaggccccatctgctagaccacccttttagctgggtagtagtcagtaaaggttctggagaaagggttgtgaacctcgggtcaaacgccagcctcatacatgtaaaacttggccatagaggggtgacctgcctaggctgcacagatggggtggagtcctgggcagaagcccttccacaaaggtcacccatggcctttcccatccaccccacggctctctcccaccccccacagctctctcctaccccccatggctctctcccacccccctcggctctctcccaccccccacggctctctcccaccccccttgactctctccccaccatggctctcttccaccccccttggccctctcccacctcccatggctctcttccaccccccacggctctctcccaaccccaacagctctctcccccacccacccccaccacggctctctcccatcccccatggctctctcccaccccccatggctctctcccaccccccatggctctctcccaccccccatggctctcttccaccccccatggctctctcccaaccccaacggctctctcccccacccacccccgccacagctctctcccaccccccatggctatctcccataccccccaccccgccacggctctctcccacccccatggctctctctcatgccaaacagctctctcccaccccctacctcccagtgtatttaccaaagaaccaagcactgttacaaggaagcactgttacaaggaagcactgttacaattagaatgttggccttgacaaagagctctaaagaagagggagagttttttagagacttgtgtggaggcctctgctgagtggagggccaatgscttcgtgcagccatgaggcagagaagctggggtgtgaggatgccagacaccagatgcttcccacctcccctcccccaagatttgacaacaaaaaactcctgggaaatgccaggcatttcacagctgcttgagtttctcctcctccccctgggtctggacgcctaggacaggatggaagtagggacaagggaggaaggactcccagctggcgaggctcccactgtgtgctctgtgcaaggtgcgccgagtgccctctccaccctcactcattcctagaaggccctcagcatcctctcctcacacatgaggaccagagggaaatgaaatggaagggagtagctggcaaggagacagccaaacgaaccgcaggaggggtagggaagaaggaatcacctgaatcctagggagtttcccctcttagaaaatcaaggggtgggccgggcacggtggctcacacctgtaatcccagcactttgggaggccgaagcaggcagatcatgaggcccggagatcgagatcatcctggctaacacagtgaaaccccgtctctactaaaaatacaaaacattagccaggcgtggtggcacgtgcctgtaatcccagctacttgggaggctgaggcaggagaatcacttgaacccgggagacggaggttgcagtgagccgagatggcgccactgtactccagcctgagcgacagagtgagactccatcttgaaaaagaaaaaaagaaaatcaagcggtgattttaagaagcccaaagagtgactgggtatggaggctcacacctgtaatctcagcactttgggaggccaaggtgggaggatggcttgaggccaggagttcaaggccagcctgggcaacatagggagacctggtctctataaaaaataaacaaattagctgggcatggtgatgcatgcctatagtcccaggcagagctgtggggaggggggactgcagttggagagggaggtgggtggatcacttgagtccagaaggctaaggcttcagtgagcagtgattgtgccactgtactgtaccctctctcaaaaaaataaaaaataaaataaaaataaaaagaatctcaaagaattgtaaccacaaaactcccccagactccttctggaacataaacattgtggtctattccttttattttggtagtttttccctcaggttacaaaagtaacacatgtacttcaactctgtaaatatacagatatttatggataattacagattgaatcatccagtttagatggtaaattttatgagatataaatgatatcttgataaagtggcttacagtaaatagaatttcaaaagtaacgtgcttatcacaaaagacttaggaaacacagaaatgtggaaagaaaataaaattattcataacctcctccctcagtgataatgacttaacattttagtgtattttattctattatctattactaaggcttacatagttgtaatgctatttgttcacaattttgtagcctgtttcatttattcatttatttatttatttttattattattatttttttgagacagagttttgctcttgttgcccaggctggagtgcaatggcacgatcttggctcactgcaacctccgcctcctgagttcaagcgattctcctgactcagcttcccgagtagctgggattacaggcatgcaccaccacgcccggctaattttgtatttttagtagagacagggtttctccatgttggtcaggctggtcttgagcatccgacctcaggtgatccacctgcctcggcctcccaaagtgttgggattacaggcgtgagccaccgcacccggcctgtttcatttatttgacttgattacaaaggaattttccccatggtattaaaaacttcttatacttccttttagtggctgcatgctagagctctataaacttacttaactactgtcctgtggcaggacatttaaatggtttctaattttcagtgctgtggtggacttttttatgagactgtaggcaggggagatgggttacgctacagggtggctgtgacatgcaaattagatggtatgtgttaagtttctgacacagggcaaagtcttaactgcctctttcttcatttcccaaaatagtttgagaaaaatgtcctggactgctgcatttccctgctgactgagagctccctcaagcccacagataggagggaccccgtgctggtgtgcagggccatgtgtgctatggtaggtatggaaagcctgggctgatgctgtcttgtacttgccaattgctcagcctttttctgtttttcctcatctaaactgtaagctctttgaagtacaccactgtgctatggccaatcaattgttcaaaactattaagaaatagacattgctgaaatctgttctgagcgcaggttttcttttctttttttttttttttttttttgagacagagtctcattctgtcaccctggctggagtgcagtggcacgatcttggctcactgcaacctccacccatccaggttttaagcaattctctgcctcagcctccggagtagctgggattacaggcacatgccaccacgcccggctaattttttgtatttttagtagagacggggtttcaccatcttggccaggctggtcttgaactcctgacctcgtgatccacccgcctcggactcccaaagtgctgggattacaggcgtgggccaccgcgcccggctttcaagtcagacctgagtctgaactccagccctgccacttatgggctgacgttaggtgtaaatggcttcaactgtctgagcctcagtttcccccatctgcaaaatgatattaatacagaaggtcctctttctacctgcaagctgggctccagttgggtgagcaaactgttgcagttcacttgggacttttctggttttagcactaagaatactgtgttccaggaaacccctcagtcttgggcaaacaggatggttggtcactctattctgcctggccacttggaagtcagtttgttcagagtggcagttctcaaatattttggtttcaagacctctttgcacttttaaaaattattaaggaccccaaataagttgtatttatatggtttatatttaccaatatttactgtattagaaattaaaactgaaaaggttaaaactatttattctaaaagaataattccattacatgttaacataaataacgtatttttatttttaaaaacctatgtttttcgaagcataaaatatgtagtgagaagagtggcattgttttccatttttgcaaatctctttaatgtctggcttgctagaagtcagctggaatttcatatctgcttctgcattcattgttttagttggaatatatgaacatctggcctcacacggatacgtagatttaaaaaggcagaggacggccgggcgtggtggctcaggcctgtaatcccagcactttgggaggccgaggcaggcagatcacgaggtcaggagatcgagaccatcctggctaacrtggtgaaaccccatctctactaaaaatacaaaaaattagctgggtgtggtggcacacacctgtagtcccagctactggggaggctgaggcaggagaatcacttgaacccgagaggcagaggttgcagtgagccaagatcgcaccactgtactccagcctgggtgacagagcgagactctgtctcaaaaaaaaaaaaaaaaagaagcggggcgggggcaggaatattcccatagccttttcagataatggaagatactatactgaagctctgtaagtggcagtttcttaaagttggttgcaatgtggaatctgaaaccacgatttttcatcctttgtacacttatgagagaatgagagtgaagaaggcaaatattaccttgggattattatgcaagtagttttgatcacagarcttggaactcccagggatctcccaatgccagtgaggaccactctccaaaggtccactgagttcagccaactggctgctcttgccatctgtgggtggcaggcagacgtatgttcatctccaggtgagtctgtgagctgaactgctgcgacagacggatcttaagtaggggctcttgaaatgccctccttgcagagtggctgtgagcctgtgtctgttgcacgtggtatgcctcataaatgctggggctcctgttcccctgcaccttaggggctgatgggattaccgggggccctcacgctgactctctggggcccaggagtccacyatgcctgctctttccccttcacccccatgctggtatgttcattctctagcccaggggccagcaggtggccaggctggatgctgagaragaacaagtaaaggagaccaagtcattagcaggcagaacttgccatgaggggctctagttctcagtggtgcaggtggactggcacgtacctggctgcttctcctttcaagctccatgactctggacaagattctaaacctctttgggcctctgttatctcatcttttgggtgattatgaggtctcaataacacacaacaagtgcccagcccagggtctgacacgctttgggcccacgagtagcctattcccaggtcattcttatgcgtggtggggtttgggaagcaatgggctaagccgctgcttgtttcagtgatgaggaaaccagccgggggagaaggggcagttcgccaaaggctgcacagtgaagtggtggttgagccagctgtgctgactcctggtgcagtgctccttcctagtgccctgccagccacctcctcaggctgtgaggcaagcatgggcaattcagaactccaaggtgttccaggagtcacttccaaaattaggttactgcagattagcttccacgctcgggagtctgagaaccccagcccacttcagaggccctccccttttccaggttccctataaaggttgccccttcacccttagaaattcgtggctatccatgggcctcctggatctgtgaatttctgactagcaggcagagcttctggcagggtcgcctaaagacgactcccacaccaggcagggaacctcggcgcagcagtgagtgcgttcattatccattgctaagtaataagttaccccaagacactgtggctgaaacaacaaacatccattatctcccatgtctgtgggtcaggaatccaggtgtggtttagctgaatgttctggctgaagatctctgggggaggacctacttccaggctcactcacctagctgcgagcagcctcaggtcagggcagctcatagcatggcagccagcttccatcagagtgagcaaataagagagggggtgcccaggctggaagccacagcctttgtcacctcatttcagaagtgacagccatcacttttgctgcattctgttggttagaagtgagtcactgggtctaggagaggggattactggggaccatctcggtgactgcctaccatgcctgggcacagaaatgtgctttgttccgcagggggatagagcctcgtgcatcaggagttttgaaagtcctgatgtcctttgggctcagcgtcactccccttctttccctatctccgccctcccctacattgctctatagacggcttgtgtctagcaggcgctgacaggctggggccgcttaatttcgcaggaggacgcagcagccggaccagggcagtggctgggtgacagttaagatgggaggtatttcctgctttgcctaggaccctttgcctgtctctctttcatctgttttcattccgtctgaccactcttgagtctggsggtggcctctgctctctctctgattttgatgaatgaagaggcttgtccagccacaggacctgagaggtcacgggaggcccaggccacaccattgtttgagacttcttgtaaattaaaactgaacaaactcccaaacaggattcagaaattgtagcatactataagggttttagttaaacaaacggacatctttaacatcctgggaaacatgaggcactgtaactgtgcttttcacaaggcatgatgaggtttgcaaaggaygttagtgtgcaggccaggaggggatgggtggatgtggtcaaagccaggccaccaccagatcaaagatttgtgactgtgtcacctttcatgttttcggagggttcctctgcacctgcctgtacaaccttctttagagattccattaagtgctttcaaaggtgaactcacaaggctttgtcctctctctggttttaataaggtggaaaggatcgtctrgccagggctcctcaggggttaagagaggtgcaggccactgacaatttaaaaacggaagatgccaaaacaggcataggcttaacccaggtcatcctcaaaacaacctaaagggaccgggcatagtgattcacacctgtaatcccagcactttgggaggtygagacagttggattacttgagctcaggagtttgaaaccaacctggccaacatggtgaaaccctgcctctacaaaaaactacaaaaattaaccaagtgtggtggcgtgcgcctgtagtcccaattacctgggtggctgaggtgggaggatcacctgagcccaggaagttgaggctgcagtgagccgagctcacaccactgtactccagcctgggctacagagcaagatcctctctcaaaaaacaaacaaaaccaacctaaaggtaggtgttgtaaygatcatcattttacaagggaggaaactgaggcatasagcagtgagcatcctccccggtcactcaaacagctggcatgctccttggcccttctgggcaccccacctgttctggaaagcccacgtcctccaagtactctgagacattatgaggtgtccactttgggggctgggtggccaagctgggctggcagcaccttgttcttctgaggggcggacactgaccccacccctacgtgtgtggcagatgagctttgagaaaggccagggcgtgctcattgggaattggactggggactaygaaggtggcacagccccayacaagtggacaggcastgccccgatcctgcagcagtactacaacacgaagcaggctgtgtgctttggccagtgctgggtgtttgctgggatcctgactacaggtaagtggcagatccaggggctgaggggagaggtcccaagggagggactcccagcccccacagttgccaaccaccccaccctggatcatttcagtgctgagagcgttgggcatcccagcacgcagtgtgacaggcttcgattcagctcacgacacagaaaggaacctcacggtggacacctatgtgaatgagaatggcragaaaatcaccagtatgacccacgactctgtctggtagggttcctccttctcaacctgccctgtctccttctcccaggaattttcttttttctttttagaaacagggtctctcgctagtttgcccaggctggtcttgaactggtgtcaagcagtcctcctgccttagcctcccaggtagctgtgattccaggtgcaagccaccatgcgtggcatcccaggagttttttagcccaagcccagtctccaggccctcccaacccagagattctgctgagctgtggggccccttcagcctccctcagagactgattcaagttgtaggccagtgctcactgytcctgaaattcaatatttttcaacatttggccttggacaatctgtgctggaatcacctgggggtgattgttaaaaaatgcagattcttggccaggcatggtggcacatgcctgtaatcccagcactttgggaggctgaggtgggtggatcacgaggtcaggagattgtgaccatcctggccatggtgaaaccccatctctactaaaaatacaaaaattagctgggcatagtggcacgtgcctgtaatcccagctacttggtaggctgaggcaggagaatcacttgaacccgggaggcagaggttgcagtgagccgagatcgcaccactgcactccagcctggtgacagagctagactccctctcaaaaaacaaaaacaaaaacaaaaaacaaacaaaaaaaatgcagattcctgtactggagcttttgcctctacaggggaagggccaggagtctgaagttcatgttagcacttggcccaggagatctgatatataccactgtttgagaacttttgatgtaactagtacccactggccagcatgaagcttatttcctttgttctctgatccagagcacatgggccccttgcaagctaaaattgaccacaagatagaaaagggagaatgagaagttgcagagggagtagacgaggtgggaaggtcagggcatgattacaaattcccgaggcatttcagttgaagttggagccttacagcttttatttaaatactgctgagacgttctagttcacgtaccaagatgagaaaaaacagaaagacttgaaacttttggaaaggaggcactaaccagtattatttgtagatgatrtacagttgacccttgaacagcatcggtttgaactgtgcaggtccactcataggcagattttttcaactgagtacaggtgtatttgtgggaggtgaaacctgcctatactgagatctggcttttcctatatacacattccacagggccaactgtaggacttgagtgtgtatggatttgggtatactcaggggtcctggaaccaataccctgtggataccgaggaaygactgttaattgtctacctagaaaaccaagagcaccaacttaaaaatagcaagatttaatatgagaattcagagactggccagttacaaagttgctgatcaaccaaatcagaatcccagtgaattgaatacattcattgaatgaatgaaataacagttgtaatcttttactaggctgtgactgcacagcctagtgcatttcacccattcatccaggaaaaatttattaggtgtctgttatgcttcaaacactgcagatgtcaagacagataagatttagttytgcytcgagttcaccatctctagtggtgaagactcccaggctctttgaaatccatagrcagggtgacggtctcatgaggttcccccagccctgccccctgcacacaactctgtgccctgggaggctttctgagaggcaggtgggactcaccggtggccccttccttgccagtgttgacaaaggttcccaaacccctgagaacaacctcagtgggtccccggtgatgaagatgtctctggcaattttggcgtatttatctctaactaggtttgggggtggtccggggtggggcccgttcccaatttgcggcaggaatttccatgtgtggacggatgcctggatgaagcgaccggatctgcccaagggctacgacggctggcaggctgtggacgcaacgccgcaggagcgaagccagggtgagtgggtggcaggaaggcgctgggcatccatgctgctctccttacatggcccagggttctgtgggtcttgggtatgcagccaagcaggtggggaaagttttcataaaaatttcccaaaacaaaaagcatgctcagtccttcctgctattcccactgagcaggggcttcagtttgctggctatttttatgaagataatgccaatgacagtactgttaagagcaatgagatggtggcacttaagggkwcmctactgcatrccatgcgcagtacctacatgatccattttactcacaactaacctttcaaagtaggttgtcattatcgtcattttacaaatgaggaaactgaggctcagggaggtgaagtgagttgcctgaggtcacacagatccacaaggctggaccaggattcagcccaagtcagacataatggggatgcttatctcagctggttatgggttaccaacttctgggtaagacagtggccccttgtagctggaaggaccttgccgggggacaagggtgtctttgtacagctggggaagcagaggcatggggttggtctgaggttacttggaaaatctgtggaatcaagttatctttattttaaatagtgagtcctagtactaaagacaaagtcagcccagtaaagggaaaatagattagctcaataattctcaaattttaaaaaattatttgtttatttattttgagacagaatctcactgttgcccaggctggagtgcagtggtgtaatctcggttcactgcaacctctgcctcccaggttcaagcaattttcctgtctcagtctcctgagtagctgggactacaggtgcacaccaccatgcctggctaatttttacatttttagtagagacaggactttgccatattggtcaggctggtctcaaactcctgacctcacgtgctccacctcccttggcctcccaaagtgttgggattacaggcatgagccactgtgcctggcctttatttatttatttatttagagatggagtttcactcttgttacccaggctggagtgcaatggtgcaatcttggctcactgcaacctctgcctcccaggttaaagtgattctcctgcctcagcctcccgagtagctgggattacaggcgcctgccaccatgcctgactaattttttgtatttttagtagagacagggtttcaccctgctggccaggcttgtctcaaccacctgacctcaggtgatctgcttgtctcggcctcccaaagtgccgggattacaggtgtgaaccaccgcacccagcctcaaacttttttttttttgaaaaaagcagtccaactgctcagaaggaaacttcgtgtgccacctcataatgtaaagcagaactactccagctgaagtgtgcccagggaccagccggcccctccctgacatctctgcctcactcctgcagcccctgaagtagatgtctctcaaggttcttctaggaataagtcttagtttggctgtgagcctcatcccaaggatagcaaattcatctgcccacagggccagagagtgaacagggctgtctacttgggaagatggggacctagagacatgagcatgcagatccccaaaggcattcaggttacaatttaaacatactttgcgggctccacccatcagtgtgagactcctgattcctccagctgcaatgtgagcccacatggccctgaaggcaaaaaaatgctgttaaaagtgaaaacagcctccacatttctccaaagataaggcattgcccttataatagggggtgagggtggtgggaggtggcccccagaggtgggaggagcaggtgatatgcccacacccccgcatactctgcaggaagattctcagcagggcagtattgagggctctttccatccagggagtctaagtagcatttgctgaggtgggacagtagccatagcaaccaggcagtgagtagcgcagtgccactatctgcctgagaggcagaggaagccctgttccctggccagaaaaggggccttaaaagcccacctaacctgctcaccttatagataaggccagagagggagggtggggatgcccaggttcagtcaacaagttaggagaagaaccagtattagattaggagaccagttctcctgagtcctagtcctccaatacactgaattcacaggtttggctgccttaaagaggcaagggagaggagcctgtgtgttgaggattaaataaaaatagtggaagcagaaagcccaatgcccagaatacaagggtatgtaaaaaccaaagctactactgaggaactatcagtcaagagactaattctcattaagttgtcaatgactaataagggaactctctatccccatgctagaaataaaaagacagctcttaacaaaaatgaaaaataaataaataaataaatagacagctcttagaatggaaatgttcttattagcccagatccatagcaacagcttgcatttgttttaggcacagggctaagtactttgcctggattatttaatttaatcttcgcaatagccttagaaggtaagtgctgtttttattcccagttttctaggaaatggagccacagagagctgaaatgccttgcacaaggtcacatagctccaaggtgtgatgccaggaatcagacccagattgtgtgtctctgtgctctactggggactgatgtgctgggatgagtttaataggcagcatgacttcctattactgggacagaggattcctgacactcttcaagtcaaagctgagatgtgcccctcttttcagaatagttaaggatggcctaggaaatgagtacccagatgcttcttgggcaaaatttgcttgccagtcctgtttgagtttgggaatcattgctgccactgggtccaggctgggtgggctggggaaccccactgagagtgaccacccctggcttcccctcaggtgtcttctgctgtgggccatcaccactgaccgccatcyrcaaaggtgacrtctttattgtctatgacaccagattcgtcttctcagaagtgaatggtgacaggctyatctggttggtgaagatggtgaatgggcargaggagttacacrtaatttcaatggagaccacaagcatcgggaaaaacatcagcaccaaggcagtgggccaagacaggcggagagatatcacctatsagtacaagtatccagaaggtgctagcatcacagggctccttctgactcagcccctgagtcacccagaacatgaaaatagtcaagattgggggtggrcctgggcaacatggtgaaaccccatccctaccaaaaaaaaaaaaaaaaaaaaaaattagctgggtgtggtggcatgtgcctgtggtcccagctactcaggaggctaaggtgggaggactgcttgagccagggaggttgaggttgctgtgagctatgaccatgccactgcactccagcctgggtgacagagcaagaccctgtctcatacaaacaaaaagacaaatcctaattgaggcctttgcattgtttgaccagctcattcaccttgctaagactgtccgtkctccccagtgcccagtaaattagacatcttctcagcctggctttctggcccctgcagagctggcctctggctcccttcctgagcttaagttcatcccctagccatgctgcctgctgttacctgaaaatgctggctactttcacccctggccaaacctctgcttatgctttccctaactgaactgtctcctttgcaatctctactatccacaggctcatacgctgcctctgttcttgatgttcctcaatctgacagatttgtatttcccctgtggcccattggctgyggttcctgtaccacgtggtaaggaaaggaagacaactccatatagcatcctcaaagggtgcaagagtccagacaggggcaaactgaagatgggatgtgattaagaggaaggcaggaaatcgtaaggactcatagacgagggagcaatttgctatgctatgggatggcagatggtacccatgcakctggggcttttcccaccctccattgcagtatagttacaagcaggtcagtttggacccctgggttgattgtgagcttgtgtaaaaccttgtacaaggtaggcctgcagtaaatatttcttccatataaatgaggcaagtgattgatggctaccaaggcagctcaggacaaactggagctctccactttgaagtctctttgtgttcagaatggacgtggatggagagctttgtaaccaagctcagaaattcctgtcttacagctgctatctctgaaatagaatcttatcctcagggttgtgttgaaaatgagcaaacttgattaaaagcaattaggtcaggagtgtttttttttgtttttgttttttttgttttttgttttttgttttttttgcagggtgacagaagtatcagggagggagggaaaggatagagagggagaccagtggtgtctgtcaactgctacacttgatggtgtccctcaggtctctgaggctctgttcactcttcctcattgtttttcctttctgtctctcagactagatmatcttatgacctgtcttcaagtttgctgattttcctgcaagctctaatctgctattattgtacttttcaactccagaatttatatttggttcttttttaaaaataattttaatctctctcgatattctctatttggcaagccatttgttytcacactttttttttagttttttgaatatattyaaaatagctaatttaaagtctttgtctagtaggttcaatgtcagggcttccttagggacagtttttattgactgtttycatgttcctaccctgccacccccacaccaccatgtatggcctatagtttgtttgcatgtcttgtaattttttgttaaaaattggacattttaaagaacataatatggcaactctggaaatcagatcctgtcccccatcccagggttgcttttgtggttgctatttgtttaacracttctctgatataattccagaaattctataatctttcttgtccatgaccactgaattctctgctcagtttgctgaatggtcagctaatgattagatggatattgctttaaattccttgaatcattaagactcctagcctttggcaaggggctctgtgtacaagttagggtacatttcaatgctctggcaggcaatttacaattctgccttcacttcttgcttgagcctcaaggtcagttagaggtgagagccttatcagatctttctcagaccttctagatttccaggaatctgtctgagcttttcaaagcccccgtggacattttgtccctcagcttttccttttaagctttttggtcggcttcttttcccctcaactcccttcttttccttrttgccttaggaaactgcagttgtaaacaattgctgcaggttgtttgtcttaacaaatgctccagggaaaaggctgttggtaatgagggagctctgagtcaggtcaatgaagacaaactctgtgaatgagggtttccagggaatcgcccttaggtcaattaacaacaattctctggtagtggagcttttagcggaactccaaaaccattctgtcccctccagaggtggctaggctgctggttttcactgtgatttggtgctgtggtttttgagtctactstggagctggaaagaaggggagatgggaatcagaatgccacaaaactattcttactgagattgtgctgtttttcttgaataaatgctccttagattattataagcctttagttaatttcaagaattctgaaaaagttgatttgataatttttgccaatgttctcattgcttttatggagaagcagatttttggaggtctttattctgccattcccactgatgtcagaatgtgctattgcttaggaatggggatttgaatgatcctctgtgtgaatctatagctcatgggctccagggatgtctctggagtcctggccaggcagatggtctccttctgccacacgggtggttgggacatttggtccttgaaggagcacctgaaggaagctgcctttgtgtctctttcaggctcctctgaggagaggcaggtcatggatcatgccttcctccttctcagttctgagagggagcacagacgacctgtaaaagagaactttcttcacrtgtcggtacaatcagatgatgtgctgctgggaaactctgttaatttcaccgtgattcttaaaaggaagaccgctgccctacagaatgtcaacatcttgggctcctttgaactacagttgtacactggcaagaagatggcaaaactgtgtgacctcaataagacctcgcagatccaaggtcaaggtaccagaaccagagggaggagaggcctcaagtgggctcagggtcccacaatctgaaatccctcttctcctctgtggacaacttccatacattgataaatttttrtgtgtgagttaacacaaacatttattgagcacctaccccttggtagtcacaagaaagccagccacagaagaaaagtgrgccaaagagaccactggactagragcctgggtctatcgtagagttataaattaggggtgctgaaagtgtcatgagaagtcttctatggtggcagaaattttaatctcagatgcccagtcagatcaatgattatgagtacccaaggcacagtgttgggaacaagtgggatgtcctgatgacaacgggtaatgtctgtcatggactcaggatgtaagcttggagaacttggccaattattattccatcttgagcccaacgtcttgttttctaaagagagtatgggacatgtccaaagttatccagttcaattcacacaaagttaatctaattctgtgcttgatgaggagaactcatactggggggstatgatgaatgacctctcccctccaccctgactctttggcagtatcagaagtgactctgaccttggactccaagacctacatcaacagcctggctatattagatgatgagccagttatcagaggtttcatcattgcggaaattgtggagtctaaggaaatcatggcctctgaagtattcacgtctttccagtaccctgagttctctatagaggtgagcttcctgcaggccataaagggctccttctgcctggaagttggccatggagtgtgacggggcccctaagaaccctgagggtccttggttggctcatgcatatcttctctccccatctctcctccccaccctactacagttgcctaacacaggcagaattggccagctacttgtctgcaattgtatcttcaagaataccctggccatccctttgactgacgtcaagttctctttggaaagcctgggcatctcctcactacagacctctgaccatgggtgagtctgcctgaggtattcttagaaatatgcttctggrcatmtatcttgcacatgtgtgcatattcctgagaagtgaattcccagtatggggtcacagggtcaaaatgtagatacattttgctagtgccaaattactttgagaaaagattgcatcaatttatgctctaccgacagatctttttgattcttgccaatctagtggttaagtaatctcattgctttactttgcatctgattatttgtgaggttgaatatttcttacattaattgactctctcctgtgaattgcctgttcctaacttttgtccatttttctactgagtcatttattttttcatattggtatggtgtctttacacagtagagtgttatgtgctgtgaatttttttatagcagttttgtattcaattttttaaatttgattyttatttattttgaggtggagtctcactttgttgcccaggctggagtgcagtgacacgatcttggctcactgcaatctccatccgtccccaggttcaagtgattctcctgccttggcctcctgagtagctgggattacaggcatatgccaccacacccggctaatttttgtatttttagtagaaacggggtttccccatattggccagcctggtcttgaactcctgacctcaggtgatctgcccgccttggcctcccaaagtgctgggattacaggcatgggccatcatgcccggccgaacagtttgtatttttttaaacactaagatgtctttcaccagtagaacttttaaattttaatgtagtcaaatttttcaatcttttcctttacggatactgaatttcatgtcatcctaggtgcatagaaatattctcttatgctttttctagaatttccagctttatttacacaattaggtatttatctggaattttttttgggtgtggagtgatgtggagctccaactttgtctgtggttttcctagtactttgtagcactgcctttattatgctgtcaattcccatatatatctgggtctctggactctttaatttgctatttcatttgtcttcttctaatataacatcataccacttaaattattgtagtcctataataattttatatgattatcatatctacatattgatatgtattaggcaaatccccaccccacccccatttttgtctatagcacttttagaatcatcttgtcatataattttaaaacagctgggatttagattgatactgcattgaatttacctatttatttgggggagaattatgccaaatgacaatattgtgtcttgccatctaggaatatgagattttcccatttttttccagtcttttttatcacctttagaaaagctatattgttttctttatataccacttgcacgttattagttgggttaattccaagatgcatcaatattatagcttttatgaatggaatatttttcattgtattttctaattgtttgctggactatatggaaattgatttttggcatgctgatatatccagcaaaaaactttactgaactctaatgttttgtttctgagaggtttctgatggtctgtttcttacaggatgtctgaatcttccaagtaaaaatgagtagactcctattttccttagaccacgatttatcacattttaatgtgcacacaaattacctggggagtattgttacagtgtagattctgattcagcaggtttagggtggagcctcagattctgtgtttcctacaagctcagctagtattgcgaagccccagaacacactttgagtagtgaggggctagccaattccttgcatgtggattcaacataaaatacatgttcctcttagattttatgtaatagatgactgttgctaatactcatgaaacaagaacatctgtagtaaagtcaggcaagactccagggaagatttgtgaaatgtcagagttggaagagcttctggaaaccagctggttcacccgtcttgctttacatctgagaaaactgatagcagcacccagggtgcaggtacactgtgccatgccctggaatggccaggacttttcaaagaggctgagctaaggctcagtttcctggcttctcacccaactcatcttctccctcttcccataacatccttggctgattgtatgtccgtatgtctttgaattttccaggacggtgcagcctggtgagaccatccaatcccaaataaaatgcaccccaataaaaactggacccaagaaatttatcgtcaagttaagttccaaacaagtgaaagagattaatgctcagaagattgttctcatcaccaagtagscttgtctgatgctgtggagccttagttgagatttcagcatttcctaccttgtgcttagctttcagattatggatgattaaatttgatgacttatatgagggcagattcaagagccagcaggtcaaaaaggccaacacaaccataagcagccagacccacaaggccaggtcctgtgctatcacaggrtcacctcttttacagttagaaacaccagccgaggccacagaatcccatccctttcctgagtcatggcctcaaaaatcagggccaccattgtctcaattcaaatccatagatttcgaagccacagaktctctccctggagcagcagactatgggcagcccagtgctgccacctgctgacgacccttgagaagctgccatatcttcaggccatgggttcaccagccctgaaggcacctgtcaactggagtgctctctcagcactgggatgggcctgatagaagtgcattctcctcctattgcctccattctcctctctctatccctgaaatccaggaagtccctctcctggtgctccaagcagtttgaagcccaatctgcaaggacatttctcaagggccatgtggttttgcagacaaccctgtcctcaggcctgaactcaccatagagacccatgtcagcaaacggtgaccagcaaatcctcttcccttattctaaagctgccccttgggagactccagggagaaggcattgcttcctccctggtgtgaactctttctttggtattccatccactatcctggcaactcaaggctgcttctgttaactgaagcctgctccttcttgttctgccctccagagatttgctcaaatgatcaataagctttaaattaaactctacttcaagaaaactctgtggtccctgagtccttttttctttatgccaataagcttcttaaatgtgctggcggtttatgcagtcacttggggagccatggaatcctttgatctccccaggcaaggtgctctgaggagttggcttctttattgtctgttcagtacatccaacccctctctcaaaggctgtcaccccaactggatacacaccctggcaaaggcacgtagcttgaatgagggttattttgtgtctaattcacaggagagtcatgggtgggatacctgtcatcctctgcctttccagctgtccaagtgaaaaaaacctcaatcctggtcacccttgcccaagttgcccacatccctggcatacagtaggtgttcaataaatgtttattgaaggaaaggtgactgttccttctgctggaaataccacaagggtggtgacacaaacaagagtttggtcagtcactccacagcacagtgtccgatcccaagaggtgatatagcccggcacggccactgtgtggtgccgtatgacactcacttgtctcccacactgggaatggaagaaaagtagctttcctagaggtgcctttagggtggcccataaggaaggacactgcccaagggtttgagctgggatctcttaattaaaacaggagactccagtcactgagggtgagcaaagagctttttattcaaagaaagaggcaaattgcacccaatctctctccctgtaagatctcatctggttttgacatcagttgcaatgctttcagtttgaggctaagcagaatgttatgctgtgaatggtcaccacagagagaccactgtgttgctggtgtggggaggcgaggctcagggttggacaggttaattacctacataaccctggctgtggcccagcccagcacctcccagaacagggactgacatggctgaggtctaccttggagatggggtcagtgaagaggggaggcagggtcagcctctgtgcaagtaaaatgccccctcaccccagccttcctttccagagcaaccaatctgaaaacagaattgcctttggggctggtgttgtacctctgctttcaggccaagatggattccctagaagaggagtttgaagcccaatgtgcaaggacatttctcaagggccatgtggttttgcagacactgctgtcctcaggcctgaactcaccatggaaacccatgtcagcaaacagtgaccagcaaatcctcttcccttattctaactgctgccccctaggagactccagggggcaggcattgcttcctccctagtgtgaactctctggtattccatccaccatcctggcagcccagagctgcttctgggttaggacaacaaatagggggccctacagtcagagcagctcttacccaaagtggtgagcgtcaacttcctgtccagattgcaagttaatggcctttacagctgactcgggctcctatgtcgtcattaataaatattaaagctgataaggaccaagaaagtgggcctgcagcctgagtgtgggaggcccaatgtctttctggttgctctgttgatgttagaatcccaccatcacccctctcgtgggtcatagttggagagctctggcaagggttagggcagaggtggctttgtgaacactgggccctttgagcaattaaccccaggccctagtgggtcatcagttgtagagagacggtctctggcaggatcgttgcccttcacagagtgtccaaagatgctgtccaagaaccaggatgctgcttggctcttttctttctcacggtcgccagtttcctttctcagcatcctgaggctgcacctccaaacactgaccttcttctcctctgaactgcagccacaggccccttggggccaggactcatgcccttttgcctggagctggaaggggggccctaacactgaggtcttgcaggggcatgctctgctgagtgcctgtgctcctgccaatcctgacgccagtagacgctggggaaatgggccaaagagaggaacaaaggcacgtggagggrgtgggtggtgaatccacttcttataccaaacggggataagaacccttctgttgggctttgtgcagaagatgctgcttcagcaaccactggaatggggtttaggagcaccagaacgctgctcagaccttcagcagtggtcacagacaccacaggcttcaaatggggtgaatagagggcagactcatcctggtggggtgtgtgtgtgtgtgtgtgtgtttgtctatcttcctgattcatctgattcatcaatcagcagaccctggccatcacccatcttttcagagacaagatgggcaccaatttgggagaactggccttttcaaacacacaggcagggtttatggtcagttctacctacatgtgttattagactccctccaagaggtaacattcaattaagttctcatgcgagtggttagggagtccccagtagctccaaagaggtccttcccatatccacatctgtgaatggctagatatgtagccacaggcaggacagctcccagctgtctcgctcagtgaagactccagtgtctgtggaatgggggctcattttcggtgctactgtcttaactctggctctgtccatgctggacatgtcctgcacatgtgtgtgtagagcttaatgcagggtcctctttgaaccatgcctggcccttgcaggtagatgtggcagccacctctacctcctaatttcggcaggcagcatggggaagccctttccagggagtagctggcagctctgcagtctttccaggctagtctcccctgatgtcagtgtcccaacccaggtccccaaggcaagccctgcccggtccttctgtcacaaccttacttctcaaagccaggagccaggggcccagccttcccaagagaagacagaaatcctggggaaagccaaaggcaagctcttttctgcccctgggatgccctgttcaaaagctccctttgctgggcggagaatgtgaaagccacccagtcttggagaacggttcttgatgagccgtctcagtgcagactcttcttagatgaactctgagaaagcccccatcctcctctgatgtccccagcctactcccgacccccagacctggcccaacatggagagaagaaggaggggaaatggcaaggccaagcgagtggctaagggaagcactgggggtgctgggagcgcaccatgcccataagcccctttagccaaaaccccaggatgaaggttgacagcactttttagtgtttgcttctctccccacagcagcatctattcatctgtcacctccacagagtcctcgtcctttgtctcctctgatggatcctccattgtttcggtgtctgacagcgatgtcacctgccgcaccatgtctttgtcactggggatctctggctgacacggtctggagaaggggttgaaccagttcagggagaagtccccaccaaaggtctcctttactgactgccagctccccatgtgctccctgggctggttctttcgtttgaggcgctcgatgccctgcagggagaaggggatgaagaacatcgtcagcgtggtgctgggctgtacagctcacatagacacccccagctatagcatagcagtggcgggggggggggcggggtgtccacggcatgggtaagatggggtctgagtgggcagtctgttgtggcccaggtcacccccgggaggtccctcagaggactgctggggtgtgggtggacagcagcgtggaggaacacagcaagcagggcccgcctggtggactgacgtgttctccacccaccacccagccctccccttctttccttccacaagtgcaatgccagatgatgggcaggggctaggctgatgagtggctgaggcataagggggaccacacatcctctgaggccactacaaactggtgatcccctcctaaatatttttggccactcccaccagggtagataggggctgcaaacacagcagaaggacgatggggttaaggaaggagtgcaggacacaaacagcatgcgaggtgaagaagcgggtgctcgtacagcaagtgccaacatgcattaggcagccggagggcacacaggaccactgtggggaggtaaggctgggctcaggcctgctcatgcagcagatccaccctgcagcctcttccaagctgtcaactcacctgcctctgggtgtcggctgcaactcagccaccaggccacagaaagggtgttggggtggggagatgcccagaggaggtaaagacatggccaggccagctctccaggcccacaacaccctgcacagaggcctttgaccctccactgggggcactgctttctccatctcttctggaagccaagggaatttgctgtgggtttgctgggcttgggcactgctccttcacatgactcaagaaagatctctgtgtatctagcactttttcttcccacgccatttcagagatttaagattcttgacttttgaataaattctaagttaaaaaaattggatctcaaaagtatatcctcataagatacttatcaattacaaagggaaaaacagtaccttaatagcagggaagaaacattgcacgtaccaccttcacccaatgatcaaagttaacatcacaataatgaaacgtatcaacaccatatgcctcctgatacggtgcaacgaggacacattgcttcagcagtgctcctgccccaaatgcctaacctcaatctaatcatgagaaaaacatcaaaaacacaatctgaaggacagcctacagaatacctgccctacaatcttcaaaagggtcaaagattgatgaaaagattttggaaccagacagacctggtggttacaaaacattgtgaatgcattaaatgtacactttaaaatggctaattttgtgttacaggaatttcacctcgatttttaaaaagggtcaaggtcatgaaagacaaaggaagactgaggaactgtcacaaactggaggagactaaggagacatcgcaaatgatgcagtgtgggatcctggaacagaaaagggtgttaatgggacaactggagaaatgtgaataaggtacatacattagttaagggtatggtgttgccaatgtccagggttttatatttgtattatggttgtataaaatgtttacctttggtgagactgactgaaaggtacatgggaactctttgtactgtttttgtcacatttttgtaagtctgatttcacaaaaagtttaaaaataatcaataatctgagacaaagatttatgcaatacaaacttgaacactgaattataataatgcaaagctggaaatgagaaatgcccaataatgatggttaagcaaatgattctataacactatgcagctagaaaagatggtttaatatggttttacatgacattagaacatttgtctgagtggttacttttggggatggaattctagaggatttgtatttatttctgtagacttctcacacaatccaagttttaccaatgagccaatgttacttttataatcagaacaaaaatagttgtttcagaaaatggatcttgttgacacaagtctaaagggaccttcatgtgggtcatgagcatgtgatgccatgctgcttcctgactggcccctcgccaggcctcccttcttggcacagaagcagtgaccagctgagatggtttgctttgggcattctgcattctcttcctgggtgatcatctgcagcctgttgagaaagaggctttaacttcatagcacgagagctgggacatcaccatatggcagacccggctacagaggaaacacccaaaaatgacagactggctgcatccacactgacttggactcaaagccatgaccataggtttttatggcctccttgtgaggaggtgggtatgagtattgatgattggcagatggggaagaaacagaagttccaagaggccatgacggtggccaaggctcatctagcttgttatgtatcagaactg

SEQ ID NO: 93250 - DNA, 78726 bp, Homo sapiens
  misc_feature (1)...(78726): n = A,T,C or G
tctgaaaatacgacaaaaatattttttagtaaatcaaactatgagaaaagagacaattgcaacaaacaataggtatcaccaaaaatatgtaaactttaaaagtcttttttaattttcaggaataaaatacattcaccagtgaaataatttttaaaacatattattgactatatttttcaaacaaaaaatgaggcctcatatagtctaggaaatttttttttgctatgagaatatatagatgtgaaaaagttttcaaaataaaaaaacatatatagttacatatttaataaatactcttcactgaaagaaaaaagtacatataattgggactatctggaaaaatccaagatatgtgatcttcctaacaataatctttagagtgttgtacttcatagactcaattaaatcatttttaaaatgcaccatattttatgtactgtgaagaaaaataaaatggccaataaaactatttcttattgcatcaattgtaagacacactgtgattttagaggagttaaaacataaataagtaggatgtcttagaggagaagtatagtgtttatctcttgtaaaagatataaactaaaacttttatttatctgattagcaaggctcttttcacagaaatcttaggctattattgcattttaccagaatatgattcctcctattaaactattattaataataaagagtttgcgaagaaaaaaacctaagtaagaaaggattagcaattgcaactgtggcaaccagtgactggtgcctacctcagtgacagagcaagctgtcatgtcctgttccagtggatctagcaatggtggcctcaattgaggttttaggaataattttgactgtaatcctgactgttgcttgaaattccttgtttctcccagttttctatgctgtgttcttcagttcttccaagagttctgtgaacttcttaacatcctttcaataagttccttgtctgcccaactcaaccagaatcagtgttttttgccgcatgctttaactgatacctctggatttctgcaatttgttgaagagggataactgacatagtttgaggcaaatcagtgattcggcccttctaaagacagttaccaatctcttccacttctccaaatgatatcctctaaatatatatatatatatatatatatatatatatatatatatatacacacacacacacatatatatatagccatattcaacaataacaaaatacttgaaccatacagtataaaaagctcacatatacccatttttaaaagcacaatttataaaattatagaagaaatatgttgcctactttacaaagaaattaaaacaaaatttaatttgcttagagctactaggattcagtgaagaacctagaaatggaaggaattccacagtcgtcatattatatacaaggtagaagagtagtaactgatttcagttaataatggggaatgccaaattcattaattgtactacctcagaaggataaggcacaaattaactaattgggtaggctgatttctttgtacttgtttgcaaagtctctctaccccatttcataatttctacctacctcaccaaagcaatatcagcatatccttatttcttcacagtcctctggggtgttgcagtttagcgaatttagaagtcaaatattgttctcctcaagaaatgtagctttcaataatatgaatgatagtaataagtaacacttgtgtggtgcttcacgatggccagacactattctaagtattttacatatattaaccagtttagtcttcataagaatcctaggaagaaaatattaccttatcctaattttgcacaaggacactgaagctaattgcctaaggccagtaggtggcagagctgggatttgaactcaggctagcttcagaatttatgtgcctgttataacaaactaacccccacccccagctttagaagttgcttgtttctgctgctatatatttgtactacatcatggaccaggcagattttgaagtataaaacttaatataagttttatacttatactaagtataaaaacttagctttcctttctaaccctttacatctaagcctcaggttttcttccttgtaaaacaggagtaatatttgttatgcctagcttgtagatcgttgagtagaagaaatgaaataatgcatgcgaaagtgctttgtaaagtgttatgtaaagaattattacttaaattatgaaggaacatgtcatttaggatatagcttcagctgtgtttgatgaaaatgttgctgaaagcaaattaggtcacagctagattcaagctatgattcaagctaggttcaagctatgactcaaacccagggttcttggtatagaaactccatacttctaactacaccatagcactctctcctctgatactctctcactacaatacttgatagtacaccattattttcccgtgcaattccattaaaaataaaaatgtaaatataagttgtttttcaagattttcccataaaatgtttctctggtggcctaaatcagaaattcctacctctaacttataaacaaagctgacagagggcaacagagaaagataggtcaagcgacaaaagctgttacttgggtatctaagcaactggaaacgcttggctgaggaagatttcttccgcccctggcaagctggggacattccagcagggcacctttgagcctctgatgtgaaaagcagctcagattcacattcccaccccagaggggcatgtttatcagtctgggaacattctgagggtattcagggaagagtggtaacaaactgcttcatctactctcactacttcaggcaacgtctctgcatcttatgctcttattacttccagcaaaagagaaggtaaacagtaatctaaaataaaaaccatataagcaataacgttagcactctctctcatctctctagcaaattcctcattaggagttagaaggtgaaaaaaaattttttttaaaattttttttttaatttttttgagatagggtctcactctgtcacccaggctagagtgcagtagagtgaacaggggtcacagaggcctcgaactcccaggcccaagcaatccacccgcctcagctttccaagtagctgggactacaggcacacgccaccatgcccagctaatttttaaatttttgtgtagagatggggtctccatatgttgcccaggctggtcttgaacttctgggctcaagagacattcatgcatcagcctcctaaagtgctggaattacagatgtgagccaccacgcccggctggaaaatcttaaaatcaatccaagaagtgctggctgggttgtactacgtgattaggcccatgcatatgcttagggtttccatgaagcccttcagcaggataaatacaagaaaaattaacaggtaaagccttagaaaccattacacgccagattttgtgttaccaaacacaaatacaataaatttagagaacataagttccctgaatgaaaacgaaagataaaaataaaaaagaaagaaaaaggaaaaattagaaaaaagacatagaaaaagtctgagaacacagagttccgtaagccagttgtggttgagtatattgtacagtatcttaagtaaaataaagtcattactacaaccacttttaataagtattaaaatcaacttctctctgatataaagtgaaaatgaagaaaagtgagtgtctatgtaagtctaaaatagactttaaatgaagaaaccataaatactatacattcatgggttgcataacaatgtttcagtcaacaatggaccacatataccactgtagcctataagattataataccatatttttatagtaccttttctatgtttagatacacaaatacttaccattgtgttacagttgtctaagtaataggctataccatgtagcctgggtgtgcagtaggctatgccatctaggtttagtataccctgtgatgttgcccaatgatgcatttctaagaatgtatccccactgttaaacaacatatgactgtataaatttcccttgttgtgctatacctttgccatcccatcatttcttcattcacctcttcagcaaacattgttacctatagaagggtggtttttggcactgtggaaagagctagacctgtaaagatgaataagccagtttctgctgtctggactcagtctattcactcaactagtggtaatagctataatgaagaagattgaaagaaattgctctcttagctaaaacacaagaaggagcagagcttaaggaaggtgaggtaagtagaacctcacattctattttggcagtctttgcattggtcccacttttcctgggttggggaatactgtttcttctatcacgcactactgtcctctgttgttcccctctgtcactcctctcactctcttttttcctcctgcagcaaagggaaaaagtcaaagaggccatgagaggactaggcaaaggggaaacaggaagttgttcaggtaccttgtgtagtaggtctccttttcttggaccatgggggaaagcaaaggctggattctgatcgtctaagagctaaaagggaccacagaggccatccttactatccgtttacagctgaggacactgagggttaataacttaccaaggccatgcaattagtggcattggcagcactagaactcaggcttcttgacttccagagagttagaatggagcacttctaatcctttatgcagggtagggtagtagccagagatggaaaccctactactggcttcagccattattctgattatcttcttcactatcaagcactccttcatttccgatcctccaaacaattggacaatttattaatgtagtcaccccatagttctctgttcagtagggacttattttcaaatcttctctgtcatttcagttatccaccccataaggaacaaattatggtttctcgacatccttttgaaaacgtgcaacccaaactaaccgcacagcttcaaagatctgtttggtgaggtaaaatgatgtctttgtgttctgcttttcaatgcatcctaatttgacttttggttttgctcatttgttagtaaattttcaacactttacttacttttaccgtgtcagtaaagaccttgaggaatttacatagttgatctatttctataagggtgctctcctgaaccttgtcctgtgtgaaggcccgccttttttcttttttctctttgtttctctctttttttcatttgttagcttgtcagtaatgaccgggtggcggatacatgtcaagaaaactaatcaccttctaacaggattaagactagaattaatgcagatcttgtgcccttcctgttcccgctttggcagcccaaggtccaccactgctcagagactagctggagggcaacggcgtcccatagcatctcacactgtgttgggatcctaggtggtgacctttgtgagattcagtactgagtttctgggagacggcgctgcggttgtgatcggaattgttggccgacgcacctctggacgcccagtgaggcaaaagcatctcctgttttcaaggtgatgacactgggctggaatgccgcggggccaaccagtccgtcctgccagacaagtttctggtccagtgagcctccgacccgccgcgcgtgtcaagctgacaaggccggggaggcgtttgaagcagcagtgttgagcgctgttaacatttagcgggcgtctttgagtagctcctccagccctcgcagcggcccagggactagcctgcaagttctcaacgctcacttccagcccgcgctggccccgcctccgcctcccagctcctcagcctcctcccgccccaccgctcccaccttttctcaggcccccacctgccagcacgcagaggcgggggcggggtcgcgggccgggctcctgacgtcacctcacggggaggcggggctgtgggaaccgcagtgcagcgcagaggggcggggcctgcggcgcgagacctggtgcgggaggcccgggcagggagaagtgtgcggggccgggacaagccggctccgagtccggctccggggggcggggcgggaggggcctgcgcggcggcgggagcccagagccgcgctaaagcgggtcaagcgtcctccttttctccccgccccttctcctcctcctacctgggcctctgcgtggagacgcgcacctggcaaccggaggccgcgtctccgccttctctgctcgcgcctggcgcccggagcctgcccgggacctccgccggagccgcgctcgctgcaggcggcctcgagcgctctctcgttgatgccgttttggaggtgaccggcgcggcggccgctctatggtggggccgcgttagtggctgcggctccgcgggactccagggcgcggctgcgaggtggcggggcgccccgcctgcagaaccctgcttgcagctcaggtttcggggtgcttgaggaggccgccacggcagcgcgggagcggaagatgttggagctgaggcaccggggaagctgccccggccccagggaagcggtgtcgccgccacaccgcgagggagaggcggccggcggcgaccacgaaaccgagagcaccagcgacaaagtaagtggagccgagagaggcggacgccgcgccctggctgggtcctggttggaagcgggacacttgagagcaagggtggggcccgtccagcgtcaggtgaggctgcacgctgccggtgcaccttcctccctgcctggcactgcttcctccttctccagagggggtcgggacccgggatcccagtggcggtgaggttcccaggatgaccgcggccgctgcccgggagaaatgggccactcaacccggcttacagtttagcttcatcctcttccggtcccttcttcaggatctggggccgacgctggaatcaggagggaacctgtcctcctaggggctgcagtgcagttagtagctgccacctcacctctcttttcagtagagggaacaaagttagtaaggactagagacgtgccaccgtcggctgtatcatttcatcggatcctgacgcgggaggcttggcttctcgcgctgccccatatgcacttacattttctccatcctttttcagtatgatagattttggaggttttagagtatcatgcacgtgacataatagtaatcttccagcttcttttgagtacacgacagacagtgcaattcttctgtctaccagtagatttcatataacccgacgttaattcatgaagacttttcacttccttttctatagattactcttctttcacatttaagaataagtagatgcgatattactatctgtttaaagctagaaaaggaattcgggcgtgtttggtaatatagtggtgcaagtaagaacttgtgaagaaatgcagttttatgaycttatggactggatggtttgggaaattggaccagagaatagattgttgtatcaaaccgtctgtttagaaaattccattttatttgagaaacccaaaacacgtaaactgtttctagaagcatactttggaagcaggcattgcagtttgaattacagaagtgaggtggattgcccaaggtcaagttcgtggctcttgaaactagaatctaagtttcctgattccttttcttctggtttatgtggttgctgagactggctggcagttctgatttggggaggattccacctgaaagttgatgttgatgagtttgatgtaacccaaattacaaagccctaataggaacatatcacatgatatcacgaaataaacgtaaacgtgattcttagtactaaaactttagaatcaatggaatcaatgtagtgacacttttccccttacccttgatagtaagtagaataaaatgagtctgtaataaaacataagtgtcaaggaattacccaaaatataacaatttccagctactgaaggttgaagttacaaaactaggaacagtgggctgagaatagtctttgtgaaaactgccttggaaactagacccaaaatagaattaattaggttgggatttgttttgttttgtttttagcactggtatagtttagcatcaaggaaataccagcttctctatgctgacttccttaactcgacaaagctaacaagcttttgttaagagaaaagatgttcaggaagccatgcataaaataccttcggaattaagttttttctttttttaacaccataatgtatttaaaatggaaactacttctgtagtgtgatttgactcattagaactgttgtctctagctatctgtgactaggttacctcgctgcatatttatttatttatcaatgcagtactgttggtttttattgacacatgtccagctggattttgttttctgaaagtagactttgctatatgtaacctgttttgtcaagatttcttagacaaggatgaacatattcaaaccatatctaaaatactgctctacttttagagtttatcatgaggaacttttgacttggcaagctgatagatattgaactctatccctgtctgtcctttcttatcagggtgtgtatttgaatacacctgtatttccaggtcaagggctattttaaaatcagtttgcacactggaggctggttaatatttggtcaattcaaactcattaagggccttccctgttcagttgcagtaaaggcaaaactcttggggaattagtgaaagaagtgaaggaggtacattatattctgctattataatacactcccatgcattgccattttgtagtcttttaataatggtgttattaacatgacactccctttgttccggactggtgacttatgctgagagaaggctctgtactccagataattagcaagtgaaaaaaatacttcttacctgcagaggaatgttcccaagtgttaaatgttggagtggtacttgaaaaatgacaagggacatcttcaaggaaccctgcagragacatatatgagttagatttattggaagtctgtacaaggctcattgttagcatagagggcatgcttggcgtctacctggagactgtaggaaaagctctaaacagtggatgaggattgagctgggaatgaaaagattcctgggactcaccaggtttacaagggtttgggtagggtgttctaggcaaaggacgtgttgggttttttcttgaatcagcattctaggcacagggttgcagatacagaggaagagataatgaaggtcctgagagcaaaaggaggaggcattgcttagagcagtggtccccaaattttttggcaccagggatcagttttgtggaagacacttttttccacggatgggttggggggatggtttcaggatgattcaggtacattacatttattgtgcactttatttctattattattacattgtaatatataatgaaataattatacaactcaccataatataaaatccatgggagccctgagcttgttatcctgcaactatacagtcccacctgggggtgatgggagacagtgacagatcatcaggccttagattctcataaggaacatgcagcctagatccctcgcatgtgcagttcacaacagggttcaagctcctgtgaggatctaatgctgctgttgatctgacaggaggcagcgctcggtggtaatgcgagtgatggggtgtggctgtaaatacagaggaagcttcactcgcagaccactcacctgctctgcagccgggttcccaacaggcccagttcctaacaggccggtactggtctgtggcctgggggttggggacccctggcttagaggacatcatcagtagtacttaggaataagggctgagatagaacgtggagtttagcaaaagatctaagtagaagcaagtttaggttgaggaaattgagaggtgaaatgttggtagttattgttataaagtggcagtgaaaggaatacaggatggcaactagagagacaggaggattaatgaagatttttcttttcagaggaggggagatatatatttgtatgaaagtcaaatgagtaaagatgttgaagacaatgggtaggccctaggaaaaagaaagcaaacatggggtagagactatggattattgggatatccaaggaaagaaaagagggatgcatgtcttttccttaagaaaagaaagacggaatgaagagtggatacaggaacattttgaaaagcagaaaggagaagatcaaatgttggatgccttcagttagtaaagtaggaactcagaaccaatgagcttcaagggatcttagaaacaacttggtttaactcaattcatatatatttgtatttgtatatatttatatataatttggtatatatacaattaaattttaaacaataaatttgtattcagttgaatcttcactgagtttaataattctgtatagttttataatagttaccttttggtcatttcctatcacacttcccaaaaatgacagttcagatgtgttccagtcacgttcagtgttgtgtgactgtgtgttaggaatatccccatttaatagctgagaataagaaaagcaatgggagtgatttaggcctggggagtgccagaggtccaggatgtagggaattagagagtcagtgaagccaagattgaagtggatgaccacagattcaggtcggcagggaagtgggctggtgaagatctaatgggttgagtgggaatgagtattgaaacagaaagagctaagacatgacttatgtagagaccaagggagaacttcccctctgccctctgaagacttgccagaaaaaactgacaacaggtagattaatcggagaaatggcatacaagtttattaacgtgtggggtgggaggagggagacagagtgattacctgaaccccaagaggctcagaagcttatataccatcttgaggcaaaggtggtcctgtcatgtagatgaaacctcatagggaggagccctcagagagaatagatggtgaatatttctttcagacctttaaaagtgtcagactctcagttagtctttcctagatccagacaagagagaaccttcagagaaggccaggttgcatcaatgcagattttctctacagacrcaaatctacctcacaaaagacagctttgcagggctgtttgtttgcaggccctctkaacagccatctcaaaatatgtcaaagaagtataatttggggtgaaatattctgatttccttcacttgctagaccctgaagtgggagaaaagagggtgcacattgaggctgtggccagtcaaggggagcacacgtggaatagtgtgctttcaggtaagatccctgtgtgtttgtgcatggggctgctacttagggattttggtttgtgaagttgaggagaaaacaatccagagatcagttaacgtctctcctccatttgagatgtgtgcagcttctttcataaatacattattattttcaaataaacttttaattttggaacaactttgatttatgtaaccaccccacaggttcttctttcttgctgcccagatagaactggtttatcaacacgggagaattgcaatagagaaaaagagtttaatgcacacagagccggctaaacaggcggccagggttttattattactcacattaacctccctaaaaatttggaggctagactttttaaaagatagtttggtgtgcagggggttagagaatgggtgctgctgattggttggggaggcaattgcaggggtatggaaaatggtccttgtatgctgagtccatttctggatgggggggccacaggagttgctggtttgggaggagttatccagtcatcagaaatataaaaatctgaaagtggtctatcttttaaaaggccaatcttagcttctttaatagtgatattatgtgtagaagtaattggagaagttgcaaatcttgtgatctccagaccagtggctggtaattgtttacatgtaatcacaacaaaattcagtcccctctcataatcctaaacttgtgaccttttattagttttataaaggcagtttagtttagggaagagctgttatcatttaacctgtaaactaaattcttccaaagttagcttggttctcacttgggaatgaccatgggcagcttgaaggttaaaggcaagatagagttggttaggtcagattttttttcactgttatgattttctcactgttacagtttttgtaaaggtggttggttttatttacagaagcattacaaagatttctatgtacttttcaccgactttcccgtaaggtttgtatcttgcataaccgtggtacatcggtcaaaacttaagaaattaacatagctataatatcattttagactgtagatactattcagaaattcactggttgttccactatccatttactgccctgggatacaatccgagattcaacactgcatttagtctagtttattttgttattgtaaaagccttattgtgtttttgtaaattacttcttcattttggtacacttcactacaggttgtgctgatgtcacctgtaagtgtaatgaacattttctatagtttttcatctagatctaggccattaataaaatactaatgtttagatctagatttctggactaccatttgggctgatactccctaattgttgataaattatcagtcagtattaccacctaaataattttccatgattcagcttttatcatgcacagcatattcatttcatttaataacatttttttaaaatgctggcttccaaaatatcggcaacccagccaggtggtaagacagagctgggtttttagcttactgcagtgaggaacacttccacagagccttggtagtatttcagagggggagaggcaagttgtaacgtatttgagaattggaagtttggtttaaggcaggtcttttttkttttgttttgttttgagacggagtctcactctgttgcccaggctggagtgcagtggcgcgacctcggctcactgcaagctctgcctcccgggttcacgccattcttctgcctcagcctccgacgtagctgggactacaggcacccgccaccacgcctggctaatttttttgtatttttagtagagacggggtttcacagtgttagccaggacgatctcaatctcctgaccttgtgatctgcccgccttggcctcccaaagtgctgggattacaggcatgagccacctcacccagcctaaggcaggtctttcaatgtggggaattgattaggattgggtaagggtcacaatataacaatttggggttagtagataagccagataaggattttgaggcaaacattttcaaagagtcttaggactaaactgttcattgatgcttcctttcaaagagttgatgtgtcttttagaaattcttgtaaacatcatgaactcctagcaagagtttccaggaatactcaagttatactaataaaagagtgaatctaaaggcatggtaatgtaatagtaagctatgtgcgggttaggaatggtagttaacttgagatttctaaagaatatctgagggttaccatgtgaattttcacttagtgtttatgatctttaaacarttcattttmttattattttgagagatactaccatagaatgtcatcaactacatcaagctttggatgtgtaccacagtgggtttttttgatgctgtcatcctaaggaagaagctgaggcataacatagaatttaaggacaatacttgagccaaatttaaagactttacttgagccaaagtgagtacactgcctgggacatacttccaagttgcctgggggtgtgccttggttggcctttgttataagcaagtttttaaaggcaaaaaggaacagggaatgggctggtacaaagttgtttgacaggaattctcattgccttacagagataatattgatgaatgattggctattcagttttaaaatgtaaggtatgaggtacaatgtctagtatatggtattttatggctacatggtatcagtccagagccaacatagcaagtggctcgaagaggtaattgtttagctcaaacggtgagagacatgactgctgacacattttaaatgcctctcggggcctgataatttaatgagactcatattcttcaaaataaaagtttcttttcctttttaacacaaacaatattttgtttgtcaaaatatactggggaaaagtgggacaatttaatgtcctctggaaaagtatgaagaaaaattaagatatatacacatgtagtatgagtattctttatgtgtttatgaatttcatttttgtaaaatagactctcacatttcttcccagataacacagataaatacaggggtttggcatgtttgttttcctttaaccattttatatttggggatgtcttttccaaaaatacagattttatttcagtgtaaagaacataggtcatttaagaaattataaacatatttcttgaggcttggtttggttctgtgcattcagtaaatgcttgttgagtgcctattataagcaagacactgcttgaatgttactttttggtggcttttttatactctttgagaaaagaggtggtgtcaggatttgtttgttgctcaacaactgattgtagaatatattaatctcttgaattatggactttccctgcatggaataatgatataaactaattttttagtgcaaaataatttataatttgcaaaatacttgcttatacttaatatcaattttagtcttttaacaattatataggcaagggagataggtttagtttacatatgagaaaattggaatttgacagcctaaatgccctgctcagaatcatggtatttagagccaggatttaccttaaattttctaattaaaaaatgtaaaggagaaatcagatgtgtggtcytaaatgtataaaatcaatttaaaacattaagaaaatttttactgttactaccttgtgtgactttggactaatttggtctttttgaatctatgaaatgttggcagcggattagaaatttttagctgaaagcctgtcattgggtgatttcaggcgcctagatttaaaacagcacttcaagtgtttcatcgcttacttatgatcaatttcaagaaatcattagcctttatttcwttttatagctgtttatactttatttggttgagaaatgtttcagaacttatttaatgagaatgacatcacattttgaaacaactctagaaatggagaggaagtaatttcattaatgaccaatttttttttttttttttttttttttttgaggcagagtctcactctgtcacccaggctggagtgcagtggcacgatcttgggtcactacaagcttcgcctcccccgctccccgtttcaagcaactctcccacctcagcctcccaagtagctgggattacaggcacgcagcacaaaagcctagctaatttttgtatttttagtagagatggggtttcaccatgttggccgggctggtcttgaactcctgacctcaagtaatccacctgtcttggcctcccaaagtgctgggattatgggcgtgagccactgtgcccagccaaccaattggtttttgatcatccctgagatacaccaagtttattatgtaagtatttacttattttcttatcctcaaaatgaggtgaaagatatttttcaggtcatgtcattgaatgtttgtttgcttaagactttctcagaactgtcaagattttaaacttttaaaatatgaaattgaaaggcacaggatgggagaaaaaagagtccagtccagagtggactcttatctatggaaatttatagctgctttttgcaaacaacgcagctaagaaagcagtgttgcttttctgcttcctggctatggttgtagttccctttatttgccggaacccatggccaactatttaagagctttctgcaaggctgatgtagccaatctgacttcatcacctgggtgacccaggtgggatcagacatcttgacagttaagttgtggctcactgctaccttccagtcccaagcaggtcatttcacaaacaatatggggctgtctgtgggtcaatgaatatttattaagcccatctggaagttcacattttatctcaatatataaaaatccagattcaggaaaccaaattagactcgtctttcaaggttgtgctttttattttttcatctacttactatgcttgtacttgaaccgtctcagagttgaggcttcgaacaattctatgggacactattcatgtagagttcaatgtagatagtgccccctggaattctgcttgtagtagtcccatttataataatgtatactgcttttaataaatatgaggttggtacaaaaaggtatacaaagtatacaagaagataaggatactagctagcgatctgggtgacttatcccctcagaggtattccttctttgtcttgataggtttacaacatatgtttgcatcctctgtcgcctttaataatgaatttcaaatgtatgattatttgagctcaaagcttgaggatggccactctggagcttagattcaagttgccctgagtatacactctgatcagcagcagttacaaggttttttttgttttttttttctcgtttagatagagtcttgctctgtcacccaagctggagtgcagtggcacaatcttggctcactgcaacctctgtctcccagattcaagcgattctcctgcctcagcctcctgagtagctggtattacaggcgctctccactacgcctgactaatttttgtattttcgtagagacggggtttcaccatgttggccaagctggtctcgaactcctgacctcaagtgatccacccacctcggcctcccaaagtgctgggattacaggcatgagccaccgtgctggcctacaagtgggtttttaaggaaaaaagaaaaggcagatcctaaattgtttaacaagaatttagattaaaataaactattgattggctacacattgttctttgcatcataaattccaggaagataaggggtgaggcagcgagtctgaaacaaaatgcctttaagtaattgctcccaggcacgggtgtgggggtgtgactgaagtcccatactctggggcctgataaattttacatacctcacatagctgggtcagctcagagctatttttcttttttcacctcaatcaatatattatttagtgtaggggagtgaaaacccttctaggtttcttggctgggctgcaaattaaattgacataagacaagagaaaaaccatttttctcttgtttaattacatatgtgcaaaacaaaacaggaaagaagggtcagatttttgaagtttatatagcaccctgagatactgaacggaacctattcagcttctaaggggtgctggccacgcaagttctgggagggtaaggggaggaaatgcatggtgaataaaggctgtcttgttatgcggatagtctctcaggtaatgaaagttgtctcagagcagctgtcttccttatacaaatactttactaatgtagatttcctttatagatatacattttttttttacaaaataactgcatttcagagctactaatgtgtctgcagtttctcagaattataatcttgaaatataccaaagaagtatattttggggtggcatattctagttctctatagtcatattttagggtaatatgtcctgagtctcaatattagttttaaagttttccctacttttttattgtaactttttaataatatcaaaatgttaaaaggttagtacaatgatcatcagcatacctaggacttaactgttattaagagattgctaaatttgctttatcttgccatatatacacagttggctctccatatctatgggtcattgctcactgcaggctcaacttcccaagctcaagtgatcctcccacctcagcctcccgagttcctgggaccacaggcatgcaccaccatgcccagctaatttttacattttttttgtagagatggggtctccctatgttgtccaggctggtctcaaactccttggctcaagcagtccttctgcctcgggctcccaaagtgctctcaaaggtgaagcacaggatatgaaaaccctcaaagcacatcatccaagaggtggccaaaatcagtctggtgatggtcagtttttaggaaaggggtgcattgtgaaactggcaagctgtcatatcaaagctgcaaagagggagagtccagtagcagcctcagatgactggctaaaggtgataaaagaaagggtactctgtttcttgttttctggagctggtttctgcttactccttaggaaagaattctggctaaaggttaataaggaaggggcatactgaggcatgtccaacctcctgtcctatcgtggctggaactcagtttccgaagtttctctggtgtccctttggccaagaaggggtttgttcagtcagctgggggggcttgggcttttatttttatttctcaattatttataatacctcatacaatgtaaattctacataaatagttgcatactgtagttgtacaatatagtatgctgtattgtttagagaataatgacaagaaaaaaatctatgtgtttagtacagatgcaaccacctttttttcccctttgaatatttttcatctgaggctggttaaattcacgaatatggaacccacaaatgtgagggggccaaccgtacttgtttctcactctaaatgaaggcaaggcagaaaagctggaggcattatttatcttagccctgaaaaagtgatgtacctgtgagaaccaatcattaataagatctcaggtaaaaaacaagtttgggatggcagtaataattcagattttgagtgaaactccttaattttctctgttcttttgtgtaattccatggagtttttttcttctagtgatctttattcttaatttggaatttaagacttacataaatgaaaccatacaaaatagtgtgatcttaatgtataatagaatgagatatcactggagaaagatcagaaggagccaaacatctaggaaagtcttaaaatgggccttaaaattaagtaagatttgaatattgtagatagcatcttaggaatggcaaaaaacagagcagcaatactgtagcctggaagacttggcccgattccatttggggatagagagatgacagtcataattctctcagcacatactcaccaagctcctggttgcaggaatggccatggtgggtgagactgctgggtgaacaggcaatcaaaacatgtcatacaaatgttggcatgcgaagagttgcacaaaatgggctgaggagctcccctagcttctgattgctgctaaaacaaatcactaaaaacttagtgtcttaaaataatataaacttaccttacagttctggagctcagaagtccaaaatgggtctccctaggctaaagtgaagatgtcccggtaggaccatgttccttctgcaggctgcaggggaaaatctgtttccttgccttttctagcttctagaggctaacagcatgccttggctggtggcctcttactccttgctcaaaaccagcatcactatacctctgcttctgtcatctcttctctgactctgatcctccagtcttccacttataaggacccttgtgattatattagactcacctgtataatccaggataagctcaccacgtcaagatcagttgattagcaaacttaatcctgcccacttccttaattctcccttgaattgtaccaacatcttcacatgttctgggattaagacgtgaatatcttggtggggggagtggggagggaagcattattttgcccttgacaggctccctgaagaagagttttctagaaattacatctaggctgataccttaaagataaataggcaccagtcaggcaaagccaggctcaaagaggaagagcgtaagttataaatagaagaataccgtagcacaatattgagaggctaagactcttcacactgtggggagcgcagaagctttagttctgcagagcctggagtggctgggtgggtgtggccaaagccctggctggagagtaagaggaggctgggtttataccctgtgatgaggaggtaggtggatgatgtaatcaggtttgccttttactcaggcattttatgttatgttgagacacatttggttttctcttatccaagcattgggatccaccacaaagtgtaactcctgattggattagtaaagtggtacactggaccaaccagtcacctccttccttcagtggggaatagaacagggctgcggagaaagatttggggacgagtctttccctttgcagttcaaattaaaaaaaaataaggaggctttatcaattatcattaattagtgtaggataggaccacagagctgatgaatgaggtaaccagatttctgtctataaaatacagtgttgtgggagcagtggctcacacctgtaatcccagcactttgggaggccaaggtgggaggattgcttgagtccaggagtttgagaccagcctgggcaacatagggagaccctgtccctacaaaaaataacaaaaaattagccaggtgtggtggccccacctgtagtcccagctgcttgagtggctgaggtgggaggatcgcttgagcctgggacggtgaggctgtagtgagtcatgatagtgcactgcactccaacctgggtgaccctgcctcaaaagaaacaaaacagtgttactaagtcccttgactattctctatcattgtagaggccttgagcttcctcactcttcgttcaccaaactgctgactcactaggaattaaatcagtttagtccttctccccagcacagatagaaagcagttccttctcttcacttccactcctgggagaaagagaaggaatccatgcctgtatgaaaaccatgaagaaggccgggtgcggtggctcatgcctgtaatcccagcactttgggaggccgaggtgggcagatcacgaggtcaggagatcgagaccatcctggctaaaacagtgaaaccccgtctctactaaaaatacaaaaaattagccgggcgtggtggcgggcgcctgtagtcccagctactcgggaggctgaggggagagaatggcgtgaacccgggaggcagagattgcagtgagccgagatcgtgccactgcactccagcctgggtgacagagcgagactccatctccaaaaaaaaaaaaaaagaaaaagaaaaagaaaaccatgaagaaacagacagaaaatgttgaaatcaggagcacagcctcatgttctttcaagtaaaactgtttagtttcaagatttttaaaaggctgcctcctttcaggtgtggagctctatgtctctgtgggtttcctttggcttaattgcaaatcttaatgctgaactgagctacagggatcagtgtccacatcaagggattcttgacggaagagctgaccctggttttctaactcactttttttctttttcttttttttttttaattttattattattatacttttagggtacatgtgcacaacgtgcaggtttgttacatatgtatactcactttttaaggggccagttgtaaaagagatgaaaagtatgagtgatttaatatattatcctttgttgcatttttaaccactgctttaccttcatttgtttagagacttccttttggagccatcatctatttttaaaattttgattcttattttaattaatttattttcaggtgggatcttgctatgttgcccagggtggtttctaacttcggggctcaagaggccctcctacctcagcttcctgaatagctggaaatagctgcttgccactgcgcccagctcttttttacttcaactgacataatagttgtatatgtttatggagtacagtgtcatattttgaaacctgtgtacagtgtgtaatgatggaatcatcctcttgatgaactatatcctttgttccctgagccccttgtccttgttcttgtcctttttgtcctcagtattgggaagcacctcagttctctttcctggactgctctttaagagtccccatgaactataaatgatactcactaaattgagtacacttaaagtgctatcttagctcaagatgttataatgaaaatactgtagcctaaacaacaggaattgatttcttataaatctggaggctggacattcaagataaacatgctggccaatttggttcctgctgggagccctttgcagacagataacttgctgtgtcctcccgtggtggagagattatttcttgtgcctctttataagggcaccaaacccatttgtgagtctccaccctaattacctaattgacttcattatcttacaaaggttacctccagataacattacattggaaaattgcacttcattgtataatttgttttttggcagggacagaaacattcattccatagcaaatataatttggcaaattttgacacacacacacatatatatatatatatatatatatatatatatatatatatatatatgcctatgaagccatcattataatcaagataatgagctartctatcaccactaaaagtttgcccctttttgtagttcttccctcatccttagacacgtactaatctgctttctggcactatagatgagtttgcattttctggaattttatataaatggaataatataatacgtgtgtgtgtrtatatatatatatgtattacatgtacattttgtctggcttcttttactcagcataattattttgagattcatccatgtatcaattgttcacttatttttatcacaagagaatattccactgtatgaaagtaacataatttgtccatttccctgttggctatttgagttgtccctagtttggagctattgcgagtaaagctaccatgaacatttgtgcacaagtctttgcttgtatctacacttcagtttatcttgggtaaatacctaggagtgaaatggctgggtcagttgttggttgtatatgtaatttttaaaaaaactgtgatactgttttccaaactggttgtactgttttacattctcaccggcagtgcgcaagcctttcagttcctccagattttctccaacatttggttgttcaattttaaaatttcacccattctgatagatgtatggtagaatcacattgtgattttgacttgcattgccttaatgactaataatgttgaacatattttcatatgtttatttaccatctgtgcattgcccctgaaatgtctgtccaaatattttgttcatttattgtttccttgtcgaattttgagagttctttatgtattccagattacaagtcctttgttagatatgtgatttgaaaatatgtttcgttctgtgacttgtcttctcattctcttagtatcttttgagaaaagaaaattctaattttgatgaagttatatttatcatttttttggaggataataattttgttatcatactaagaaatttttgcctaaccaaggtcccagagagtttatgtaagatttatagctttatataaatgtctgatctgttttgatttaatttttatctgtggtgtgaggtatggatcaaggttttttgttaaaattgtgccagtaccatgtatagaattacctttgcaactttgttgtcaatctgttgaccatatgtatgtaggtttatttatggactattcttttccattgatcattttgtctattttgtcaataccacattgtcttgattacagtagctttataagaactcttgaaaacaggtaatataagtccttcaactttattctctttccaaacttgtttggctcttctatgttctttgcattttcatagacattttagaaaaatttcttcaaaaaagccttctgggatgtttacagaagaaggtgatgctcagcaaggcttgcagcagtgaatgagaatggaaatggagggaggctgggcacggtggctcacacctgtaatcccagcactttgggaggccaaggcaggtggattgcttgagcccaggagttcaagaccagcctgggaaacatggtgatacaccatttctatgaaaaatgccaaaaaaaattagccaggtgcggtggtgcatgcctgtagtcccggctactcaggaggctgaggtgggaggatggcttgagcccaggagtctgaggttgccatgagccaagatcacgccactgcactccagcctaggtgacagagtaagaccctgtctcaaaaaaaaaaaaaaagagcaaaagaaaaagacatggagggaaagacaaatgacagacttggtgccgactgaatgttttggttaaaggaggcagatgtcaagtgttaaggtggtgcctaagtttctgacctgagtaattggttaactggattggcagtagtatcttctccaaagaaggaattacagaaggaggcagcattttgatgtggaagagagagaagtccattgcttctgttgaatttcaaatgatgccagtggaaaaccacctggagatggcatgttggaagctggagacataagtttacggggaatcatccgtgtatggggtccatgagatcacgtggtggtgggagaacacaggcccaagatagaaagttgaggatcattatctttaaattatgacctggagaagaagcagctacgaatttttaggttcttgtaaacattttaaatgccttcattcaggtacggtggctcacccctgtaatcccagcactttgggaggtcagggcgggcggatcacctgaggtcaggagttcgagactagcctggccaacatggtgaaaccccatctttactaaaaatacaaaaattagccgggcctggtggggcatacctgtaatcccagcaacacgggaggctgaggcaggagaatcgctggaacctgggaggcagaggctgcagtgagctgagattacaccactgcactccagcctgggtggccgagtgagactccatctcaaataaataaatacatacatgcatacatacatacatacgtacgtacatacataccttcattcaacatgcacagtgccgcatggctctatttgatcattaaaagtattatagtacttccttcttttccctgatctccattcacactcttattttccttttcaagtctagcatctttgcaacagagtctatacattaaatacagtaaaacaagggcccctgctactcattctcatagttgagtaacgttgctccaaaatgccactatttagaaattgtcttgtattctttaattactgaatgaaagactcctggtgcaatttaagtttttattttgtgtttctctaaagggtataaaatagaaatcagaagcttaaataatataaataaaagcaggacagccttgttgagggtgaggaggggagggttgcagcgcatcaccattactgcaaagtggactttgaagtggcttgcagagaactttaatattttgaggagcacaatttgaatgctagtctaatggttttagtattttataaataaggaaaccaaggcctgagtttccttcagattaagtgatttgctgtttgtctcactgctagttagagtagaggtggaattagagctagtaactcctgattcctagtctcatgctctttttgtaggatggtgatactgccctagagaaccacttccattagtcaccaaccccactacccctcacaccactcctgtcaatactctgggttattaaaggtgaaaagaaaatggcagggaaaagaaaaaaaaaactgatgtgtttcccttgttctagatgtccaagctctgtggcttaccagactgacggcaggtgccctgccattttctgaagggatgttctatctggttgtttattagttaccatctctctctatttaagcagcttcagggccaactgactctcggtgtcacagtgggaatttgacatttctatttctcatttgtaatttagggtacgttgacacatttaatttcgtaattgtgtacttaaaaagtgagtaaactaaagtttattagtgctttatgaaaactgaaaatactcccgaagactaacattatatttggtgagcctcctaatgaggaattagaagacttgattcaatcataatattatcttactgcttatttgaatttactaagtccttggcattatactaaatgcttcattttagggatgaagaaacagttcgaaggggtgatgacatttgccaatgttttggagctaataagggctgagtttggattgagaatcctcaacattctgaattgttgggtgcttttattcctaggattatttcaggcttgatatcctgctcaatgctctatttgtatttgcctccagggaatattctctttcctctatcccagttcaacaccctcactccagtttcctcctctgtaagccattctcccaaggtttctgtgtgttcaccactcataactgaaggttgccagggtaggatggaaagggtagggcctgaggcgggagaggttgtagaagaggaaagaacatggcagtggagacttacagcagaatgaacaactttaaaactgagcattagatgacatttctgttttgaaaattgcattgatcaccctatccctggaaattctgcagtgaccacctttgttgaaaggcctagagctccctgccatctccaacatactcacgcagctcctgtacatgcactcagaagtcggtttgtgttttaaataacttctttaaaaatctcatcaccaaatgctgttgatcatagtttacctaccagtaaaatagagatgaggtccatttgacctgcttcaattgggattctctcttgaggatctaataaaaatgatggaagttgaaatgtttacaaatatatatgaaatgctacgctcgtgtaagatattactcttactgttgatgctttaattgaaatcaaatttaaaaagggactcaacagctgatcagaatctacatggaactaacaccgtgatctcccagttaagtggcaaaacatctgattttaggggtatatttctgatttagaaaatatgggagcttcttttgtgtcttttgtttaaagttatcctttgtattattagtagtagattttagcgaagatagtcaaactttcctaacaaagaagtatagcagtgctaagattttcaagataaatagtagtttctttgtttcagattatgtcactgagatttgacacactgagcaataaatgaatgtattggccagcctgtgcttttttaaacgtgattttgcaaagtaatttgtctttttaattttaggaaacagatattgatgacagatatggagatttggattccagaacagattctgatattccggaaattccaccatcctcagatagaacccctgagattctcaaaaaagctctatctggtttatcttcaaggtatgattggatgaagatgagtatatcttagtgcacaagataggctttgaggttatccttgtccatgtaataaatttggctttttgtaagttttccagccatggtattaggtggtcaaaaaggccacctaatatccgaggtatagttctatgtatttaatgtgtatccacccttaaaaccttgtgaagtataagaaaaccaaggctgagaggttaattgttgaaggctacagagctagtaagatatagacctgggattcttgccttgggctgtcagattctgaagcctgtgatctatttaccacgtcacattgctttttctggtattagaacacctaataaaactccatagtctctgttccctatttttcaaatgccagacagaaataggtatttttttcttttttcttttctttctttcattttttaaataagatggggttttaccacattgcccaggytggtcttaaactcctgggctcaagcagtctgcccactttgacctcccaaagtgctgggattacaggcgtgaaacatggcaccaggccagtattttcttttcttttaactgagtttaagattattgtstaaaactccacaatccattaccattttatatttgtgcaacatttaaaaatgtgtgatgaccacaaaatttcagctaattatattacccttcattgtatactttagtaatatgaattataaaatttataaaagcaaagtaaacctaagcttttgtccagattaatgtatgaaatgttacatattggtgtagaaagaacaatgtttccccaactttttgacactatgacacagtaagaaatacattgtataccacattccaagacacacaaatgtatattttaactgctgcaaaaatgttatgaaacaattcttcccattactgtgtaataccctctgatttcttttstatttgatgctgttctatgttattgaacaaaaaatgctacatgtaacttattcaatggattttactacccttgggtcatagcctgcgatctgaaaaccactagtttagtcgtatctagtaaatgtaatatgaatttttctttttttttttactttgtaagggataaccatattagaatatattggttaaaagcaacattttcatattttttaaccaatagaacatatctttgatctgctatgaaaagcatgattattttaatagttcttgttcccagttgttttcatgacctaattcccagatataactttgcattaaaatctcatcaagtctatctcagacctgaaattttgtgtagtcgatgttctgtaagaatgatgccagatttgtgtgtgtcattcataataagatcttccttaatcatgaagttgtttttttctgatataaagtaacaatagcaaatactagcagctaatatttatttagcatttactatgtactagtattgtttcaggcactttatatgtattgactaatattctcatggcagccttgtaacacaggtatataaatgtggaaacgtaggcagatattatatatcaagggtcatgtagctagtaagttatggacccacattctgaacctaggtactgtggcttcaatgcctgtattcttatctatgctatttatgagtgaattggttttagaaaatgaacaatagataatatagtggtttcaatcttctcgagaaacttttctacaaagattacatgaatgttttacatgtaatctgttttatacatttttatcctgtttttagtctaatattgaaaacagactgtcttgcaaagacttagaatttgtagatacataggattaaaaatagtaattacataagaaatgtacattacttgcagaaaaaaaaatcctgtaatcctcctaccaagacattaatatttagaatacttcagtgtttaccctttgaggcttttttcttgtgcagtgtgtgtgtgtgtgtgtgtgtgtgtatgtgtgtgtatgtatggatgtgtgtaaagcaaaaatgagattgtactgttttctaccttactgttttaattttcattccatggtattattaggaacaacatttcatgcaggatcctaaatatatttcagaaacatttttaatgtctgtatattttgctgcatggctatggtctagtttatccaactgaccacctattgctgggcatttagtatattactaaatgttcacaattaaaaatacctctacattaaacatttttctttgtagtaactttattttaacatccattaattatttccttaggataaagtcctaaaagggaaatcccttggtcaagttttatgcccttcccttactttttttttaaaacagggtttcactctgttgcctagactggagtgcagtggtgcagtctcaactcaccacaacctctacctctcaggctcaagcaatcctcccacctcagccacccaggtaactgggactacaggcatgagccaacatgcctggctaatttttgtattttttatagagacaggattttgccttggcttgtggtcctttatttacctctgactagatttgcgacctagcccagttttctaatccatccattaatccacaaacagttatatctgtacaactacatggggccttttagccatagcatttttgactctacactcatttttagttctgcctcatgctcatgctctcatgagaagtttatgtctacatagtttgttaaacaatagagggaaataaagttgaatgaatgcaatttgactaccttatgaagaaactcataagctggaaaaaaatgtatgttgttggtatgttggtattttagatcctgtgtgtagaaatgacatgataaaaggaatatttgaaaagagtatttgttggaagtatttaaactatattggagagtggttgaaagcaaggaatgtaatcttttttttttttaagagacagtatcttgctctgccacccaggctggagtgcagtggcacaatcatggctcactgcagccttgacctcctgggctcaagtgttcctcccacctcagcccccaacatgccccgcctcctctccccccactccccccgcccctcagtatcggggaccacaggtgagtaccaccacgcgcagctaagttttgcatgttttgtagagctgggtttttaccgtgttgcccaggctggtctcaaactcctgggctgaagcaattctataccttatgaaggcagctaatatttctgttctaagaagggaatgagggctggacatggtggctcacacctgaaatcccagcactttgggaggccaaggcaggaggatcacttgagcccaggagttagagaccagcctgggcaagatagtaagaycctgtctctatttttttttaaaaaaaaggagtgaggacttgtgcttagaatacactgcatatatgttactagactttaagttgaatcaaaatctcttgtaacataatttaaatgctaccagttgaattaataaaaatcagaaaagtcctaaagaaaaacagcgacaattctaaatatagaagtcatcatttgtatataggagcattcagaaattctggatttttcatacagagctgccaacagtttatatgacatggtaacacaaggagtgattatttgtatggcacaatggggatgaagtgtgaggcttgtggcggtggtggggtgcggtcgggcatgccaggcccttacagcgagggttgagggagaccagttctcagcatggcaaggaccagctggtgtaccagcaggaaagctctgctctgaggagcaaagaaaggcccaaggataaagaaatactttgttttttggagacggagtctcgctcagtcgcccaggctggagtgcagtggcgcgatcttggctcactgaaagctccgcctcccgggttcacgccattctcctgcctcagcctcccaagtagctgggactacaggcgcccaccactatgcccggctaattgttttgtatttttagtagagacggggtttcaccgtgttagccaggatggtctcgatctcctgacctcgtgatctgcccacctcggcctcccaaagtgctgagattacaggcgtgagccaccacgcccggccaaggaaatacttttactaaaggctttgtccctaatcaaagaaagcagtcaatacactttgaacaacagaagtgtccttccatctgtctttatcctcagtggctgacctcttaggtaactggcacctcactccttcatttcactgaaatcactgttctttccagttttagttcggtattatctttcattacttattctcattggcagtccatgctgtctatatcatattcttaaaatcatgactgtattcatctgccatcctaattgggcatcatctcttttgagggcttttgtacctggctcgttcttcccctccatgtggtccctggtgggatgcctgactttcacatccaccctgaccacctaacgtcctaacctcacggtttattccccactcacatttaacaaaaattattttctttctggccgggcgtggtggctcacacctgtaatcccagcactttgggaggccgaggcaagcagatcattaggtcaggagatcgagaccatcttggctaacacagtgaaaccccgtctctactaaaaatacaaaacaattagccgggtgtggtggcgggcacctgtggtcccagctactcgggaggctgaggcaggagaatggcgtgaacccaggaggtggagctttcagtgagccgagatcacgccactgcactccagcctgggtgcgacagagcgagactccgtctcaaaaaaaaaaaaaaaaaaaagaaaagaaaaattattttctttcttggctaacataactttaaaagttaatttatctcccagtgtgtgaatgaatgctgtttgttttttgtttttgttgtttgttatataaagtgaagtagtagaatcttatagttaaggaaaattcataaatctggcaaatcaatactgaaaccacacaaaaaaccttaagaacacgttaaatactaactttacattttctttgtaggtggaaaaactggtggatacgtggaattctcactctaactatgatctcgttktttttcctgatcatctatatgggatccttcatgctgatgcttcttgtaagtttttgacttttccctgagtgtctcttgctttgtttttcaacatttatataggattgaagtaatttgagcatatcataaaaaagaagctaattcaacactcagtcacagaatmtttagttcctttaagtgtcttttatttcatgatatgatctaacttaatcttttctgtttgcaaaatgactattcagtgtgttcattcagcagagaccaagtttgtataacaggtacatatctatgtgtctgacattgtgccaagcatattttatmaaagatatgacatgagcctgggcaaaaaaacacaagcctgagacctcgtctctacagaaagttttaaaaaataagctwggagtagtggttcacgcytatagtcccagctactggggaggctgaggtgggggatcacttgagcctgggaggttgakgctgctgtgagctgtggttgtgctactgcactgcagcctgggcaacacagaccatctcaaaaaaaaaaaatgacagaaatacacacacatataacatcaacatatgactattagctagatccctgatttcaaggaactcagtgtaataggaaaaacatacaagtaaccatatgaataaatagcatgataaataagcgagataagttctatgatagaacatgttaggagtgcatggtagaaaagcacctaatccagtctgagggagggatgaggaggggcttccagaagagacagtgccgaagccgagtcctgaatactggacagaggaaggaattccaaagtggagacatcatgagcggggcatggaggtagtgagaggatgcggtccattggaagatctgcaagttgcacatgtagagggtgtctatatagggcactggagaggcaaggaaaaaccattctgggagttttggattttggtgtgtgtgggaagctcagtaagtcaggaagccaaacaagtatttaaacccttcattcattcgtgtaacaaacggttccaagatgcctgctatatgccaggcattacgttagttctagggatgatacagtggtactgagaaaaatgtacctgtctctgccctcatggagcatactatctgcactttaaagagctgattatgtatttacagtgagatgccacctgatgacattttggtcagtgatagacaactatacgacagaggtcctataagattataatggagccaaaaaattcctgttgcctcatgattttattccagttgccaacggtattcagtaaagtaacatgttgtacaaatttatagcctaggaccaataggctataccatatagactagatgtataagaggccataccatctaggttttgtaagtatactctatgatgttggcacaacaacgaaattgcctaacgatgcatttctcagaacatacccccttgttaagcaacacatgactatatataattacaaactacaataagcatttgagaaaaagaataatactaagagagcaaagacggagctgggagactttccagaggcacagtgccaagcacgtgggctgcaatctgaaggttgagtgggaatcaacaaggtaaaggatggagtcttggggaggaccatcacaggcagaggatttctgtgggcaaaagcccagatatttaaagcatgaaacatttgaagcccacaagtgttggaaccgaggagaaatgcatttgttcaatgcattcatcaagcacttaggcagtgctgagcatggtttgacagcacacagtgagagcctgccctccggggtgccctgtggccttctttattggtattatcattgttattactttttctcattccttttcagttaatccaggttcttcttatgtactcatctccttcatctctgatttctcttgcccacttagaaatgtgtttatccattttgccaatctccctccatattcaattctattcatagctcataagcttatgagctatatgatatggttttccttttattttataaaagaataagttttgatgtgaaattagacatgatgaaaaaaaattccatcagctcttgaagccacttaaagtggcttttataagcacctcaaagcctctttcacttctctttttgtcctctcattaatttttcacttccttggggaaatcaagtaatgaaaatgaataagaagttaatttctttttctgctaatttgctaagatcttaaagtgctttttctcacaaaggaaaaatggataataaataggayagacttaatgtgagrgcagaggaagcggagcttgaaagccaagtgggcaggcgtgggaaattgtctgcatttgattccaggaagaggcccccagctcccagtcttctgtcgctgaatgtgccaagggctaaaatgatcaccattggccctgggacttgggcatttaagaagcaagtgtgtgcagagcacttttcaatgctaggtggtgagtgggcaggcttgaggaagaagggaccaagtgagagcaaggagttccacaagtctttgtgggtgaagggacctttgagtatgattttgggcctttgctcacggtgcttcctcggtggcagaaaaaggtgctttttccttgagcacagggctgaaaaataattagagatcagattctggagggccttgctatgtggagaagtttgggttttatttgggaagcagtaaggagaagtattttgggagaatttatttggaattaagaattaagaagaatttatttgggaaaggtaaggagtaagaagaaaatgttgatctaagatatcagaaaccaccagtatcctagatacagtgacttcggcaggtttggtgggttcccctgtgatttacatttttctccaaactgaactgttgagtataataactagggcaagaatttgtggataaaaactattttctaaccactctttaagacaaaattcaagacagttttaaagacatgcatgcatacatttggattctgattttttaagagaaccataagtgtgcctacggtacttgagtttttttgtttatttttttctactatgaaaggaaaatatgatcttattactagttatttgcttcaattggtgagtttaattaaagaagaaaataagagtattaaagatctggccaggtgcggtggctgacgcctgtaatctcagcaccttgggaggccgaggcaggtagatcatttgaggtcagtttgagaccagcctggccaaaatggtgaaacctcgtctcttttaaaaatacaaaaattagccgggtggtagaggcgtgtgcctgtaatctgagctacttgggaggctgaggcaggagaatcgcttgatcctgggaggtggaggttgcagtgagctgagatcacaccacggcactccagtctgggtgacagagtgagatcctgtctcaaaaaaaaaaaaaaaaaragaatattaaagatctaagtaaagtaggtttgaactgttattggttatttaagtttattacatacacatacatgcatagatatatatatatatattatgtttttatgatatttgtgttaagagaatatggatgattcacacatatagttggtactcaattgatattactttatgtgttttaaaaccttgtttctattcctattcttaactagatcatttatattttgagaaggacatgttgtatctagcttgcagttgccttataatgtcagcactcaaaaatgactaattcaatatagttttattaaaaacttctaggaggtcgggcacagtggctcacgcctgtaatctcagcactttgggagggtaaggcgggcagattgcttgaggtcagaagttcaagaccagcctggccaacatggtgaaaccctgtctctactcaaaatacaaaaaattagctggatgtggtggcgcacacctgtagtcctagctactcaggtggctgaggcaagagaatcacttgaacccaagaggcagaggtttcagtgagccgagatcgcgccactgcactccagcctgggcgacagagtgagactttgtctcaaaaaacaaacaaacaaaacttctaggaaattacaggtactattttaatatggaatgcatacccatgttccttaaaaggccttctatttgtagtttttaaattgtattcacagcttagaatcatactttctaagtgatggagttactaaagcatgttttgatttaaaggcagatgtgaacatatagaagatattgaaagaggttttttccccccctgccttcttggaaactgttgtcattaacttttaattcgtgctatgtagtttacttttaaatagtgtgtttactttttcctattatgagagttgtatacgtgtgatcaaattactttggaaaatagataattaaaaataatcattccaaccctattgttaaccaccaaaatgcagttagtagtgttacattttatttcatcactttttgcttaatttatatgtttttaaaactgtggtcataataataatgtgactaacattgtgcatcctgctttttaagctaaatatcacatcaaaaattttgtggccaggtgcggtggcacacacctgtagtctcagctattcgagaggctgaggcaggaggatcacttgagccctgaaattccagtctgagtccagcctggataatatggcacaaccctatctctaaaaaaaccaaacttttaaaaaaaagttttgtgttgttctgtggtctttataatcattagctttactagattgtctgcttgatggaatgtagttcatcatggagttattcacttacagtgaatgaatatctgaattcattcagtgcatcatttaaagttattcaaatcattgtgttatttgtagacattcaggttatgttcttttttttattgtgaataacactatcatgaacatattagaacataaatatgctctaactttatatgtgggagtattttcttagaaaaaatttgcaaagtgaaaatagacacttatttgaataacccataggtactcaatatagttcatactcaaaatgaccagatctgaacttctagtccatacctcggccatccagagtaaatctgttgtcaaagttaaataacaatacacagacaaatctctatgcaaagcattttatttgggaatgtatatatattttttaaaaaaacaaaattgcacttcagagcatatacccagaccagggtggtctttgatatgtctaaagaataaagagaaggttgggagttttattaaagagagaaatgctacatattgttttgaaagaaagcccattagcactagtgcacttttggggagttggcaggctctgactggtgagtgacagtggtggcaggtaaaattagtcttagagtcatggcacattgttgtttcagcagccaccaagtaaaactggtctgacggtatggccagctgtttcagaagctgggctttggataattcgtggagcaggtgctgtgtgccctgagtgctttttccgcttggcccctcaactctgatcttagttgaatatgacagttgacccaatttgtataattctttcatattgtctactttcccaagccttccttggtgttattttgtgttcccttttctcccttagcccctcaatttcctcacgcaccatgtctagtcagttctaccccctatacttctctcctgtcttcttctctactccgctaccacttcacctggatagtgaagtggcatcttgcctcctgactgccttgactcttgtcaccgccccagcccactgtttccaccttattctcccaaactctcatgtccagtcatgttgcttcaactcctcggtgcactgcttcctgctgtttcctaggattccaggaccaggctcatctctctctccttcttacccccacctttgtcttccagcaactccaccctcctagtagttcccttaatacgccccattccctctacaggtggtgactctgcagatcctcctcctctggctctgccgttgcccaccccctccccctgccacaggtgtgtctgcctctacacacgtccatttgcctatttcacatgggttgtagtcgtgtttcctccctgagagactgtacctctctgtgaacagatgccctatgttatttctataagtcctcagtaactagtaaagagtagacacttaaatactgacttgtttttaaggttcttgaaacattaattgggccaacagagtcctatgagtgtacattgctaccagtgttgatggtgtggagtattaatttctgtgtaatcctccagtcctggaagatacacatatagttgaaggatttcaacactactatttggaaccttttgttttctgttttcctagaagttccatattaattgtccttgcaagctatagttgatgatcatataaatataatgcgtgttattaaaaatacttttgttctctcctctcagtaaaagaaatacaatttatagtgccagtggatgtaccctagcaaatatgttcatagaaattacatcagtatgatattttaaaagccctttggatctgactaactttgctttaccgttttatcttaatactaaacattgtctccgttctgtatttttgttagaaatgacttgatattatatacaaaggttatttgaagaaggacacttagatttcctcctgtctttataacacatttatgacttttgcctacaagtactgtttatggtttgacgtacttttctttatcatgtggctggaaagacacatttactttttaaagtatgtgattggacacgtaatcagtataatgggaaaaaataacttaaaaataccctgaatggtaggttttggaaaactaacttgtggaaatcttaaaaagaaatcccggaatatatcctctgacagagtttggtaagctttttctgttaaaggaccagatagtaatattttaggctttaaggagctgcatatgtttcagtcacataatattttatttttaaataactctttaaaaaatataaaaatccattcttagctcaaggacagtataaaaacaagcccttggggtgtgttctctagacgctgaaaagctagtctgctgtattsacaaagatttttacctcttaattcatgataataagtgttcaacttgccatttgctctttgagtcttggaatcgacaggtcaagcaccgggtgtgatgctacatcttgagaaattaccttcacccaggttgctgaatgcagcagtttgaaggactacaaaatagaacatcaaaaagggatttataaatctaaacccgtttaataggtgtgcaatcaggacactgtgtaaacagaaatgcataaactcagttgactggccaaagtggctgcaaatgtggaaggttgcttatactttgctaaggtagcccagcttagattgagcagccagtagctggctatgggagagttgacacaactgggaggatgaaaaggccattccagggtgactggctagaaagtgttctaactatttgtcctgacagtatctttattatttgcaggtataacaatgcatggttacaaataaatatgtgcaagcaaactttcatatatgattttcttagggtatctcaagaaacataatggacaggttggacaaaaagattctccatcttgacaaggacaatctcaagaatgaagtagtaatgagggataaatcctagtcaactgcggccaaccagactatatccctcaaactttaaactccattgccattccccaccccaggaaggatcttccaagcctttttgagtaaaacattattttgcctacccctttgagttatcacttgattttagagacatggaatattgcattttttactgacatttagcataattaaacattggtagattaagattttttaaatacatatgacaaactgctttattgaatgattaagcacaaatgtaaacattgagaaatgtatgttaatgttttctcttggtttcaggttctgggcatccaagtgaaatgcttccatgaaattatcactataggttatagagtctatcattcttatgatctaccatggtttagaacactaagttggtaagtaagcttgaaactatttcagatatgaaaagttaatttctgaagtttgtaaaggaagcgtcttgatcagtcagtatccactcaatttaccctatagattgattctagagaaagataaataaaaataatgtaattgaattttgaaaagatcacctttgtctttcctactccaatacaacttttttcagatctcatattttagtctttgtagagatatctaatatgtgaatatatacaccattcttgtcctttttttaataaaaaactaaacattgtattggaaacatttttgtatcctttacaataataattttagcaaaatatttacatataatcttttccttcattttccttcatttcctctcagttgacatgataacatacaacatattgtatatatacaaatgcacataaagttagtaacaaaatcaccataatgatattaacatttaaaattttatatcttttaaaacttttcatatataaatcattgctctcagaaccttgactaggaaacatgataacattatagttcatatttaacccaagtggccatcctttttaatatagttgataaatatcaaccagggagtcagtgtctttttaaaacagatggggtttagaatagtcaaaaagaagtgtcttgatttcggtgatagctgatttttccttctagcaggtttcttcacgagtggcaaagtatacaggaaatgttagatagataaagtaattggagaataattaaatgtaaaaccatgcagtattgattctaagtattattaagaagagaagataaataaggatgggctccagtgattgtagaaggtgtcaaacaagaggtaaaagataaactggtatttgaaatgaagacaagttttggataaagaagagttttctagttggggatgtagcacccatcagtttctagatgtgggacagatgtacttatactaccgttgatgagacattcctggcccttctgagcagatggtattgattagcggacagtgggtaaatagttggattggtagaccaggttaggccttgattgccttacagaggaagcatccctgctcatctggagtccactaggagcattagaagaggggagataccagtgtgtgcagggcagtggggagacaggttgaattacctcttctttctttccctcctaatcttcctgaggacaggtggggatttgtcttaggacttctactattaaaaagcattagagctgtgagtagttacgagttaattttcattatgaacttaatccctcaatatatacacccacacattatacatacatacaaagtattaaaatcatacacacacacaaacatacacacattatacatacacacaaagtattaaatttatacacacacacacacacacacacacacacacacacacacacactgctcccgcctcccaagggtgagggattgtgtgtgtgtagtattttctacattgtttcctaattatctctggcattagattttcagctaaataaaggtatgaactatgtttggtaaatttttgctaatcaataaatttgaaattaagtttaaaacaggaaaatagcattttggtaaaatatatcttgaattggtcttctgaactttgttttgatctttgtgtcatcagaatgtagaaaataattttgttgagtttgaggggaaggaaagcttcaaatatagaaaagctaattgtttttaaattataggtactttctattgtgtgtaaactactttttctatggagagactgtagctgattattttgctacatttgttcaaagagaagaacaacttcagttcctcattcgctaccatagatttatatcatttgccctctatctggcaggtaagttaaggaatattctgtattgatatatagttaacatattttccatgtttatttttatttctgttattttaattagtaattttttggttaaattttattccagcctctctttttcattgtttctygtgtataaagctatttctttcatcatgttcttaaatagcaattactcccttatagtgggtttaaaaagtgcttgttaagaatcactccaggccgggtgcggtggctcactcctgtaatcccagcactttggaaggctgaggcaggtggaacatctgaagtcgggagtttgagaccagcctgaccaacatgaagaaagtccgtctctactaaaaatacagaattagacgggcatagtggcacatgcctataatttcagctactcaggaggctgaggcaggagaatcgcttgaacctgggaggcagaggttgccgtgagctgagatcacgccattgcactccagcctgggcaaaactcttatctaaaaaaaaaaaaaaaaaagaaagaatcactccatatgtttgaaaattttctttgcaaattgtagtaaaaaaacttttaagtaaataaaaattattaaccaaatttaatttatgaaaaaactttcacatatatattgctttatttgtccctaggaaatagagctttttcatgtagaactaatcagggtaattagttgttttttttttttttttttttnnnnnnnnnnnnnnnnnnnnaggggggtggggggggggtgagtaggggtgtagttagaggggggggtggggcaacaaggagggggtgttcggaccaccctcttgtcgtctgctggtgctttccccatccaaatcgcattcgacgttcgtgaagtggctcgcgcttagtggtgttattcagagcatgaatcaactggctcgacatatctactcgataataaaggttcctctaggtttgtgttcgaaggatcttctgcgtctacccctccttgtatcaccatgcacccccaaacttatacatgtaaatccaatcaaggtcgttggagttcttattttctctttggtggaaaataaagtctcactctgccactcagggtgtattacagtaatgtgatctcagctcactgcaagttccacctcccaggtccacgccaaactcctgcctcagcctcccgagtagctgggactacaggcccccgccaccacacccgactaattttttgtatttttagtagagacggggtttcaccgtgttagccaggatggtctcaatctcctgacctcgtgattcgcctgcctcagcctcccaaagtgctgggataacaggcatgagccaccgcgcctggcctaattagttttttagacatagtttataatatatgcaactgtttatagtatgctatgccacatgtttttgtaatttttaaattaaaaattagattcttaagataaagttagaatttacagatatcttttctatgaaattttacagatcataaaaacccctaagcaattgatttttttaaatgtgctttttaaaagccagattgctcatttgaattctggacctaccaattactggttgagtaaacagtgagatatttgggctgggcgtggtggctcatgcctgtaatcccagcactttgggaggccaaggtgcacggatcacctgagtttgggagttcgagaccagcctgaccaacatggagaaaccccgtctctactaaaaatacagaattagccgggcatggtggtgcatgcttgtaatcccagctacttaggaggttgaggcgggagaatcgcttgaacccgggaggcggaggttgcggtgagccgagatcacaccattgcactccagcctgggcaacaagagggaacctccatctcaaaaagcaaacaaacaaacaaaaatgagatatttaattaatttctctgtgcttcagtttctttgtaaagcacttagaatagtacctggcactacttaaattttttttattgttattttcactttaaaagaaggacatgaagtttgtttgtgagttttcaccttagctgttactagttattgttttagctcctaggagtttcccaataaatgaatttttctcctggtacaatcttagaaactgggtaattcttttccatttctctttaaaaatatacagagtatgtggggaagcatgtccagtcctgtagaagtatgctatttcattaaatagttatgatgttcttcttggtgcccctcagctccttcagttcctaggccttctaattctaaaaagccagaaagtgaaatacaatctgaaatggtaatgggaattttcagagaacttgtttttatgtaatgaggaggaatacattttcgaataattttccaccttttacattcaggttttttgttactttttaaaattttaaatttcattttattttcccagagattaggtctccccatgtggcccaggctggtctcgaactcctgggctcaagggatccttcygccttggcctcccaaagtgctgggattacaggcacaagccactgcacccagcctttcattcaggtttattgttcagttcagctttccaaatttgttccttcatttaaaaaaacttttcactgctatatctatagaaagtacattcctagaaataggtattgaaaaatttctactcttttactggtactcatatgatggtagttggtccattttaaattctgaccagttggaaggattatgatcatggagagattatgattgttatcagctaagaagaccatactaaaattttggagagtaaaacacttgactctgattctgtgtttatcaaagcacatttgtgcattttcttggtattctttgtagaaactttgagtattttctctcatttaccaaaccagtaagcttgatttattttgttaaaggtaaggtagattctggaatggattctttttttattatgggagagaagaatgtagtaccttctcagtttatatttaaggtaacaagacttctggcattttgagttttgatgataataccaacagtcaaagagtctatggtatcttctgttattgaacccaacacttttgtttcatgtgattattcttgtaattatttaaaacaactgcgggccaggtgcggtggctcacacctgtaatcccagcactttgggaggctgaggcaggtggatcccttgaggtcaggagtttgagaccagcctggccaacatggcgaaacccgatctctactaaaaatacaaaaaaaaattagccgggtgcggtggcaggtgcctgtaatcccagctatytgggaggctgaggcaagagaatcgctgtaacctgggaggcagaagctgcagtgagctgaaatcatgccgctgcactccagcctgggcgacagagcgagactccatctcaaaataataataataataataaaagaacaattgtggttaattaaaacataaatcatttctatcattaatatctgcacattagttttcaaactgaatttcaaaagaattatgatgtaaacagcaaccctgcaccccaccgctttgagagtttttccttttctgtaagtaataggcctgtttcttagtttactttaggcattatctattcacttcctgttataacctactttacttcttcatattcagtttttttatagtaatagttagcattaagtaggtacctaaaatatcacttcctgtagagccaaatagtatctatgattacatttccttcttttacaactttttgtttttcccgaacttgaggaactgcctcaccttctctttcccatatttgctaatttcagtgtagaaatccttaatttttcctttaggtttgacccatgtctgttggtagtattttcagatgtttacacaagtcagatagtatatcaattgccttttttcatggagacttctgtgccagagacctctgcattcctgttcctgtgtgagctggctgcatatgggcccactgctgagctgtcctcatgatttgagccggtttcttccatcccagtcttccatctcttagttaacaccctcactttgctgaagcatggcctgctgtagtttcttatgaaatgatgtgtagaaggtagttgtcttatgtttgtgcatttctaaagatatctttagtctattcttacagctgattgctttggctagggctcacacttattgttggacttttacttaataatccaggtcagaagcctaggcctcagtcttgccttccaccgggccctttctccttagtttctgtagaaaatacgtttaggcacctgtaatttctcaggcctactaacagttttctatctgttttctagcttccaaattttgtagacatgtttcttcttttctccttcacatttcttcagttttctctgttcttgtggggcttccccttaatttattttaatgttattttgcagggataccaggatggaatacaaactatcatttaaaaacaaaaagccttaactagttttatttttcccttggcttagaacaatttgttatttttgctcacagtcctgcggattggcgggcttaacttagccgttctaaccccaggcctctcacgtggttgccatgagacagaggcgggtgctcatgtcttgagtgggctggacatcaaagatggctccttttcatgactgcagttcgtgccgcttgctgacttgggcactgacctgtggcccctccatgtggcttggatgggacaggcagcccgggttctgaatggggagcatgccaggagccaggtgtttcaagaggcctaaactagttttttttgctgggcgcagtggctcacacctataatcccagcactttgagaggccgaggcaggcggatcacaaggtcaggaaatcgagaccatcctggctaacacggtggaaccccgtctctactaaaaatacaaaaaaaaattagctgggcgtggtggtgggcgcctatagtcccagctacttgggaggctgaggcgggagaatggcatgaacctgggtggcggaacttgcagtgagccaagatcctgccactgcactccagcctgggagacagagcaagactctgtctcaaaaaaaaamaaacaaacaaamaaaaaaaaactagtttttttttttaaatgaaaatatatgcccatgataaaaatttagactagaaaggagtattccatgaaatcctcctccacctcagtgccttacttacgatatctggaggcttactactgttattccagaaattgtctgagtattcaagcttttatgtttatatcccccctccctttttcttatrcaagtaagagtatctcttctgtaccatttttccacttcatatattaatagcttatagatggatttatattggcacatctacatctatcattgtatccatatctgcagttacatctatattgatatacagcaatagctgagaggtagaatgtcagcatataaggtgattactgttttcccctttggttttgctataatttatgcttgagaataacatctcaattgagtgtggaccgatagtgtagttcattttctttgttgtttctttttatatattttgtctttcatagcctcctaaccagcccctttttagtaattctttgttccatatatgactttttggactctacttctataaaatacaatcaatgttgtgtcttttttttttgaaacacagtctcactccattgcccaggctggagtgcagtggcgcgatctcggctcatggcaacctctgcctcctgggttcaggtgattctcatgcctcagcctcccaagtagctgggactacaggcatgcgctactgtgcctggctaatttttgtatttttagtagagatggagtttcactatgttgctcaggctggtgtctaactcctgagatcaagtgatcctcctgccttgatctccaaaagtgctgggattatgggcatgagccaccatgtctggcctggtatttcttcatttttctaaccgtatacttatttctgccatagacatgttttaccatttcttattttacactcttagaatcacagaaacttactgaaagtcatcaaagtcattcttagagcaaacatttcagtgttttccaaaagctagatactgtgaatgatgttgaggatataaagggagatgaagtgattgtgtgctttccagggtcttgaaattggtaagatgtgagtcttctagttcattgctgaaatgtgaacaagtcctgtcaggagcatgaagaagaggaaggaaggccatggaaggcctttgagaagagatgacaggtttcatgaaaaggaaagagcaagcaggcagttgccaggtatcgtatagtagaaaagtccattccaggcggaggaacagctgtgcaggcatgagaatgagaaaggattgcatgttttgggttcatggaggcattgaagatagggaaggtaggtaggagccacatcttaagaaaatctgtatgtcatgggaaaggtttggactttatatctgggaaaacattggaggattttaagctaagaaatgatataaccagatttgtaattaaatgaagtaggttgggagacatgatcaggcagactagataggaagttactactgtaatccacactaaatgtagtaatgacctaaactcttctggtttgtagttaatactaaatgagtaataagttagaaaataggccgggcgcggtggctcatgcctgtaatcctagcactttgggaggctgaggtgggtggatcacgtgaggtcaagagttcaagaccagcctgaccaaaatggagaaaccccatctctactaaaaatacaaaattagccgggcgtggtggtgcatgcctgtaatcccagctactcgggaggctgacgcaggggaatcccttgaacccaggaggtggaggttgcggtgagccgagatcatgccattccactccagcctgggcaacaagagcgaaactccatttcaaaaaaaacaaacaaacaaacaaaaaaaacatagaaaataaaaataccacaggctgatcgtagaacccaactgctattttatgacagtctatgaaaagttgtttatatatcacaagttattggcttaaaatgcacttctttgttgcaataattgcatattcacatgcagttgtaagaaataatagatctttttacactttgctcagttatcaccaatgatagtattttgcaaaattatagtacatcacaccaggatattgacatcattacagtcacacaaatgtactttttgtttgttattttgagacaggatctcactattttcccaggctggtcttgaattcctggactcaacttacccttctgcctcagactccttggtagctgggattacaggcgtgtattaccacgcccagctctacagatatactttaaaaatgcaacctcatagtaagctaggagctactcagttaaatgatgtaacttccagtataaaacaggcatagaatactatatgtctattatcattttaagcgttgcctaaaaatggctcggttagaccaaaagcacccatggtgtacctctcttgtttatttaattcccagagcgcagtgcaggcctggcattgagggtccgactatgtatttgttggataaacgattaagaggctgagaacatgcacatccacacacagtgcttcttaatgatattttcttagtatcagtgttttgtttgctgagtcttgaggccttagtggctactcttgaagtgcttagcaacatttgtgagcttagtctagcaaatggagttagactttgaaacaggactatggaaatagaaagtatgctaacattgagatatttgtacctttctttcaaattatgttgtagaaatctttggaatccaagtctttctgttaaacaatattccaagtgccctgtgaaaattttagttctattacagtggtcaaatgacttcagaaaatgtaygtcttaccagatttaaaaagcagagacagttcaaattacttcattgacattgaattttatttaaataaaatgtaggtatctccaattctgaccccctcatggaggtccatgaaattaaatgacttgtttaatattatacaaaatgtctcactgactaggacctagaagtcatattgacatttagataattttgttgcaaaatgagtttgactgatagcagagaaaatcagggagactaaaaataataaaacaaacgttttctctagagtctagatatatattaaaaagaactcatcaacttggtgatttggaattggggctctttagaaaccagagcagtcatgcaattatatggttagcagtgatgtgtaaacagacttaaggtgtttgacccttaatatcatcaccttacatttctttatccaactatagtgatgtgcatattatatttaataaattattttttgcttgtatttgtgcatgcatagctattttgatttctttaaagttcttatggagataatatgacttgaatataatgctttgagtccaagaaaattgatggacatataaaactaagttatagccaaaattaatgcataattaagatgttttccccaaacatcctgagtatcttttatatcagaggatattaatgaaatctttagaaaagtgtcacaaataattcacaaaggactgtatctccaaaactacttaaaatttctgaattaaagactgctaaacactatacacatgctagtattggttctaaaccttagactaaccattcagattaatagaaaactttttaaaatgttaactaatatgatgattggtttgtatggtaatctccacgatgcatattcatttaaaactttttcagaacaactcagttatagcctggtgtctgaataaaggcacacaatgcagtgtgattttgaatttatttaatttgatgctagaaagttttgatggtttaggcaagtataatgaagaatataaccaagcggaagaatgggggatgagtcagaagctttagtattcaatcttgggcccatcctactgtctgctttttgaattaagggctatatgtgtttactaaattttgactaatcatcaatggtaaattttaaaaacaactttattttttctttgtttttggtgtcttcaacaagagcaagagctcctgaatggcagtgcctatcttattcatttttgcatcttgtttctggcatatcgaaggtgcttgataaatatttttttatctatttttctgaaattccctctgtctcatctattgggcttttcggtgtcttgtgttttttcctttacttttcctgacccccttaaaaatcttcatcctcttcttcttcctttttaaagaaatttttaaagagatggtgacttgctttgtggtccaggctggagtatagtagcttgatcatagctcactgcagcctcaaactcctgggctcaagtgatcctccagcctcagcctttcaagtagctgggactgcaggtgtgtgctgtcctgctcagctaatttttacttttatttcatagagacaggatcctgctgtgttgcacaggctggtcttgaactcatggcctcaagcagtcctccttccttggcctcccaaggtgttgggattacaggcatgggacactgcacctggattctcttgttatttttgaatacacctctctttagtttgttgggtaactggttctgcttaatgactggagaactctttgatgctgggcaacgagatgtacgtatctttgtattgagaacaccaggcacaatactatgtagataaatgatgataagtataacttttatataaagaactatatattaggaggccttttcagtacttttatttatactactacaacacattctgtgattttaatttagaaatagttatacaagcattctttgttaatcagggaaaaaacctatggatccaattgtacaaaaagtgaccgtttccacagatttattaacatataaatgtatttttaagtatttaaacataaaatgttaatatatccatatagttgtgaatgagaaagattaagttcatatgtttctcttttacaatgtttttctttaaaaaataatacacagttggccctcctatatccatgggttttgcatctctggagtcaaccaactgtggattgaaaatactctgaaaaaaaaaaaaaaaccacaatggatggttgtgtctttattgaacatgtataggcttgtttcttgtcattatcccctgaaaaatacagtctaacaattatttatatagaatttacattgtattaggaattataagtaatctagaaatgatttaagatacacaggaggatgtaagtaggttatatgcaaatactataccattttatataagggacttgagcatccatggatttttgtcctttggggatcctgcaaccaatcacccagggatactgagagatgactatatttagcctcagctatgctaggaaaacactttatacctcccccttcctctaagtcagagaactgtattatcttactgtatctaggagtcagacaattgtatcccataggtgaaattggattatgtaaacgtgagttgccaaggttgtcctggataaaatgtccattaggaaaatgttaaatgattctactggtaattgtgtttgaagaaatgtaagtaagggtgaatggtgttatcatttcaagaaagagaaaatcatgtattttggagtagtatttgtgagtagataattcatagttaatgatattgagaagttcccaaggctgtgctgggagagtcaaggggtctgtttggacagaaaacatggtttctgtcttgtgtctctgctttgccccttacccattggctttgaaccgagtccagtccacgtttgcctttaaccacggatcagtggcacaaaaacagcatagaaattatgttattacttgagcttcaagataagtctacctgctgtagaagaaaaactcaaaagcaggaatttttaaaggaatctttcatacaattggtaattttgatgccattaatttcatgttttagtatctctctctctctcattctttctctctttcctttctctcaataaagtgacataatggctttcatttgtgcctccactcagaaaatgtgtccctattgcttgtgcaggccagttagttggattacctcatagatgacaaataggaggtgagataggattggggtcagtattcattctcttcattttgtcatggtcctttatgctttggcatttcaaattgatcaccaaaagtagcgaaaggcagctgctgtttgattctttgcttggtgagagtagtaatacccttgtttactctactggtagaattgccttgataagtataacttggatgtacaaagtctagtatttatacagaaattgatcaactgaaaattcaatttctctcttggagaactcactctttaaagatactgcagaggctgggtacagtggctcacacctgtaatcttgatactttggaagaccaaggtgggaggatcgcttgaggccaggagttcaaggctgcagtgagctgtgattgtgccactgcattccaggctgagccatagagcgacacttgactcaaaaaagaaaaaaaaaggatgttgcagaatagaatgcatacatagccatttatctgaaattaaatttggtttatatattttcaatatccacctctgtaaaataaacctatctttagacgtttactggtatttttggcaagaagtgattcatattgcctcccattattttagtatatgattactagatttcacttaattggttagaatttaataaattatcattgtaataaatttgtaaaatgtaaacataaatacatatactgtttgtaaatctttacattattaagagtattacattttactataattattgtatgcttttgagaaattgcaaattgttcttaacctgaattttgctgatctcagttcatggaaccacgtgactcttaagggtcaataggattttagtgtttattttctagccctgtgatcctcagtaaattattaaagccctttgtgcatttttcctcatctgtaaaatggagctaaaaatgagtacctatattataggaattttgaaaggattaaatcagttggtaataaaggatcatcattaaagataaaatgcttagataagagcctagaaagagtaagcattcaatagactttagctgttataatagttattattaatttttctattatgtagagattgaaaacattctgtacatacacttgatgcattgttatagcaaataaatactatttaatttaaatttaagatctgttttccatgcccacatattagcaggggactaattaattgaattaatgcagaggatgtttattgaatttgtgccatggaatgtattaggcactttggagagtacaagattgtttccctcaagaaacttactttaaatgcttaatgtaagatagtaggagagatggcatctgagtaagtagctaaaatatgcctagctgtgatacagcaaattggtttatttgggctcaaggaatcttaaccctttgtaccaaattgtacaacgagcacatgttttttgttcttgaacaggtttctgcatgtttgtactgagtttggtgaagaaacattatcgtctgcagttttatatggtgtgtattaactattattccttagtcattatctgtgataaaaacccttaacttttttttttctgtagtgagaagatacagtcgaatctgctagctgttgttttgcatgaatgtgagggatacttggatttcagatgaccattagatataaactattaaagttgagaagtttgtgaggattttaaaattttaactgttttcaaagtttactaaaaactttttctttgaatattttcaaatggtgtaaaattaaagtttttgggttccttaaatttgtagaaatttgaagaattttcttagtctcctggacagttactatgtctgagaaacatctaccatattgttctatgaaagtaactatgtttacttgcacttggcgtgcgcataaagcagcagagcatgtattatcttggtggttatggttagtcatagaattgtgtaattctttttggcataagatattttgttcaatgtaccaaagcctgtcttaagaaatgtatcactttacatatgaactttttttattttcttaaactgtagctagtacaactgtacaatgcaatgtagtattcagatctgtaaattcatgtgatagtgaggcttattttggacttggawtatattttctgttctttatgcttagcttttctccattaagacattctgctgaacataattgctgggaaattgttgtgtttcttgtatttctaatttaagggaatctgagcatgaagagtaaaattcttagtgaattttatatagaaacaagacaagtaaaaatagtagaatatccagtgaaaatgtaaatggcatctattggaaaaaatttaattaatgcatttttaagcaatcagagtaaaagagaattggatctttcaagcagataaaaatagaataaaatagagcaaccaatataatatggttgcttaaatgggaaacaggtttattaagaataaatcaaaaggccaagcgccgatggctcatgcctgtaatcgcaacactttgggaggccaaggcaggcggataccttgagcccaggagtttgagaccagtctgggcaacctggcaataccccatttctacaaagaatatgaaaattaaccgggcgtggtggcacacacctgtagtcccagctactggggaggctgaggcaggaggatcacttgaacctgggaggtcaaggctgcagtgagctgtgatcacaccactgcactccagcctgggtgacagagtgagaccctatctcaagggtgggggtccagggagaataaatcaaaatcttaagaatttttaaaagtaattttatgaatttcaatcaaaatcataagactcgtacatggaaaccatattgattatattaaaagtggccatctctcaggctagatagaattggcaaaacacaaaggtctttaaaaatttgaaattgaatactgtcattgaacagacctgtcacgatcacccttcaagtatgaaagatagagtttaagggcaattgaaccctgctggtttgaatcatttgaagttggaaataactctttatgggaaaaagttaccgtaataaactctgaaagaaaaggaattttttagcattttgttaataactgcagaatgcagccagagtaaaatgttcccctttaaatgttgttaaaccagcaacagaaatctctcatcatcacttaaatctaatgattcaagataatggtttattttttatatgttttaaaagttagtactatataattagaattctatttatatataaattaaggttactttgttaaatgttttcattattttaaggttccagtaggcaacaaaacaaacataatttactaacagtgtttttattttatatgactctaacttgtacattttgaccaaaagtcatggtagaaatttgggtttcaaatcgctgttgcttcttcagctgcactgatcagttgtgttcactaatttttgtattgttgggctattaacagttcgcatggactcatgtcactttactgataactgtcactcagtcacaccttgtcatccaaaatctgtttgaaggcatgatatggtaaggcaacagaattatgctgctttataagtatgtcatagcacttttatagttctttaaygttggatagtgtcttacagatttctactaaaatgtactgtttrttgttcttatattccattaaactatcttactgagttttgcttactctttgacaactaaagacaaaatgcttcattaacaactggataccattcttattcaagttccaaatataggaagttcccataaaagacccaaaaaattaattacattttcaggtgttaataaatcctagtgtaacttttcacaaaagacagactttaaatataatatttattaagatattatttacatagaatgcaaaaaaatataaaactttgcctactagtaactactgtgaagaaatgcatgtttttctaggtgaaagttgggtaggttttctactttgctcctgtgtaggagtgggtttccagattgtagaagttaattgctctatggcagtggcttgcatattcagaaagcatttttgttaggtaaaaattataaaacttattacttaaaaattagttggaatggagaaaaagcttaagattaaaaaaaaatctgactgtatttttcccccactcatttaaaactcattaattaaaatcttttacagttgatgggttttgtcaagataaattgtattcccttgacagctttatgtctttttaccaagggtgtggttgtgtctttgtgtgtgtgtgtctctgtgtgtatgtgcgtgtgtaaagtaattggaatcattttaagattgtctttcatgtattgtacagacttttcattgatggggcagttactgaagtaagtaggttctgtacattcagtagggtttactgaaatcataagctaagatagaattaaaattaataattgagaatatgtattaagagcttgatataaatttatcagattatgttctgtctaaagaaatgactcattttcatattaaaaggctggttttcttaagattagctttcagtctgccttttattttttattgtaacatgttcctcataaaactaaaatgaaaacatccataactgtagaaatcaataatttaatattttcctagcatgctagtttatttttagattttgctctgtttaaattggtaagtgggcaaatttggttgatatttatcatttctactgttttggcaagtgttatgttctgggtaggctgcagtgcaatccaaagggttattctgatggttcattatgaatcataacctttccgaatatctgccacttactcaggtgaacttttttctgctgacttttttttttttttttwaaaacaggttccttgttccaatatcaagtgttatctgcaatgacataactgcttacctttttggatttttttttgggagaactccattaattaaggtaatggaaaaattttataagcaagccactatgtaaccttaaagattagccactggagaacatttccaacaactgtgctgttgtgcattttttatttttgaggtgctttgattttccttagctgcatggtgcagaagcagcaaaccatatttctcagtacttccatctgggttcttcatcagctcttctgttggctcctcaggaagggcatgactccatcagtctgcctgcctgcctgcctgcctgcctgcctgcctgcctgcctgcctgcctgccttccttccttccttccttccttccttccttccttccttccttccttccttccttccttccttccctccttccctccctccctccctccctcccttttcatcttcattttatctttatgtggtttcttttctttcctttttttttttgaagatggggtcttgctttgccacccaggctggagtacagtggtgctaccatggctcactgcagcttccacctcccaggctctagcaatcttcccacctcagcctcccgagtagctggggcttcaggtgcatgccaccacacccggctaatttttgtatttttggtagagacagagtcttgccatgttgttcaggcttgtcccaaactcctrggctcaagcagtctgcccatttcagcctcccaaagtactgggattaaaggcgtgagccaccgcccctgggctctgtggttttttctctcggccattggtgcagttcttctttatcctcctttccagcaagcctatacacaagccttttccttgactctcctctcccttcaacctgtcgccttacctgtcccctcctttaccaaactttctcaaagaagagattatataatacaccttcacatcctcatatccatttgtgtgacttttcatatccaaactcataccaaaagaagattttggggccctacaataaaatactaataaaatacaagtaataatgaaagggaaaggaaaatacacatgagtagaccatgttgttttgctatagaattggttctatttatgggcaatggtaaagaaggaaatgaactaaattacatagttctcatttgggagaagaaataaactaattcttcatggaaatcaaatcattttctagaactgatttcttctaaaagagctcttctttatttttgtttagtttttattcgtttttggagacaaagtctcgccctgtcacccagtctgtagtgcagtggcgcaatctgggttcactgcaacctccgcctcctgggttcaagtgattctcctgcctcagcctcccaagtatctgggattacaggcggctgccaccatgcctggttaattttagtatttttagtagagacagggtttcaccatgttggccaggctggtctagaactcctgacctcgaatgatctacctacctcggcctctgaaagtgctgggattacaggcgtgagccaccacacccggcctaaaagagcttttcatgttggagtttcagataagattcacacatttcacattattgggcaaagtttttaataatgttctcacagacatattattacctggctgttttgatattgttatatgaatgcagttttggaaggactgagacaattgttcagatataaagccttctgtttgttcagagtggtatgagggtagtttagtattaccagaggaatttgtggactgcctgttcttccaaaaacctctgtaaactcttcccctcttggggaggagctcacagagagcacctgctgaaagcatcagcacacagagagtgttgggctgagctgtataaggatactggtaagcaagctgtatatttttaaaacgtttctaaagctgctccagagtttctaaagcttgaatacatgatttacgtattcaagagttctacccagactgagaagttttcggcttgggaagctgtattagttcattctcacactgctataaagaaatgccagagctttaattggcttatggttctgcaagctgtacaggaagcatggctggggaggcctcaggaaacttatgatcttggcggaaggggaagcaggcacatcttatatggtcagagcaggaggaagagggagagtgaggaggtgccacagacttttcaacaaccagatatcatgagaactcatgggacagcaatagggggatggtgcttaaccattagaaaccscctccctgacccagtcacttcccaccaggccccacctccgacactgaggattacaagtggacgtgacatttgggtggagacacagatccaaaccatatcagaagccttcaaaaaggctgttatagctgtggaagaatattagcaactgattttgaacacagccttctagtgaatttatcaggctggattaattgtataatatacttagataattgaacagttaacccctaaatcgatatgatatgcatcaatttaatttgataagctatctttacaataatcagcaggcacttttgaatttgagtctgctcctacttcatggcagtgatagtgaattaccctaggagaaggtgtgtctgtcccttctctgtggcagaattgttatcagatttgtcaagaaaccatttctgccaactgttttggtttggggctttatgaatatcaggacaagaagtctatgaagagctcctataggttaacccataacccattttaatacttcagagactttattctgatatttggtttctgtccctcattaatgacctgatgaccaaatcctcccacacatcacagtctttrtctcccctgagcaacaactttcactttttgctcctgaatcttttcctcctgccccaacaccactaacttctagatttttttccagatttctttccatgaatggtccattgactgggcagcaatagcctgaatccaacacaaacaatatctcttctttgaagtgcagcatgttcctttcttcttggaaatggacatagattgtgaaaaaagagaggatatgtcaatacttgagcaaatacagtatctggggctctggagtattttgccatatcagaaggaagtctgtgtgtatatagcatattaggaatatgtgaaaattatatgtgctaaaatgtccatgttttgttgtactgattctatttttggccaatagcaggtcaatactgactgtgtgtacttggaatgaataygtctcattcttattccaagaacttacaccaactattatcaggttttatattagcataagagtcatgggacagttattttagtatagagtttatactcttttgagagacagaacaaatttagaccatttaacatgaacaaacacatattcacagcatttcaaatatttgagggcctactatgtgtttaaatattattagagagattttcactagtaaatcaagatcagagaaaaggaaaaagggttttgaactattccaataagagaaaaagtaaggagagatgtacaagttattgaggaaatagtttatatatatatatatatatatwttgtgagttttgtgagtgcagtaaagctttttaattttatttgcccttttttagttgtctcctaaaaagacttgggaaggattcattggtggtttcttttccacagttgtgtttggattcattgtgagtattactaagatttttattttgtatacatttcgaaatatgataccaagcttactggtctaattttaaacctagaaaaattaaaccacaaaatgctaataatatatttattgaaacctactraaaagaaccagttctgtacctcagcagcccttatcctggctacatatagaatcacctgagaagcttaaacaaaatctatgtctcagccttatcccaggccagttaacacccccaggtaattctaatggccatccatgctgtcttgctgacttgctgacttactgttgtgctgttgtgtttggtagtttctaacagctattctgccttaggcggggcacaagtactgggacaggtggtggccttgtgtaatagcagaggatgcaaatactattgaaaagctctgccttcttaaacacatggtggccacttggctcagtgggtggttactgttgtgggcccaacttgcagaaacagtctaactataaactattaatgtttgcttttagcatgttaaatagctatttttcatgttttacaaattagtttacagttataggatttagatttttattaaaaggtgtctagtgagaatgagagtatagtaccatagctggatataagataaatgtacaaaaaagtactgtcaggaagctttacttttcctagtttctgacagttgtggttacattctgtatccaaatctagagtacctagtaacaacatgaagcctggagagagtgaatatacaaataaatggaaatatgccatgatcctggaaaccaccagaattcctctatttaatttataaatttagttcatttgcaatgaaaattttaataaaatgtgataaaattattccagtgtttttgtggtagaatattgatgagataataatggacagatagaagaatgcaaaaggatccaatctcatccaatgtttttacattacaaagcgagaataattaaacattatgaagctaaatagtgtaagaatttgttattatcaaagactaacttgaaaataccacaggaatagccatatcattggaagaaaagtaggagctaccccataagcatgtaatgcatgacaaaataatgaggaaggaaattccacatctatatgaaattatatatatataatatatataataatatgtaatatatataatatatattttatatatataaaataaactggttgtttggaagcaaaatcagtttatattcattcctagtgtcttgaatttctattactcattctcgagcagaataatagggtgaatggctgcaagaaaaggagaataagctgttgtctagcaatttaaatttataacaggatatcttattttatgtatcttatttccaaggctgtggacagctagttttaaaaattgcaatggtgtggccagggaaagaataatttagtcaaagttttctgggttggctaagaacaatggtgtttttaacctgtactattttgtactattttattgtaattttgaattactggttaattattaactgatgaaattaatagaagcttgtgtgcagtatacttcagttctttattctcctgtaccgtataattgtgattatgcagagattacaatcttattgatttcaaaaaaactttttttttctaaaggtcttttaagtcttttactaggataattatgaccatttaactttgaaaatacatagcaaaatattaagacaaagaaattctggcattctatctctggcctttctgatgtataacttaaaagatatatgtttagtcaatgtgttatgaacttttgctttgttttttgttttgttttgttttgtttttaatatcaggctgcctatgtgttatccaaataccagtactttgtctgcccagtggaataccgaagtgatgtaaactccttcgtgacagaatgtgagccctcagaacttttccagcttcagacttactcacttccaccctttctaaaggcagtcttgagacaggtacagtaaaagttcaagataaacatggttagagatcttccactctgaagattaagcttcctttattatttatttatttatttaattaatttattgttgttttgagacagagtttccctctgttgcccaggctggagtgtagtggcgtaatctcaacttactgcaacctttgctcaagtgattcttaggcctcagcctcctgagtagctgggattacaggcgctcgccaccacatctcgctaaattttgtattttaagtagagacgggtgttgctatgttggccaatctggtctcaaactcctggtctcaagtgatccrcctgcttcggcttcccaaggtgctgggattacaagcatgagccattgtgcctggcctgaagattaattaagctttctttaaaagtgggattcagatttgtacaagaaactgatttctgtagaatttttaattctttgatataccagtggttttagtgttagcttaaatcaaatggatgagaacgggttacaaatcaaatggatcaaatggtttagaatgtgtttctcatatcactgacatcagttgacacaatttaaaacttaaaattcaccagtttaccgagtccttgatttttagaggacatttattatggacagaaagttgctgcttctacaaatcagttttccttccaaatacagtgccttccttgaaaggtatcttggaggccttacactagaggatgttgacatgccctccagtggaaccctcctgatctgtgtcatcaggtctggtgagtggctggttaaagtgaggaatcaaataatagcatgtatgtctgtatctttgtgtgcacacatgtacagctttgtatctgaatcattttacataaaatccataatttttgaggagtagcttaacaaattatttctctctgagtgctcagtacatggtttccaagaactttttcaatgtccaagccatctgttacctgctataaaactttttatactgctagtgtttgattaggagcaaggctatttattgctttgagaacaggtcaaaaaatggatgtctcagccgggcacattggcttatgcctgtaatcccaacactttgggaggccaaggcaggtggatcacctgatgccaggagttccagaccagcctgaccaaaaggtgaaacccatgtctactaaacataaaaaattagccagtcgtggtggcatacacctgtaattccagctactttgggaagctgaggcaggagaatcacttgaacctgggaggcggaggttgcggtgagccgagattgcaccattgcactctagcctgggcaacaagagtgaaactctgcctcaaaaaaaaaaaaaaaaaattggtgcctcagacatctttcttcaaccaaaatgggtgcattttgcactgtctataaattgtagtttcagattatttaaaaaggagcaagaactacaaatttgcaaaataatttgactacaaaattcttctcagcctttatgattgtctccccaaatctttagtgattgtctcactgatgctcattttgataataatctttaagcaacttatttttgtgtttttccacagcattcatcttaattttagagaaaagtccaacttttcccttattttatcatataaaattaaggtgaaataaaatacaatattaaattatataattacagcaacaaagcattactagtttaaaaaaatttggaaaataacacagctgattctttgtaagaagtaaagttcctagacaacctggaaggtagactaccacgctgcaagatttcagtgtgccagttgcctgtcattattcttacagagagaagggaaattgctggctaagtagaggatggtacagaaggcttaaatagacttttcttccttgatccttaaagtttgaaaaattaacaaaaatgtggtgcgtgctttgacttactatttacacaatggttcttagatcaggtggtatgctcaaatacaatttcagtgaaattagcccctctcctccccttctttctcctctttaggaaagagtgagcttgtaccctttccagatccacagcattgcactgtcaacctttgcatctttaattggcccatttggaggcttctttgctagtggattcaaaagagccttcaaaatcaaggtgtgtgtttagattctttgttatattattagagaatataattagagaatgtaacctagttggaatttggtccgctcatgatctacattaagcccctaggccacaacttttatatcctatttgtttcgaccccacagaaatgctgccacgttgatctgaatgtattctttctttttaggtttgtcataccatgttaatacattttaagtgtcatgtcagcttcctttatagacatggcatgtgtcctttagtgttggaatagacccagaatcttggtctttcaagtgctcacccaagaatccagccgtgaatcatctaaagtttagtgttttactacagtctcacttgaagggacatgcagaagaacctttggctatgtaactgtccattctgctaagtcaggtgtcatcacactctttctgtaaagggcaaacaatacatttattaggatgtgcagaccatatattctatcaaagcwtctcaaccctgaaccctgctgttacagtgagaaagccccccgtggacaatatgtcaatgaatgggcatggctggatttaataaaactttatttataaaaataggttgtggcctggatctgatctgtgggacatacttttctgacccctgttccagagacctaaaattatccctgtgtattaggttagatcatcataaagtgacatgttatctcagcaatttcatctcagcttccctcacatggctgaggcaccatctggggttagaaagtggctatggaagttggggtggtcagggaaagcctttctgaggaggtggcacttaagtagagatttgagaaaagaactcctccagagaaaactaagaagagagttccagagtgtacagaggagtggaagaggttaattagcctgttagaaggtgagcaagaacagtgtggctgtggttgagagtaggagatgagaccgcagagtttggtgggaccagatcacacgcggcctacggggtcagggaataagtgaactcagcgagcatttgccagtgggaagctactatgtaaggtgcaatgcagtatacaaaaatatacaagatgttgttcctgttctaaagatgctcaccacctactagggcagacaatacacttccccagagaactacagcaacagctgtgcaggataagtatcttgcgaaggctgtaatagcagagtggcattgagttactgtggctcttttatgctttgactagtaaggaagagaaagagagaaatgggttggcaaaaattaaccaaagactttttcagtaattattttaaaaagaaaaatgttatatttagaatggtattttctttaatggtctycaatccaagattttttgttaaatggtgagttttttttgcatgttggaaaccaaacagctattgctgttgtagtttagatatttttagggtgcctgagtgaactagaagagcagttagtcatgtccatttcctgggcacccagacatgtgaatctacctgtaaagggtcagtttgcagaggcttactaccattccctcagtgtggccatttaatggactaatgtgtcccatatgggctcactgtaattttattttttactctaacacttaaaaaaagaagaagaaatgtttatcatagtagtaaaatgtttatttcagagtaagaactattaggataaacaagttagaaccagttgtacatcttttagcagcactaaaatagctccccaaacagcttgtggttaaaaagaaagctaggctgtaacaaaattagattagtaatagctaagataatttttatttagaaaaagttttattaacgaaaaaaagtaagtgctagatttaattaacgtttgatgaatgaatgctgtgggtcaattcagaaatcattctaaaagaagcatgtatttggaagatgtggttttaatctgctggatgtgttctaataagtttttatttagtgaaaaaaatccaatagtaatgtattttcgttagagtgagtccatgacgccaaagagacacagataggaattttatagcaggtgattttttgaaaatttgctaatatatttgtttgtttctaaaggattttgcaaataccattcctggacatggtgggataatggacagatttgattgtcagtatttgatggcaacttttgtacatgtgtacatcacaagttttataaggtacttttacacttgagacattttttagatgatttctttgagttctcatttccatcaacattagtttgagtaagttaactttttccgtcaatggtaatctacaatattaaagtgaatggtggcccctggaattagagtcttgagcaagatggttaacttgtaattgttttacctacatttgaacaacttaaaaaaagatagtatttgtcatggtcctggaccacattgaagacccaattaatgtggatggtataggatttgaaacttgaggagatttgatttctcaactgtgggcattgcaatgatcatgaatactaagagttaaaaaggragataacgaaatgcatccagtctaccaattattacttgagtgcctgccatattgtagaatgttctagggacaaatatggcagagaacaaaacaaaccaaatctctgcccccatagctacttgtttggaagttgaagaaagaatgatgagaaagagacaataaacaaataaatatagtttgttagatggttgtaagtgtcacacagaaaaataaagcaggccgaggggatcatgcctgtgtgtgtaggggctggctggtggatgggtggatgaatattgccattttagaaagggtggtttattcttgttattaaaccttaatgttttggatctgccttgaaataccagtgtgagtgtgaaggcttaacatcaactgcatgttaactttattttctgtggtctctactgggggcccagaaggcagaatgcttattaatagtacctgagctgtagaaaacatggatttccttcatagtacttggaaggaaattcatatttagcaatccctaaatacacattttaaatatgtaccacagtagtgtgagaatttttatattaactatttttgagagacagtcctgatagcgagtttatcaatttcattaatcttttcaaaaatatcaactccaggctttgttaattttctctactgtaaattttttacctcattgatttctcctctcatctttcatttctctgccttttttaaatgttcaatatgctgttctttttttaattctggagataagcttagattattgatttttagccttcttatctaatttatccattgaagactattaagtatcactttatcctcttcctgcaagttgtgatatttgtattttcattatttacatgttttctgatttccagtattatatcttctttaacacatgggttatttagaagcatattcattagttttcaaacaaatggagattttttcactttcctcccttaattccactgtggtcggaaaacatactctatgatttgagtattttataatttttgagatctattctgtggtacagcatgttatctattctagtacatgctccatgggcaaaggtgtattctgtagttttgggttgtagttttgtctgtgtcagttaggtgaggtttaattaaatcttctgtactgatttttgtttatttgtttttgtgtttgtttggtccgcttgttctatcagttactaagagagctttgttaaagtctctcattgtgattgtaaatgtatttttttatttgtagttctaccaatttttggtttatatattttgaggttgtattaggtatgtacaaatttaggattgtcatatctctccattgaattgatccttttgtcattatataatgtctgtctttactgcttgccttaaagcgtactgtgttgaatattaaaatagcaatatcagctttcttttggtcagtgtttgcatgttatttctttgtctctccttttatttttaacattcccttttccttatatttaatgtgtttcttttttctagtaagcatatagctgatttttttccctgttttatttataagacagttgataatctttatccttttaatgggactatttaacttatttgcatattatttattgatctatttgggtattagtaattagtggttaaatccttaaaactttgttttcagaatatggcagctttttagggcattaactcatatgctttctttaaaaaaaaaatgctgtcctctcagtagggaggtgtcatgctgagccatgttgtccaccatttgaaagcagctatttagactgttagaagacactgagagtgccaggatgcagctagctgggagcacctgctgacacaattttgcatttagctgaacttgctaaagcagccttccttttctctgttggtctctacttggggtttatgctgtgaagttgctgactcttttaaagaaatgaaataaggcgaacagtgtcctgacctgagtgtgaaagttttttggcagatgagttgagccacgtgcatgaagatgacccttggtgggatggctcatctgggctcttgtgcaatttgttaagtcaaagattttcagagtaaatagttcctctgctcatcctcattgtggtaacactaaatagcaaacatttctttgttgctgggatttctactttctataattcaatgtgaacaatctttactgtaaggcatacattatttacccacataaatgtctttcttagaattctatgccatctctatacatgacttgtatgttgctttttcccattggattttaaagcagatctgcttttattttgttttttatattggagttcacctaggactgtctttgaacaaagtccacggcacctgtatcactggtaaggggcttcagtgctaggctcaggacttttgtgttctgactctgaatattcataactccctggagatatttttcaacaaaatacctttcatcatctgaagtttcttggaagttaaaaatttcaattatattttcatgccctctttttggtttgtcctatgttcaccaggctcctttccttacagaatagtttttgtgtctcattcaatctcaagatttgccatttatccccacctttaactttggttgccctttcaagagcttttgtagaacttagatctgcaccccttcaattgacttacattgctcttgtgttttgtgtttgtgcattctttctccctctctgctgtaacccttgacactaacattgcacattaaagtgagctattatcaagagctattttaattctgtaaagattcctactctacacttaaaggaatggtttgttttaaattggaggtatgtgcttcacttatccctattaaaataacacgaacttgtcttctttgccttttatcattaggggcccaaatcccagcaaagtgctacagcagttgttggtgcttcaasctgaacagcagttaaatatatataaaaccctgaagactcatctcattgagaaaggaatcctacaacccaccttgaaggtataactggatccagagagggaaggactgacaagaaggaattattcagaaaaacactgacagatgttttataaattgtacagaaaaatagttaaamatgcaataggttgaagttttggagatatgtttctctctgaaattactgtgaatatttaacaaacacttacttgatctatgttatgaaataagtagcaaattgccagcaaaatgtcttgtaccttttctaaagtgtattttctgatgtgaacttccttccccttacttgctaggtttcataatttaaaagactggtatttaaaagagtcaaacactataaaatgagtaagttgacgatgttttaagattgcayctggcagtgtgcctttttgcacaaatatttacttttgcacttggagctgcttttaattttagcaaaatgttttatgcaaggcacaataggaagtcagttctcctgcacttcctcctcatgtagtctggagtactttctaaagggcttagttggatttaaaaaaaaaaaaaaaagattgtctrcttttcaaagaagtaaccatttgccaggggaaaacattctgcttttaggtagtttcaaaattcaggggagggagcctgaaatttttgccatgattggtttgttagaaagagcaggcatcagactacttctgataaaattgtttggaaggtcacgacctcgcaaaaacttttcaagagcaacaaggaagaattctgctgtgaagaacacagtgtacggatcctccgcatattatctcaacagaggacagtagctcaggaggcagcttcaaacggtgacctgtggcctgggccatctcttcgtcatgtgcttcacttttccctgtttccctgtgaactggcttccatggttctgtagggtagtgagtcggggttgtggctgcagcagagcaggagatgcttgcccgagtgggagcaacccacccccgtgtccccaatgcctcactcctggcttctagtgcagccctttgtagactcacctcgcaagaaggaagatctgcctggagacctgatcccagtccagctttttgaccataggtcatctttgtccccttgctcctttgcatcatgtcataaaatttgaggatatcagctgattattttttcttccaagaatgaaaatcaagcagaattgattcctacacgaaaaaaaagcacacgaatgccaaacctttcctttggtggactggacactaaccagatgagagtaaatttcttatccgtggacgtatgtaagctactgctgctgtgtgctctccacagccatatttattgtattaaacaatcagcactaaaccttcaaaaattgcccagtgttcctagttaaatgttcagaggggagaaatagatatattttaaataatgttttgctaatgaaaagagtaaatatttttgtttaaatcagcaaaaactttccattattttatatttccgtctactatacctaaaacaaaagattgccgttatacctgggttccactgatgcagtcagccagcacctcctcacatgcacacatgattagacataggtgcactcggtaccaagagtccattttatggtccagcatatactccattgattcatcatcactgcatgtgttcagccagtgtatctcacactatccatacaaatctaaaattgatactggaaatgttattataggaggcagtgatcgcatttaaaatcaggccacctacaagtttaattttcaacatctcatgtttttatttgtcccattacagcctcaaatgttggtcataaaaaaaatttaggctaccaaagtttaaagaataaaatgaaaattttataagaacttacattaaaaactcagtagtttgcatgagtaagaactccttgagatacacagatccccccacatttgtatttaaaataattggtgaggcattgaaatccagaattataagaaagcattactgaatatgtgtgttataaaatcaatattattataaacaaaataggaagctagaaatatttgggatcacagtaatagcttttctcaaatatacttttagaattgaatgtacattatcctatatgtaaaaaagcaaattattaattttaatggagctctcgattgacctttttagcatacttttatagcatgtatattaaaatagaatatattttagcaaaagattgccataaaaccctgacttggctcattttgatatttgcactgtgaagagggcttaaattccaatgtagcaatgtggtggcagacaaatgaaaaactaggaagttctttcacagtaatgcctagttgttccaaatttgctatatttggaggtgctctactggtacttcctgcttgactctctgacctgtgggatgcacattcttcctcagcgctttttccttgttgtggtgacgtacattcactatctgagagtgaaagaccacacacacccctctttttaaaattattgtatctcttccttttcactttggtttgaacaaagatagtgtcaccttgttccgtgaaaaagaaaaagcataaacagtgtatatttagggtatatgggtgatagcttatgatgtgtgtcaatcagttctctgaatcttttactgaaactgagacaggaaaataaaactgaaacaaatcatattttgactttgttgtgccattttctcattggagaagaaatattcaaccagtgtttacaaaataatgatgggtatatgtaagtattatatcgtgtctattccatcaccagcacctacagtgaaatcttcagggctggggataaaataagttctggtgattaccaaacatctgtatttgttgagaggcaatgtcctcttaatacaaagagtactgaacttttatggtattagcacagtttgtaattacctgtgtatttttgtgaatctctgaatgatgtgtgccccttactagagctttaagctatgcagaggccagatgaagtctgtttgggttggccgctgcatacccagtgtctggcatgatgcctgctctctgtaggccctccagcttctgaaatgcacaagcttggagcttggtctaaagacccagctgtacacattgcctcttgtctctagggcatctcctgtccccttccccagaccttttattttgcagagttctaaggtgggcctcattattcctagccaatagggttgttttaaggattcagtgaaaactcatattgtccagcattaagtagctgattagtaattcttaagtttccttccctccttcctgtctgctcctcttccattgcctgtctgcagtgggaaacgacaggttataggactgagcagaaaactaaccaccgctttggccatgtctgctttaggtggtgggtaacggaagtgttccatgaatgatagacaaaccgttgatccacttcagcaaacccgaaatgtctacctgacccagcactgtgctttgttctcgcatgaagaaaaaccttagaactagtagttttctgcctagtcttcaggtcagacaggtacagaagtaatgtcatttgaagtggatattgatcagagtgatgacagatacataaaccaggtgtgtgggaacacaggtgaccaccgtctgacctccataagacctgtctttcctgaccatagtccatagccagatctttctgcccccctcttgaaacttacaaagtttaaaattcattccttgaagaggggctgtaaagatctgggaatctttagtagctgcaaagaaaaatcaggtctagataatttaaccaaaatcagaagccattcctaccttaatctcatcgttttcctgtacagaaacggagaaccttcttaaatcatcagataggcatcaataatgatttagtaaaagttgatgaatggaacatttcctgatgatgggcaaagtgagtttccagaaggaatggagagaatccagcctgttctctactgtgtacaaaagatagggctggtgaagcaagagccttgtcactcaagagagcgaaagaattattgagggagagtgcaccctaaggatcgcattgtcctctagtggaagtgaaatttcaaactgctctctctcaacttgtaacatgaacagggtataggacttggagtttaactctcagactttctgctatgcatctgacttgagtttaatgtgtccagataattttcttttttcttttctttttctttcttgagacagggtctcgctctgttgccccaggctggcgtgcagtggcatgatcacggctcattgcagtctcaacctcccaggctcaagcgatcatcccaccttttagcctcctgagtagctgggactacaggcacatgccaccatgcttggctaattttttttttttttttggtagagatggggtttcaccgcattgcccaggctggtctccaatttttgaccgcaaatgagctgcctgcctctgcctcccaaagtgctgagattacaagcatgacctggcctggatgattttctgttcgacaattcaagcttcagatgaggcctaggcaagtgatgagtttggggaacattcttgagtaatctattaaatatatttttcattggttttagtaaatctcaagaagttgtgaagaaaaggaaacagaggcttcagctagtccaggtaaggcagatacatatgaattgtcagaaattccatttgttttttcccccaacagctttactgagatataatttacataccataacattgtgccaccaccaccaaatccagtttgagagcacttccatgatcttccaaaaagtttcctggtgcccatttgcagttaatccccactccaagcctcagcctttggcaaccactggtctgcttcctgtctgtgtgatatttcacataaattgaattatacagtatgttttgcacctggcatgtttttgcatgtattagcacttctctcctgtttaatatgttttgctaactcatcagttgatgaacatttgggttatttccagttcgaggcccttatgaagaatgttactatgaatgtgtgtagacatacatgtctttgtgcagaaatttcttcatttctctcaggtagatggctaggggaggaattgctagattgtatggtaagtttcttttaaagagataacttgctgggcacagtggctcaggcctgtaatcccagcacttcgggaggccgaggcaggtgaatcacctggggtcaggagttcaagaccagcctggcaaacatggcgagaccccgtctctactaaaaatacaaaaattatctgggcatggtggcacgctcctgtaatcccagctacttgggaggctgaggcaggagaatcgctagaacctgggagacagaagttgcagtgagccgagattgcgccattgcaccccagcctgggtgacagagcaagactctggctcaaaaaaaaaaaaagaaagaaagaaagaaaaacaaactgttttctaaagtagctatacaatcttacattcttgcttgtgatatgcaacggttgtagtttatctgcatctttacccaaacctgccatcatctgtcttttaaattatagacattctagctgatggatagaggtatttcattgtgattttcatttgcatttctctaatgggtagtggtggtgtgtcttttcatgtgctttatttctcttctgtatgtcttctttgataaaaatattcatatctttttgcccatttttaattaatttgagacagggtcttgctctgtcaccaaagccggagtgcagtggcgtgttctgggctcactgcaaattctgcctcccaggctcaagagatcctcttacttcagcctcctgagtagctaggattacaggtgcccaccaccatgcccagctaatttttgtatttttttgtagagatgcggttttgccatgttggccagggtggtctcaaactcctgggctcaagtgatccacctgctttgacctcccaaagtgctgggattacaggcatgagccactgcatccagcctcttttgcccatttttaaatggcattattttccttcttattgagttgtaagaaaccttatcagatatataacttgcaaatattttctctcaggctttggcttgtcttttcttaatggtgtcttttgaagtttaacatcttttaaatttgatgatgtccaattaattaactttgtctcttgaggctcctatgtccagcctcagaggcaaccagtaatggaagtgttgcccaggtctcctctgcacccacgtgtggcctcatctaggaaagcgcctggcccaaccacacagttcccagcttgtggtaccattagccctcccctctcatcctctgagattgtcacttccactgacttctctgggtatgggtattgtccactgttgcaaattgagcaagtcccattggaccatcggagtcctcagagtctgtcctgccctggctaaagctctaacccagctgagctggtgggggcacatgtgcagccctaggaaaggattccacaaacacccactgtgctccagtttttcaagcataaacctttttcatagtgtatacctttgttcaatttctacagtgcagaaacatacattttgtccagcttttaatagatgctttttggggagaggatttgccacccctactcagacatagctggaagtcccaccttg

SEQ ID NO: 93251 - DNA, 19876 bp, Homo sapiens
  misc_feature (1)...(19876): n = A,T,C or G
ctttgggggtcccacacacacaaggggctcaaggctgacccctcctcccacaagggcctgcaactgctaatccctgatgccccccactgtgtggatggcaaaactgagtccagggcccaaggggctgagtcaggaccctcttttcggccccctacatggtgggtctcaacactgaggcagtccctacaggcaacaaggatggaaggacagcactggctgtccaggctggagggactcagagaggaggccactgggggactgcctggaggaggagggcagcccgggcctgagggcctggcaggatttggtggggaagggaaagtggagccccaggtgggcagcagcagtagcagaaggggggcagggagccgtctgtgggggacagggagggtccggctgcctgtccagggtgtggaggaggagaggcagcccacaggctcagagcccgaaggaggcgtggtgcctgctctgccggcctcgctctgggcctgacttccaaacacccaattatccctaagtgcatccgatcgactggcagggcggctgttccggggcccacctcgtccatgcgctccgcccgccctgctgtggggctccatctgatggcctcattagggmtaattgctctggcatttgggtctgacagggacggcggattctgtcctgtgttggggcgtcttggttcttccagcttgggggatggaggggagctgcttccttacacggcagagaaaggccctgcaccccaggcggggcaagatggcgtgaggggaggatgcaggactcactgtcccctgccttcttgggacaatgggaactgagggacagcccagggtggcatgacaccccaaatcctcaggaggtcccccactgtctcccaaatgtgagtgggggtctgggaggctgcaggccggtgtccctgggagccaggctctagagggggcatctctggggaccctggggaccccgggctataaagagaactgcggagtagacatgggcgggggggcagtgtgtgctccagcatgtgtgtgtgtgtgtgcatgtacacgtgtgcacctgtatcgcctgtgtgtgtgcatgtgatgtgtacacgtgtcatgcatgcacgcacatgtgtagtgtgtgctcgtgtgtggtgtgtgcctgtgtcatgtatgagcacacttgtatatgttgtgtgtactgtgtcatatatgagtgtgtttgcctgtgtagtgcatgcacatccgtgtgtgcatctggtgtgtccgtgggtcattacgagtgcatcgtatgtgtatcgtgtacatgagtacacttgtatgtgtggtgtgtacaggtgccatgtaagtgtgcttgtacatatatgcatgcatgtgtcatatgcatctgtgtgtgcatgtgtgtggtgcacacatgtgttatgtctgagtgtgcctgtatgtgtgctatgtacacgtcatgtgtgagtgtgcttgcatgtgcagtgtgtggatgctgcttgtacctgtggtgtgtacctgtgtcatgggtgctcacacgtgcatggagtgttgtgtgtgtgcttgtgtgccccatgtgtgcatgtgtgtgtgcctcacacagatgcctgcatttgcctaggcacttgcaagaggacaccatgctggctctcaaagatcacagggccacctgagccctgtgcacaccacagccaggccatggctagaccctgcagagccacagggcgatgcctgtcagccaggggacccagaacacctcctgggcycctccccagcacatggctgggctcctccagcaggcctggatttgggaagggcccgtggtgggcaaggctggtgctggggagcaggcctggtggcctcagagactcgccctgtgggcggagcagcctcacagccaggtcgaagtcagcactctgmccctgccccacgcggggagygggcaccagtcccagggcacagacgtgctgggtgattaatctgggtgattaagcctcgggctgagaggctgttgagagagaacacgctccattgtggagctggctcagcattccttacggccatggtggcaggggctgtaaccacagggacggcggaagtggtggagggtggtggggtatggagggaagcccagagggctccgtgcaggaaggtggagcctggtgcaatggaggggacagcaagggctcctcagacctctgcggggcccccactcccctggtcacctgttttgtctctgatctggcctgggtcggccctcactcctggccccacctcatagccccccctggtggggctccgctccagcccttctccttcccaggggccagtatgctggccccaggggtctcttggggcgtgacctcggcctccagagaaccctgtcccagctctgcccttccctctggggtctctgtagatgggacgctggtcacagcagcctgtctgatttgttccctgtggcctaggttcctgagccccacagtgccaggggatggatgccaccggatctttgaaagaccagtgtcaggccgggcgcagtggctcacgcctgtaatcccagcactttgggaggccgaggtgggcggatcacgaagtcaggagatcgagaccatcctggctaacacggtgaaaccccgtctccactaaaaatacaaaaagttagctgggcgtggtggtgggcgcctgtagtcccagctactcgggaggctgaggcaggagaatggcgtgaaccggggaggcggagcttgcagtgagccgagatcgcgccattgcactccagcctgggtgacagagcgagactcggtctcaaaaaaaaaagaaaaaaaggaaagaccagtgtcttgggagttgggaaacctgggctggagactcactgcatgacccctgagaagttgcacctcagaacctcagtcctcgcatctgcagaatgggtctgtgaacacctcagctgcccgaacgtggatgccgcaggctgacccagcactgagctctaccaagaccaggggccagccgtgtgctccctccaggcctgtgcccagcgtggagaggcctcgtcccgtgggcgctggrgtggagccttcctggtgtttgtggacatctctggagagggccagaggcaggtgggtgacacggggcatggctcaatcatgggtggtccagactggagaggtaccctcgggctgggagcggggaggctggccagggtggactttcggggcctccatggataccctcaccatctggaatcggagaggggcacggcacaaaggagggcggggccagggccaggactggagtcgggggcacctctgtgccaacaggggccttggatctggggtacagcatggttccccggccctgaaggggctggcgtgtgggacaggcttcccaggaatggataggcagggatggatgctgcctgattggggcgggaggctggaggcagggcaggtgcaggcacctgagggcagcactcacctccacaggggtccaggggcctccccagcctcagtacctggcctgggctcctgcctccagagagcctggccccaaggaagagtctagtaagcttagttcccatcgggcttccatgaaagcacaactggcccggcaggaaaccgaattaaaaagcaatatttgtatcagtggaagacatttgctgaaaggttaaatccacatccggcagtgtgggccatgagcctccggcgtggtgttcatcaggcatgtctctcctcctggcctgggcacctgagcactggggccgccctgggcagagctggggcrgggtgctggggggcctggagctgcctcaccgagggatcctcagcagccgaccctgggggaggcaaatgagactctttctggggaccttgaggggagctcgggggagccatgcagagcttcaccaggcctggacactgggcatggaggctgggccacccaagggccatcaccagggactcaggtgggtgggcctcagccctgggtgacagaagctcacgggctgcagggcgaggccagaggctgagccttcaggctgaggtcttggaggcaaatccctccaacgcccttctgagcaggcacccagacctactgtgggcaggacccacaggaggtggaggcctttggggaacaccgtggaggggcatagcatctccgagagaggacagggtctgcactgggtgctgagagacagcaggggccgagcggtaggcttccctgcccccagggatgttccaggggagcgcaagggaggggcattaatatcgtggcaagaaagggcaggcattgcagagtgagcagcgacggaactgggttttgtgggatgcataggagttcacccggataagaggtgggtgaggaatgacactgcaaaccggggatcacggagccccaaatccttctgggccaggaagtgggaagggttggggggtcttccctttgctttgactgagcactcagcctgcctgcagagggcagcgaggagccacggaggggtgtgggacagggatgccatggctgaagcagttttaggaaaggtcccaggggctattgttgaagagagaacggggagcggggagtcccacagctgacaggagcagagtgggccctgagagatgccagctctgggtgccacagtgaccagccggggtaggccttcgagaagtcagggagcgtctagggcttctggctcctgctgggcccagggtgtcatcttgggctgccaacaccagaaagcccagcagatacaggaagccccaagccctgtcggaaacggttcttctccaggagggacagcggtggcagcgttcagccgcaggccatgcactctggggccacgtccttccctctgtacagtccagcattgtcaaggcgggctctggccatctctgctgaccccagagggatggggaggcctccccttccaccagaagggccagaagccaccctgggcaggggcatcactctccctgggtggggcagcggctgggagcaggaggtgccagtgggcgtgggctggatgcgggtgcctgcggggcggacatggaacttgggggaggctctaggctggggttgtcctcaagggagttctcaggtcaccccagggtcaccctcaacccggggcctggtggggtagaggagaaactgcaaaggtctctccaaggggaaggcatcagggccctcagcactgagggacgtgcgtgctcttcaaagaaggggccacaggacccccagggaagccaggagctagcagtgggccatagaggggctgagtggggtgggtggaagccgtccctggccctggtcgccctggcaaccctggtggggactgtgatgcaggaggtggcagccatttggaaacgcgtggcgtctccttagagatgtcttcttcagcctcccagggtcctccacactggacaggtgggccctcctgggacattctggaccccacagggcgagcttgggaagccgctgcaagggccacacctgcagggcccgggggctgtgggcagatggcactcctaggaaccacgtctacgagacacacggcctggaatcttctggagaagcaaacaaattgcctcctgacatctgaggctggaggctggattccccgtcttggggctttctgggtcggtctgccacgaggttctggtgttcattaaaagtgtgcccctgggctgccagaaagcccctccctgtgtgctctcttgagggctgtggggccaaggggaccctggctgtctcagccccccgcagagcacgagcccctggtccccgcaagcccgcgggctgaggatgattcagacagggctggggagtgaaggcaattagattccacggacgagccctttctcctgcgcctccctccttcctcacccacccccgcctccatcaggcacagcaggcaggggtgggggatgtaaggaggggaaggtgggggacccagagggggctttgacgtcagctcagcttataagaggctgctgggccagggctgtggagacggagcccggacctccacactgagccatgcccacccccgacgccaccacgccacaggccaagggcttccgcagggccgtgtctgagctggacgccaagcaggcagaggccatcatggtaagagggcaggtaggtgcccggcggccgcagtggaccggagcccagggctggtgccagctgcctctgctactccccagcctggctggcagccccaggctcagggtccatgcaaacccctgggacgcagcgtggatgtggaggcctgggcacagcggcatcccctgtgcctggtgtttgagtccctgttgggggagggtgaggtgatgcctgtccctgtgtgtgcccctcttaggccgacctctctcgggggtcgtgtgggtctctgtgtcttgtttcatcttgaatcttaacgatcggaatgtggaaacaaatccatccaaaaaatccaagatggccagaggtccccggctgctgcacccagcccccaccctactcccacctgcccctgcctccctctgccccagctgccctagtcagcaccccaaccagcctgcctgcttggggaggcagccccaaggcccttcccaggctctagcagcagctcatggtggggggtcctgggcaaatagggggcaaaattcaaagggtatctgggctctggggtgattcccattggcctgttcctcccttatttccctcattcattcattcattcattcattcaccatggagtctgtgttccctgtgacctgcactcggaagccctgtgtacaggggactgtgtgggccaggctggataatcgggagcttttcagcccacaggaggggtcttcggtgcctccttgggcactcagaaccttgggctccctggcacatttaaaatgggtttttatttatggaccttgattgaaatgtggtgtgagttgtagcagtgtcatttccaggtaccttctcagggacacagggcgccctcccccgtcctcccccgccctcccctaccctcccccaccaggctccccatcaggcatcccctccccagggcgccccggggcccagcctcacaggctctccrtggcctggaactgcagccccagctgcatcctacacccccaccccaagggtaagtaagaggggactctgggaggggcttctgctgctccccttcatgttccacaaccctggaagctcaggatgaagctgattcttctcttacaaggggcccagagccttcttgggagttcagctccaagggatgagccccaggtgtctgccaagtccccctctgtccaggcctgggacggctctgggatcgaggggtcagaggcgctgagcccagggagagacacctgcgcccagagctatgacaaagggtggagggatgacaaggcagccaggagcgggcgcctgcggggtggcacagaggggcagggcccgaggacaggtgtcctgatgggagtgtgagaaagggtcccctgtgcggcagccaggagggtaggggggttgttcactggggccctgtgggggcagctccttcctgagctgccgttccctccccggcagccgatgccactgtccatcaagacatcgccctcttcccatcactaatccagttagcgcctggcctggggatgagtgacacagcgtctctgtctgtctgctcgccacagagtggggagcaggcgagcaccttcccagcccccactcctcccccaccaccactgcttctgactgggctgcccccatcgggaagggcgtgcaatgcccgcaggcacctcggctagcatctgccccagcaggcacacagtaggcgctcaaaaacgtgctctcatcccctgcctctgtgtgccatcagcgctgcccgactgtgggaccagctgtgggtggrggtccccgggtctcagcaggtggaggaggcatgggtgccccttgtccccacagtccccgcggttcattgggcgcaggcagagcctcatcgaggacgcccgcaaggagcgggaggcggcggtggcagcagcggccgctgcagtcccctcrgagcccggggaccccctggaggcygtggcctttgaggagaaggaggggaaggccrtgctaaacctgctcttctccccgagggccaccaagccctcggcgctgtcccgagctgtgaaggtgtttgaggtgagctggtggccttcgtgtccctggggcaagttcacctgtgggtggggctgtgtgggctgagttcctgacccctctatagcagaggtgcagctgcccaggcccccgaggccggcacaggatgcagcaggggagtctcaggcctcagctcagcccccatggcatctagccacacccccgtgtttttgagggatcctgagcccacccctagggctgaggctaccaagccccactgtgcctcttgccttgcccatcccctggatccccctcacccaccatttcccacgtsgggggctcccagcagggcagcacaagaggcaggggcagggcagtgtgccctctcccacccacccagcacagcggctcaggtgaccactgattgcattagtcactccggccccactgtgccccgggaggcaggtgacccagctcccggaagaagctcccaaatgacattaaagccagactccccgccccccagctcccagagccagttttgtggcccgagggccactgcgacccaccgcccttgttgctaggcaacaggaggtgggggtggagcggacccttctggccagtgtcctggacgctcaggggccagtgagactcagggcccatcctacaaacctggatgaggccaccagggttgggggcaccttctgaccagtggctgaggagccggactgtgtggcatggccttgggacacacacaccgagccgcccagaaccaggttaagcctcaagcggtgacaactcctggttaggcacgtaacacaaaatccaacttgccagtggcaaaccctggcctggtggccgacagctgacctgagcctggaagaacgggatctgtgtgctgctagcacaaaagtcaagggcagggcctggccagccagccagatgtgcctcctccccgcccaccccaccctctctctccatctctgtctctttctccttctctctctcttcctgcttttgctccctaagacgtttgaagccaaaatccaccatctagagacccggcccgcccagaggccgcgagctgggggcccccacctggagtacttcgtgcgcctcgaggtgcgccgaggggacctggccgccctgctcagtggtgtgcgccaggtgtcagaggacgtgcgcagccccgcggggcccaagggtgaggcggttttctgtccttgagggccaccaaatgaccttgagaggctggggtgcaggggctcctgcagggggaccctacagtgaccacgtggtggtggcctggttccctctctgcgggctccactccgcaccccgttttgctacacatccgtgtccgggcctggggccactccaggatccccccgcagctctcacagccccggctgcctctgccccccggaagtcttgtaggggaggctgcttcaaggtgggtgacacagccccacggctccgagctcaccaagatctcttcctccatcacccataaagtcccctggttcccaagaaaagtgtcagagctggacaagtgtcatcacctggtcaccaagttcgaccctgacctggacttggaccacccggtgagtggtgcgcccctcactcaggcctcctgcccctgatcacatcccctacccttagcccaaccctggacaggagtctgtcggctccaggagcctccgtggcctgtgcccccaccccagcacagcctcctgaccygtgcatcccctctgccctcagggcttctcggaccaggtgtaccgccagcgcaggaagctgattgctgagatcgccttccagtacaggcagtgaggggcccctgcgctcgggacccagactccgtcctgcaggctgacgctggacctggggggtgggagggaaggacaaaggggaggacccatcttgtcaccagcatcagtgcctcctgccaggcagctctgctccagggctttccatgtccccaaatcccagtggggaaactgaggcccaggggggctagagcaacctgccgaggccacatagccggctcacggcacagtcagctggggtgcaccctcctgtccatcctccaacccaaaggcctcgctgcactaggcgggtgtggacctgtgcccwgtgaagctccctccctccctcctgcccttctcactccccgaggggacctgctgaccactggccccctccccagcggcgacccgattccccgtgtggagtacaccgccgaggarattgccacctggtgagacctccgtgcagctaggggctggggaggagcccrggggatgcctcctggaatcctggcgtgtgagggccgcctccagggaccttggcacaacargagagactaaggccgggaagaagagggacttgcagggctcagaatgttgggttgggaggaagaggctacccatcctgtcgggccatccccagtgtgctgagggaccgcccctcatggccccctatcccctgggattccctaaagccaccagcaaaagcccctcccaggggcctgggtgttcaggggtccccaagaggcctgcgttggtaggggctcaggcaggcagaggcacccacagttcaggaggggggtttcgggcactggggtggggcattagagggccctgagcctggctgcccgcaggaaggaggtctacaccacgctgaarggcctctacgccacgcacgcctgcggggagcacctggaggcctttgctttgctggagcgcttcagcggctaccgggaagacaatatcccccagctggaggacgtctcccgcttcctgaagggtgtgcccagacgggaggggcgcagagccggggggccggggatggtcagccaagcgccccaccccagcgcggctccagcccgtcccggctcggcagtgacccgcgtggccccttgcagagcgcaygggcttccagctgcggcctgtggccggcctgctgtccgcccgggacttcctggccagcctggccttccrcgtgttccagtgcacccagtatatccgccacgcgtcctcgcccatgcactcccctgagccgtgagtgcgcgccctggccgccagcccgagggtggggggtgcgacgggcggcccctcagcccccttctccctcctacgcgcagggactkctgccacgagctgctggggcacgtgcccatgctggccgaccgcaccttcgcgcagttctcgcaggtacgccgcggcctcggagggagccggggtcacccaggggctggcttggcgccgggggcgggcggggatcgatgtgcgggtgggtgaagtgtgctgcctgctcccgggccccgccaaggaggctcggcgccccgagggtcgcgcggcatagggcggggctggagcggagcctcccacggcctgtgctgccacctgccggctacctgggaacggcgcccacgggcttacgaatatggtcaaggagggctgcctggcggaggaggcccggtgkaggtgcggatcctgggcggccagggaaggtctctgccgcccgggaagtgtcccagagacccctggaggggctgctgacacccccggtgcccccacctcgagcatgacccagggctgcctctccccatccttcatcctccctgctccacaggacattggcctggcgtccctgggggcctcggatgaggaaattgagaagctgtccacggtgggttgacccctccctgcagggcctggggtgtgggtttgggggtctgaatccaggcctcaccctcttgccgtccaggctgaggcctctccttccacccacgaattgtgaccctcaccctggcctgcctgcatcctggcctggcctccctgggggtggtgtcctggtcacgggtgaccaggggctgcccggtgggcggcagctgtctctgggctgatgctgcccggcttccccgcagctgtactggttcacggtggagttcgggctgtgtaagcagaacggggaggtgaaggcctatggtgccgggctgctgtcctcctacggggagctcctggtgagagtytctccttgctgcagcccccagcagaggggcagggctgggggacrgtgcagggaggggacaggctcccagtgggaggaaactgaggcctggacctccaggactcaggctctgtttgggagaaggcttgtctctgcccagtcctcaccccacattatcccaggcctccgaaggcccggcgggggagatgggggtgactctacccaaggaacccacccagcgtcaggccacggtgccccagttccctcggggacctgggtgcagtggagtcagtgatgccattggcctcctgccagcactgcctgtctgaggagcctgagattcgggccttcgaccctgaggctgcggccgtgcagccctaccaagaccagacrtaccagtcagtctacttcgtgtctgagagcttcagtgacgccaaggacaagctcaggtgggctaggctgctagggcaagccccccatggtgcccccaaactgggccagccaggccttccttctggccttgagcagggctggacctgtgagcccaggtcacagatgagaaaaccgacccctggytgcagcagcccccacacagcagggacaccatccgtgagaaggaccccagcgtctggggaggggcagacctacaggactgggggctgctgggtggccgggtcaaggccagtcttggaggtgctgacagagcctgagctttgtgaggacgtcctgtggaacctgtcccggccccctgccctgggatggggagaagtcagggggatagacagagtcaaggtgggggacagggcgggagtggggtccccagggctgggggcctttggtgcagtgaccagagtgtcaggagaggggagcaaagccctctagcctcatcctcataaaaggtctcatcattttccctccagcctcttatgcactggggaaactgaggccaggggctatgtgtccagcggacaggggtgctgaattccacccacaggcttagggatatggtcaaggaaagcttcctggaggaggcccagtggaggttcagggagggatggggtgcccggcagtctctagtggaaaaggcgcctagcctatctcccccatgaaccccctcacccagccctggaagaggcctcagtgtcccgcctgtgaccagttggctcagaaaagccctgggagctctgagccactgtgaaggtggaaacgcggcccctggcctcccctctcctggaggctgcagactctgcccgccagttgacgagggctctgccgctctcctccccaggagctatgcctcacgcatccagcgccccttctccgtgaagttcgacccgtacaygctggccatcgacrtgctggacagcccccaggccgtgcggcgctccctggagggtgtccaggatgagctggacacccttgcccatgcgctgagtgccattggctaggtgcacggcgtccctgagggcccttcccaacctcccctggtcctgcactgtcccggagctcaggccctggtgaggggctgggtcccgggtgccccccatgccctccctgctgccaggctcccactgcccctgcacctgcttctcagcgcaacagctgtgtgtgcccgtggtgaggttgtgctgcctgtggtgaggtcctgtcctggctcccagggtcctgggggctgctgcactgccctccgcccttccctgacactgtctgctgccccaatcaccgtcacaataaaagaaactgtggtctctacacctgcctggccccacatctgtgccacagagacagaccctgggatcctcagactcccacacccccaccccagcctcactcagaggtttcgccctggcctccttcctcctctgggagatggctggccgccctggccaggcagctggcccctccgggcctggtttccccgctcaccctgaggccccgcccagctctgagccccaagcagctccagaggctcgggcaccctggccgagctgccccatctccgtggggtgccctcccaaggtggggagccacgtgacagtgggagggcctctctcaggcctggaagggagcaggggtcacaaactgtgctggctgggggtggtctcagaggtgggcctgcaggcctaaccctccctgctgacagggctcccagcccttgagagaaacagggatggaggaacagctgccctgatgccctcacccacccggagcaggccctgcgaaccaaggggaacctcagtgtggcccccagcatgtgtgctgatggggagggtctggctgagctggtgcccaggcagatggtctgggcctgtctccccagcgaggcaggatgggggctggatttcagactctgtaagatgcccctggcttactcgaggggcctggacattgccctccagagagagcacccaacaccctccaggcttgaccggccagggtgtccccttcctaccttggagagagcagccccagggcatcctgcagggggtgctgggacaccagctggccttcaaggtctctgcctccctccagccaccccactacacgctgctgggatcctggatctcagctccccggccgacaacactggcaaactcctactcatccacgaaggccctcctgggcatggtggtccttcccagcctggcagtctgttcctcacacaccttgttagtgcccagcccctgaggttgcagctgggggtgtctctgaagggctgtgagcccccaggaagccctggggaagtgcctgccttgcctccccccggccctgccagcgcctggctctgccctcctacctgggctccccccatccagcctccctccctacacactcctctcaaggaggcacccatgtcctctccagctgccgggcctcagagcactgtggcgtcctggggcagccaccgcatgtcctgctgtggcatggctcagggtggaaagggcggaagggaggggtcctgcagatagctggtgcccactaccaaacccgctcggggcaggagagccaaaggctgggtgtgtgcagagcggccccgagaggttccgaggctgaggccagggtgggacatagggatgcgaggggccggggcacaggatactccaacctgcctgcccccatggtctcatcctcctgcttctgggacctcctgatcctgcccctggtgctaagaggcaggtaggggctgcaggcagcagggctcggagcccatgccccctcaccatgggtcaggctggacctccaggtgcctgttctggggagctgggagggccggaggggtgtaccccaggggctcagcccagatgacactatgggggtgatggtgtcatgggacctggccaggagaggggagatgggctcccagaagaggagtgggggctgagagggtgcctggggggccaggacggagctgggccagtgcacagcttcccacacctgcccacccccagagtcctgccgccacccccagatcacacggaagatgaggtccgagtggcctgctgaggacttgctgcttgtccccaggtccccaggtcatgccctccttctgccaccctggggagctgagggcctcagctggggctgctgtcctaaggcagggtgggaactaggcagccagcagggaggggacccctccctcactcccactctcccacccccaccaccttggcccatccatggcggcatcttgggccatccgggactggggacaggggtcctggggacaggggtccggggacagggtcctggggacaggggtgtggggacaggggtctggggacaggggtgtggggacaggggtgtggggacaggggtctggggacaggggtgtggggacaggggtccggggacaggggtgtggggacaggggtctggggacaggggtgtggggacaggggtgtggggacaggggtctggggacaggggtgtggggacaggggtcctggggacaggggtgtggggacaggggtgtggggacaggggtgtggggacaggggtgtggggacaggggtcctggggataggggtgtggggacaggggtcctggggacaggggtgtggggacaggggtcctggggacaggggtctggggacaggggtgtggggacaggggtgtggggacaggggtgtggggacaggggtcccggggacaggggtcctggggacaggggtcctggggacaggggtctggggacagcagcgcaaagagccccgccctgcagcctccagctctcctggtctaatgtggaaagtggcccaggtgagggctttgctctcctggagacatttgcccccagctgtgagcagggacaggtctggccaccgggcccctggttaagactctaatgacccgctggtcctgaggaagaggtgctgacgaccaaggagatcttcccacagacccagcaccagggaaatggtccggaaattgcagcctcagcccccagccatctgccgacccccccaccccaggccctaatgggccaggcggcaggggttgacaggtaggggagatgggctctgagactataaagccagcgggggcccagcagccctcagccctccaggacaggctgcatcagaagaggccatcaagcaggtctgttccaagggcctttgcgtcaggtgggctcagggttccagggtggctggaccccaggccccagctctgcagcagggaggacgtggctgggctcgtgaagcatgtgggggtgagcccaggggccccaaggcagggcacctggccttcagcctgcctcagccctgcctgtcacccagatcactgtccttctgccatggccctgtggatgcgcctcctgcccctgctggcgctgctggccctstggggacctgacccrgccgcagcctttgtgaaccaacacctgtgcggctcasacctggtggaagctctctacctagtgtgcggggaacgaggctysttctacacacccaagacccgccgggaggcagaggacctgcagggtgagccaaccgcccattgctgcccctggccgcccccagccaccccctgctcctggcgctcccacccagcatgggcagaagggggcaggaggctgccacccagcagggggtcaggtgcacttttttaaaaagaagttctcttggtcacgtcctaaaagtgaccagctccctgtggcccagtcagaatctcagcctgaggacggtgttggcttcggcagccccgagatacatcagagggtgggcacgctcctccctccactcgcccctcaaacaaatgccccgcagcccatttctccaccctcatttgatgaccgcagattcaagtgttttgttaagtaaagtcctgggtgacctggggtcacagggtgccccacgctgcctgcctctgggcgaacaccccatcacgcccggaggagggcgtggctgcctgcctgagtgggccagacccctgtcgccaggcctcacggcagctccatagtcaggagatggggaagatgctggggacaggccctggggagaagtactgggatcacctgttcaggctcccactgtgacgctgccccggggcgggggaaggaggtgggacatgtgggcgttggggcctgtaggtccacacccactgtgggtgaccctccctctaacctgggtccagcccggctggagatgggtgggagtgcgacctagggctggcgggcaggcgggcactgtgtctccctgactgtgtcctcctgtgtccctctgcctcgccgctgttccggaacctgctctgcgyggcacgtcctggcagtggggcaggtggagctgggcgggggccctggtgcaggcagcctgcagcccttggccctggaggggtccctgcagaagcntggcattktggaacaatgctgtaccagcatctgctccctctaccagctggagaactactgcaactagacgcagcccgcaggcagccccccacccgccgcctcctgcaccgagagagatggaataaagcccttgaaccagccctgctgtgccgtctgtgtgtcttgggggccctgggccaagccccacttcccggcactgttgtgagcccctcccagctctctccacgctctctgggtgcccacaggtgccaacgccggccaggcccagcatgcagtggctctccccaaagcggccatgcctgtcggctgcctgctgcccccaccctgtggctcagggtccagtatgggagctgcgggggtctctgaggggccagggrtggtggggccactgagaagtgacttcttgttcagtagctctggactcttggagtccccagagaccttgttcaggaaagggaatgagaacattccagcaattttccccccacctagccctcccaggttctatttttagagttatttctgatggagtccctgtggagggaggaggctgggctgagggagggggtcctgcagggcggggggctgggaaggtggggagaggctgccgagagccacccgctatccccagctctgggcagccccgggacagtcacacaccctggcctcgcggcccaagctggcagccgtctgcagccacagcttatgccagcccaggtccagccagacacctgagggacccactggtgccttggaggaagcaggagaggtcagatggcaccatgagctggggcaggtgcagggaccgtggcagcacctggcagggcctcagaacccatgccttgggcaccccggccatgaggccctgaggattgcagcccaggagaagcagggaaccgccagggccacaggggcagagaccagggccagggtccccctgcagccccttagcccaccccctcccagtaagcagggctgcttggctggcttcctttgctacagacctgctgctcacccagaagggcccacgggccctggtgacaaggtcgttgtggctccaggtccttgggggtcctgacacagagcctcttctgcagcacccctgaggacagggtggctccgctgggcacccagcctagtgggcagacgagaacctaggggctgcctgggcctactgtggcctgggaggtcagcgggtgaccctagctaccctgtggctgggccagtctgcctgccacccaggccaaaccaatctgcacctttcctgagagctccacccagggctgggctggggatggctgggcctggggctggcatgggctgtggctgcagaccactgccagcttgggcctcgaggccaggagctcaccctccagctggggacctggccactggggcagccctgttcctgaagctctgagctcaccccttccccatgaccacatcagcccccctccacccagagatgtcacagcccccagctagccccgcctccagagtgggggccaaggctgggcaggcgggtggacggccggacactggccccggaagaggagggaggcggtggctgggatcggcagcagccgtccatgggaacacccagccggccccactcgcacgggtagagacaggggcgccctgctggagctgaggtatgtgagctcgcgcggggctgggccaaagcggggcccggtgggccggctgggaggctgcccaccagtcagccatcggccaagctgttgccctggctgaccctgatggccaacaaggccgtagggagtgatgggcagaggccccttctgggaggggagggtcagtgctctgtgggggaccgtgtgttggagtggagggcagcaggaggagccctttggtgtccagggactcctggagctgccccagccttcca

SEQ ID NO: 93252 - DNA, 52069 bp, Homo sapiens
  misc_feature (1)...(52069): n = A,T,C or G
gtgactgacagctgtaatgccagcactttggaaggccaagggcaggagaattgcttgagcccaggtgtttgagaccaccctaggcagtatagtgagatcttgcctctgttaaaaaaaaaaaaaaaaaaaaaggccatgtgygggcagctgatgcctgtaatcccagcactttgggaggccaaggggtggatcacctgaggtcagtagttcaagaccagcctgaccaacatggtgaaaccctgtctctactaaaaatacagaattagccaggtgtggtggcaggcgcctgtaatcccagctacttgggagactgaggcagaagaatcacttgaacccaggaggtggaggttgcagtgagctgagatcgcaccattgcactccagcctgggcaacaagagtgaaactccatctcaaaagaaaaaaaaaagcggctgggctctgtggctcatgcttgtaaccccagcactttgggaggccaagaggtggatcacctgaggtcaagaatttgagaccaacctggccaacatggtgaaaccccatctgtactaaacatacaaaaattagccaagtgtggtggcgcacgcctgtagtcccagaaggctgaagcaggagaattacttgaaccctggaggtggaggttgcggtgagctgagatcgtgccactgcactccagcctgggcgacagagcgagactctgcctcaaaaaaaaattaaaaaaaaaaagctttataattatagagactgtaagtcttgggaaacctgggaatgcatagacaaaatgtgagattttttttttttttcatttcatcttcagggtctttacggaataaaggatgatgtcttccttagtgttccttgcattttgggacagaatggaatctcagaccttgtgaaggtgactctgacttctgaggaagaggcccgtttgaagaagagtgcagatacactttgggggatccaaaaggagctgcaattttaaagtcttctgatgtcatatcatttcactgtctaggctacaacaggattctaggtggaggttgtgcatgttgtcctttttatctgatctgtgattaaagcagtaatattttaagatggactgggaaaaacatcaactcctgaagttagaaataagaatggtttgtaaaatccacagctatatcctgatgctggatggtattaatcttgtgtagtcttcaactggttagtgtgaaatagttctgccacctctgacgcaccactgccaatgctgtacgtactgcatttgccccttgagccaggtggatgtttaccgtgtgttatataacttcctggctccttcactgaacatgcctagtccaacattttttcccagtgagtcacatcctgggatccagtgtataaatccaatatcatgtcttgtgcataattcttccaaaggatcttattttgtgaactatatcagtagtgtacattaccatataatgtaaaaagatctacatacaaacaatgcaaccaactatccaagtgttataccaactaaaacccccaataaaccttgaacagtgactactttggttaattcattatattaagatataaagtcataaagctgctagttattatattaatttggaaatattaggctattcttgggcaaccctgcaacgattttttctaacagggatattattgactaatagcagaggatgtaatagtcaactgagttgtattggtaccacttccattgtaagtcccaaagtattatatatttgataataatgctaatcataattggaaagtaacattctatatgtaaatgtaaaatttatttgccaactgaatataggcaatgatagtgtgtcactatagggaacacagatttttgagatcttgtcctctggaagctggtaacaattaaaaacaatcttaaggcagggtgcagtggctcatgcctataatcccagcactttgggaagcccaggtgggctgatcactggaggccaggaattggggaccagcctggccaacacaacaaaaccccatctgttaaaaaaacaaaacaaaaccaaaaaaaacaagtaaccttggtggatgtctactcaagttttctgcacatttttctgaaaatacaactgtgacccttatccaggcctgaaaaccatacttgtaaaggttaactgaacaacattattgtcattcccaactccaggatctttttccaaagattctttcctgagagctagttaagggaaggaattatcttaaagcctggttgtccaatcttttgctttccctgagccacattggaagaagaattgtcttgggccacacattaaatacactaacatgtgccagctgtggtggctgacacctataatcccagcacttggggaggctgaggcgggtggatcaggagttcaagactagcatggccaacatggtgaaaccccatctgtactaaaaatcgaaagatttgccaggtatggtggcctatgcttgtaatcccagctacttgggaagctgaggcacaagaggctgaggtgagaggatcgcttgaaccggggaggcagagattgaagtgagccaagatggcaccactgcactcgagcctgggcaacacagcgagactgtctcaataaaaattaaagaaattaacactaatgatagctgatgagctacaaaaaagttcatgatctggatacctgctgccacctaaagagtcctcacattcaaagggttggacacagctataaagcgtatcgttctgtggatttttagtgtattcacatagttggcaaccatcaccagtatctaatcttagaatataggctgggtgcagtggcttcaaattcccagcactttaggaggccaaggtgggtagattgcttgagcccaggagttccagaccagtctgggcaacatggcaaaagcctgtctctacaaaaaagaaattagctaggcgtggtggcaggtgcctgtagtcctagctgcacaggaggctcaggtgggaggatcccttgaacccgggagataaaggttgcagtgagccaagatcccaccactgtactccagcctgggtgacagagtgagaccctgtttcaaaaaaaaaaaaaagaatattttaattagcacaaaaagaggcctgtacttaatcctgtagccttttgtaaactttgagtcaccttcagtctttaaaatttttaaatttacattaattttatattatttgatacaataaattagtcaataccaacatgactgaaaaataatatttaagtgaaatagactgattctattaatctttcatgaattttcaaatgcaatcttgtaaagtttccttacttatgggcaaaataaatgttccaggttcagtttgtaccttcctgccccaggcaaggaataggccaactctgcaaagaaacttgattttttttttccatagtaaccttgggaactaaattaagcaggccttatccccatctcacagaagttgccagttagtgtagaagcaaatgtgatgctcagaacatggttctacttcctttttttcccccactaaagcccatgttgccaaaataaaactcagtacttcaaagccatgttctttaaaaattctttaaaatttttttttattttggccaggtgcggtggctcacgcctgtaatcccagcactttgggaggctgaggcgggtggatcacaaggtcaggagattgaaaacatcctggctaacatagtgaaactccatctctactaaaaatacaaaaaattagctgggcatggtggcgggcgcctgtagtcccagctactcgggaggctgaggcaggagaatggcgtgaacccgggaggcggagcttgcagtgagccgagatcggaccactgtactacagcctgggcgagactgcgagactctgtctcaaaaaaaattattttattttattttgtttttatttttgggggtagagatgggggtctccctatgttgccagactggtcttgaactcctgggctgaagcctcggcctcccaaagtgctgggattgcaggagtgagccaccatgtctggcccaaaaattctttagtgagtacctactatgctttggtaaatgttgcaatgtacaagaataaataaagacaaattttggttctaaagttactgcaatcaagtaagcaaaatgttaagtaagtttggagtatttgggcaggcatggatgaagagccagttctagtcatctagcatcagtttggccactaccaagctgataccttccttggccgccaggggcctgaggcaggtgtagagcttaaatttccagtccatccaggccagcaatctccctctcagcccggggataaatgaggttgctgtggaggtataggaccaagtggttgctgctcctgtctgctataggaggcctctagcttcaggctagttgctggttgagaaaagtgccataagagagagatatacaggaaatgatggtagttgacatttgtcaaggaaagccagagtatgtatgtgcaaagctgaaaatgaggaattaaccttgagaagggctggggaaagagctttcttggtttaaagaacagcaaaaagtcctgatccaaaaaagctgtccaaagcctagttggaaggaagtgtattgagtgtcctgagatgatatgggaagtgggggtaggaggccaaatcttgaagatctaggttgtggtaaaagtgggttactctacctgtaatggaaagccacggaagagtttaaagcagggttattgcataatctgaaccatattgaaaacaaatactgactgggtgcggtggttcacgcttgtaatcccagcactttgggaggccgaggtgggtggatcacttgaggtcaagagttcgagaccagcctggccagcaaggtgaaatacaaaaaaatacaaaaaaatttgcccggcggctgggcacggtggctcagcacggtggctcacgcctgtaatcccaacactttgggagggcggatcactaggtcaggagttggagaccattctgaccaacatggtgaaaccccatctctactaaaaatacaaaaattagccgggcgtggtggcgcacgcctgtagtcccagttacttgggaggctgaggcaggagaattgcttgaacccaggcggcggaggttgcagtgaactgagattgtgccactgcactccagcctgggcgacagagtgagactctgtctcaaaaacaacaacaataacaacactacaggctattataagaaaaataaattatattttggattttgaaaaaggttcaaatgcaaatactctacaaaagatggagtaggttgtgtccccttctgtgagatatatatctctctcacaaaaaaaaaaatatatatgtaaattttttttgagatggagtttctctcttgttgcccagtctggagtgcagtggcgcgatcttggctcactgcaacctccgcctcctgggttcaagcgattctcctgcctcagcctcccaagtagctgggactacaggcatgcaccaccatgcccgactaattttatatttttagtagagacggggtttcgccatgttggccaggctgttctcaaactcctgacctcaggtgatccacctgcctcggactcccaaagtgctgggattacaggtgtgagccaccgcgtccggccatgagttataaatattaacaatttcttgctgtaaattgaaagcatccttcgcgtctttgcgtttcattaccaccctctgttctctcaagagaaattctaactttatttcagcactcagtcctgaagttacagaagttaataattttttaaaatcctgcaaacaatgcatggatatccccgtcttgcacactctttgggccagtctagaattcttcccatcagcatttcggtgatctggaccgccgccacccacacagcgctccagggcagaaaagacgccccatgcccgcgcctgggccggcggggggcggagcttgcgtgctgacgcataagagccgagcgggggaacgtgcgtgtctcgagtcgcacggagggcaaccgtcgmcgggcttagcgcctyaactgtcgttggtgtatttttctggtgtcacttctgtgccttccttcaaaggtggtgctttgtccctgtgggtcatctgtactgattgcgccaagcaaagcatttgtgagcstgtggtgctggggtgaaagtggtggctgggggcagggagaaatccaaaagcccgctggtgccccagccctcccattgcctggtagactgggccttgctttaccctccccgcatcctttgaccaggaaattmtttctttggcttccccccatccccggctccaacattctgcaaactgaagaggtagtttcttagatgttcagtgtggttaatccaatgaaattgcattatccctatcaggttctccaaatgtcaactgtcaaggagcagctaattgagaagctaattgaggatgatgaaaactcccagtgtaaaattactattgttggaactggtgccgtaggcatggcttgtgctattagtatcttactgaaggtgagtgagaagcccatcctgtggctgaaaatcaagtgagcacttcagagtgttgtatatgtcgatgtattcagggttgcaaggttaatcccttgaaagcaattatgtatcctttgacctttcctccctccctccctccctcccttccttccttccttccttcctttttctttctctctttcttttcctttttttttaaacttcttctttcttttcctttctttttttttctgactttccttttctttttctttttttgagacaggatttgtctgttacccaggttggagtgcagtggcgcgatcttggcccactgcaacctccatctcccgggatcaagcgattctcctgcctcagcctcttgaataactggggccacaggcatgcaccaccaggcctggctaattttttatatttttagtagagatggggtttctccatgttggccaggctggtttcgaactcctgacctcaagtgatccgcctgcctcggcctcccagagtactgggattacaggcatgagccaccacacctggctgccaataggtattgtttttaacccttgtgccctcctccctctctgcttttggagtccccagtgtttattgttctctcttttttttttttttttttttttgagacggagtctcgctctgttgccaggctggagtgcagcggcaggatctcggctcccggcaacctttgcctcccgggttcaagcagttctcctgcctcagcctcctgagtagctgggactacaggcatgtgccaccacgcccagctaatttttatatttttagtagagacggggtttcatcatgttggccaggatggccttgatttcttgacctcgtgatccgcctgcctcagcctcccaaagtgctgggattacaggcatgagccaccacgcctggccttaagtagggacttttacttctttcccttactgttcgcttttggaatctggctattgaaatctgaatgaatacactccttgtatatagttccgtactctgtcacatgtgacaaaaacccagtttaaattagggtaagcagaaaaagacgaaatattgttcatgtaactggaaatagggcaaaactgcttcaggtactaccggattctgaagttsacacatatcaagacatagtctttgtatatcttggtttagattttctctgttggcttaattcgtagagcctttctatgtggtggtaaagatggctgtacagtttgttcttagattcttgttttttctccaactctacagtccttactaatgttcttagatttgcatgttattcttagagcttatgattccaaagaaaagtgagatgtaatcttccgtcttccattttcaaacttcatagacatgcttgtttcttatacctgggccatatgtccacttatgaactgatttctgtgaccagaaggaaaggatggaacaattggctaggtctggttttatgcccatctaccctaagcttggaaaaccaatgttaattgtactgcactgaaacatatggaatgggttcccatggaaaagagaaattctattaccagaaaaagggacactagacagatgaaaacaataagtgttcatcagaggtggttaccttcctgtttgggccataacgacgcatactaaaagcagctttagccaactcagaaattagggttaaggttaaatataataaaatcctggccgggcgcagtggctcaggcctgtaatcccaggactttgcgaggctgaggtgggtagatcacttgaggttaggagtttgagaccagcctgaccaatatggtgaaaccccgtctgtactaaaaatacaaaaattagccggacatggtggcgggcgcctgtaatcccagctactcgggaggctgaagcacgaaaattgcttgaacctgggagacggaggttgcagtgcccgagattgtgccactgcactccagcctgggcgacagagtgagacttcatctcaaacaaaacaaaacaaaaaacacaaaaataaaggctaaatataataaaagcctttgaaatcattttattttccttggtttcaaactgttatctgaatggcaaaaaaaaacaaaaacaaaaaacacccagctctaaaaagttctaacaattatatgaagtcaaacaatttttgctacatcttaatatttacttaccttgactttcggtcacccaggctcattgaaaaactatttttatatcatttttccctattaaaatatgagattcctttaattatcaagtagccacatgaaaattcttcttattctcctaaaacttaagtaggaacattttattcagaacttttgtatattttaggatttggctgatgaacttgcccttgttgatgttgcattggacaaactgaagggagaaatgatggatcttcagcatggcagtcttttctttagtacttcaaagattacttctggaaaaggttaattttagttttataaagttattttcaaagctttttaaaaaagtaataaattttaccaaacagatgtcaataaatataaaattaaaaatagcaccatgccattgggccatataatttaatttagttgatcaattttttttgttttttgagagagtctcactctgtcacccagattagagtgcagtggcgcgatcttggctcactgcaacctccacctcccagcttcaagtgattctcctgcctcggtctcctgtgtagctgggattacaggcatgcgccaccacgcctggctaatttttgtatttttaatagagacgtagttttgccatgttggccaggctggtctcgaactcctgacctcaggtgattgggccatatagtttatttttatttatttatttattttgagatggagtctcgctctgttgcccaggctggagtgcagtggcacaatctcagctcactgcaacctccgccacctgggttcaagcaattttcttgcctcagtctcctgaatagctgggattacaggcatgcgctaccacaccccgctgatttttgtatttttagtagagatggggtttcactatatgttggccaggctggtctcgaactcctgacttcaggtgatccacttgcctcggccttccaaagtgctggaattacaggtgtgagctgcggtgcccagccgggccatataatttaaaaagttaatttttttaaaaagaacacttcgatataattggagcatatttggaaaacagaaagtataaagaaaaattgaatctcttctattaatgactttatgtaggttttctaagcttttgttttctttacataactgatgtataaatgcttttaagcttgtcattttgtcttatatattttcccaagaatatacaatcttgaagagtttctgtaatattattaatacatttatccatattctttagttttctttctatgtttatagtgaaccaggtttcaaggcatagcatgaggccatagaacataagaaatttagaacttggcctcattggtgttagcatcatctgttgaccaactaagaagcctcagataattaggaaacataattattttatcatacactaaagtatatggtgcactgtttggtaatgtgattcaacagatatactttctactagaagccctcttatctaacatgattgagattgaaggcagttacctaatttaaacatgcttcttagaaagagccatgataaacattttatatcgacctaaaacatacacatgtagataaaagttcatttgctgattttctggttgtagggcaaggcctttgagtacggctcagctgattagagttttgcagtgccttcccatcccttcccccttcccttccatcttccccttcccttccttttccctttccccttccttccccctttcccttctccgttcatttcattcctcctttcctcctcttcccctttccccctctgatcctctcccctctactcacctcccctaccctccccagccctccatcctttcctttcctctcctctccatgttgcccagattggagtggctatttatttacttatttatttttgagacagagtcttgatctgttgcccaggctggagtgtggtggtacaatctcagctcaccacaacctccacctccgaggttcaaacgattctcctgcctcagcctcccaagtagctgggactataggtgtgtgccaccatgcctggctaatttttgtgtttttagcagacacagggtttcaccacgttagccaggctggtcttgaactcctgacctcaggtgacccgcctgccttggcctcccaaagtgctgggattacaggcgtgagccaccgcacccggcctggagtggcaatttataggcatggtcttagcacactacagtcttgaactcctgggctgaaggggtcctcctgcctcagcctggcaagtacctggaacaacaggtggtgtctttctgaaagcacatcaataatgatcatttagattgctttaaagtactacaagaaatttaaaagtgttcatgaagcagtctggttataaaaccttactaaattttatgactttatttattttatttttggagacagtttcaccaggctggagtgcagtggcataatcatggttcactgcagcctcgaattcccaggctcaggtgatcctcccacctcacccttctgtgtagctgggactataggtgcacagcaccacacccagctaatttttaagaaattattatttgtagagatgcggtgtcactctgttgctcaggctggtctcaaactcctaggctcaagcagttgcaggtgtgagccaccacgcccarcccatttttatccctttctcaaacctagaaggacaatttttaaacaatttgcttttaatgtcttcccagggattaacttacttttcatagaaacaattatttttaatattaattatggaatacttgatagagaaaaagagattaacaataatgtaacattgggaggctgatgtaggagggtcgcatgaggccaggagtttgaaatcagccagaggcaacatagtgagaccctgtctccattgtgcctgtagccctagctttgcgaggctgatgcaggaggattgcttgagttcaaggttgcagtgagctatgattgtatcactgcactccagcctgggcacaaaggaagatcctattgctaaaatatatataataatataacaaacatcagtgcatctaccactcagcaaaagaaataaaacattaccaagtcagttgatacattctgtatattcatatcttcctgtccctaaatctcaatgttgaatgtggtgtttacctttaccaaacatttctttcacactggtatttagtgacttatattatctttaattatatatataataataaatacataattatatttgggtacaaatatgactaattcttgatatgtagcaactaatgagcagaagtacatagacatactagatagtagtttactagttgagagtgtttagtatgtctggggtatcagtatgttttgtatcagttaatttggtggattggttaaatggagtcaaattaaaagagtattactattttattttattttattttttgagatggagtcttgctctgtcacccaggctggagtgcagtggtgtgatctctgctcactgcaacctccacctcccaggttcaagagattctcctgcctcagcctcccaagcagctgggattacaggtgcataccaccatgcccagctaattgtatttttagtagagacggggtttcaccatgttggccaggctggtctcgaatgcctgacctcaagcgatccacctgcctcggcctcccaaagtgctgggattataggtgtgagccaccgcacctggccatattttaaaatacttgaaaacatattcaactttcaatttctaataatatggcaggataaatacctggattaatcttttgctgtaaatgagaaaactcctgcataaaatatgaaataaaaaaatcaatccttgagaaagaatatgttcttaacaaaaaagtaaggcattttcacaacaggtactgaatgaagtgagaaaaccagagagttaagcagagcactgcagctctgattgctctttttaccctgatagcatttgccaaacatggtggacatcaattttggttttcactgactcataaaatttaggagaccagagacagagcttggggatttggggagatcaccccacaaacctggtgccctagtggactaagccaggggttactaaactttttctgggaagactcagatagtagatattttaggcttttccagctatgtagttcctattatacctactcaactctgctcttacagtgcaaaaggaagccacagacaataatacataagcaagtgggtgtggctccagtgagactctatttaccaaacacaggtggtagaccagatatcgcttgtctgccaacagtagtttaccattgccagaactataccgttaatgtaatgatgatctacaaataattattctctccctgcctttggggactacaagtaaaattgaatgtcttagacactttagtgggggaatatacctgctaaggatttggaaccacaagctggctcttatttgaattccagaaaaccttaagcaatcagatggtagctagaggaaactcactttatttcaggcctcaaagaacttccacaaataaacttccagagaaaatgaacatctcacaatagaaataattaaatctgcaagaaaaggcatgagcaagaaccagcataacagaaacatgccactatagatttaaaaattatcaaacacaaattataaaattaatatgattattctacataaaaaataaagaacagacttgaaaatatcagcatgagacaggaggctataaaaacattaaaaaaggaacaaaatataacttataaatgtgaaaaactcaatggagccaggcatagtggctcagtcctataatcccagcactttgggaaggtgaggcaggtggattggttgaggtcaggagttggagatcagcttggccaacatggtgaaaacctgtctctactaaaaatacaaaaattagctgggtgtggtggtgcatgcctgtagtctcagctactcaggaggctgaggcaagagaatcacttgaaccaggaggcagaggttgcagtgaactgagatggcaccactccacactccagcctgggcgacaaagtgagactccgtcttaraacaacaacaacaacaacaacaacctctatggatacaatgatagattagacacatttgaagagagaagtggcaaatctaaggcaattacccagaagacaagaagtagaaaatataacaggttaagagtcatggaggatagaataatcacatttgaagagattatgattcagcatttttgaagaccactgaaaaatatcaacccacagatttaagaagccaaataatctcaagaagaataaatataatatccctacctggacatattcttgtgaaattagagaacactaaaggcaaaaagaagttyttaaaaattgtcagagagaacataaattacctacagaaaagggagagggtgmcaatagcagcagtgaaaccagaagacaatggaatatttttaatgtgctgagggaggagtaagtgtcaatctggaatctacccagcaaaaacatctttcaagaacaaggacaaagctgggcctggtagcaggctgaggcagaaggatcactttgagaccagcctgggcagcatagtgaaatcttgtctcttaaaaaaaaaaaaaaaaaaaaaaaggagagtgaatgaaggtgttttcagaaacagactgagacaattactgtcaggccctccctaaaggaaacacaaaagtatatatatcaggcaaaagaaaagtgatctcacatacaagatctgtgatgcaagacaaaaaatgaaggacagagaaaatggtaaatatgaaggmaaatctaaataaayatcaattgtatraaactgtagtcttgggggattaaaaaatttttgaatatagcatataaatatacgggcgaggggtgatagtgatgaatgaagtagtgttctaagtttcctgtgtcattagggaagcaggaagtgtggtgattaactttgaactttgataagttaaaaatgcacgttgtaatttctttttctttttcaaatttttatattttatttttattttgagacaaagtctcacactgtcacccaggctgggtgcagtggtgtgatctcagctctctgcaccctccacctcccaggttcaagtgattctcctgcctcagcctctcgagtagctgaaattacaggcacacaccactgagcctggctaattttttgtatttttagaagacatggggtttcaccatgttggccaggctggtctctaactcctgacctcaggtggtctgcccgcttcggcttcccaaagtgctgggattacaggagtgagccaccatggctggcctcaaatttttaaataatttttaaagaggtgaggtgtaggtcggatgtggtggctcacgccagtaatcctagaactttgggaggctagacaggcagatcacttgaggtcaggagtttgagaccagcgtggccaacctggtgaaaccccatctctactaaaaatacaaaaattagttgggcgtgctgatgcatgcctataatcccagctactcaggaacctgaggcaggagaatcgctttaacctgggagacggaggtggcagtgagcagagatcatgccattacactccagcctgggtgacaagagcaaaactccatctcaaaacaaacaaaaaacacagagatgggatctcgctatgttgcccaggctggtctcaaactcctgggcccaaatgatcctcctgcctcactcagctgggattacagatgacatgatctaacttctgtgacagctaacaaaagaacagaaacctttaaattcttaaaggtgtctgggcatggtggctcatgcctgtagtctcagcactttgggaggccaacgcgggcgaatcatttgaggtcaggagttcaagactagcctggccaacatggtgaaaccctgtctctactaaaactacaaaaattagctgcatgtggtggtgcacacctgtagtcccagctactcaggaggctgaggcaggagaatcacttcaacccggcaggtggaggttgcagtgagccaagatcactgccactatactccagcctaagcgatggagcaagactgatmcaaaaaaacaaaaaaattagtaaagagaaagaagtaatattagataaacatacctaatgaattaaaaagaagatagaaatataagaataggacagcatataaaactaaaagtttagcaaggatgacagacaaagttagtaatcagaataggccgggcacgatggcccatgcctgtaatcccagcactctgggaggctgaggtggtggatcacttaaggccaggagttygagatcagcctgggcaacatggtgagacccctgtctctactaaaaatacaaaaattagccaggcgtaatggtgcacacctgtaatccagctacttggtacgctgaggtaggagaatcacttgaacccggaggtggaagttgcagtgagccgagattgtggcagtgcactccagcctgggcaacagagcaagactccatctcaaaaaaaaaaaaaaatccattgtatttctgcatgccaaaaccaggcaaaagaaatctaaagctattatttacaatatcataaaaataggaaatacctggcataagagcttttgtgcagaaaacataccacctcattagaagatgttaaatgtcaggctgggtgtggtgcctgtaatcctagcactttgggaagccgaggcgggagtatcgcttgagtggaggagtttaagaccagcctgggaaacacggtgaaaccatgtctttaccaaaaatacaaaaattagctgggcgtgttgatgggtgcctgagtcccagctactcaagaggctgaggtggaaggatggcttgagcctgggaggtagaagtcacagtgagctgaggttgcgccattgcactccagcctgggtgacatgtctcaaaaaaaccaaaaccaaaaaaaagaaaacaacaaaaaactcaaagaatatattatctaaataaatgaggggaggctgggcgcagtagctcatgcctgtaatcccagcactttgcgaggccgagtcaagtggatcccttgaggtcaggagttcgagaccagcctggccaacatggtgaaaccctgtctctgctaaaaatacaaaaaattagccrggcgtgrtggcacacacctgtagtcccagctactcaagagtaaaataaataaatgaagtgatattccttgttcatagaagtctcaatattgtaagctatccattcttcccatattgattatatgcaatcctagtcaaaaccccgcaggttttgttattattggacattccaagctaattcaagacttattataaagcactaattatgtgcagakacttaattaggagacaatataaaagattgttatataacactgatrattttctagataaataggaaatttatggacctttagaattgttcttatggcagtagttatcattatggaaaaaataaattgataccacacacacaccctacctgataccacacacaaaaatcaaagccaggttggttgaagactaaaatgtgaaaagcaaaacttcaaaatttcctttagaagataacgtagaatatccttatgacctgaaggtagggactgatttaaacacaaagacacaaaaagcataatcaataaagaatacaaagttaagagtgttcacaaaaatataatataaaagagcaaagagacaagccataaactgagagaagatatttgcagtgttaacatctaacaaaggaatagtgttcagaataaaaatacttgtattaatataatacctaaaaaaaatgcacagctcaatagaaaaatgagaaaagccttcaataatttacaaaagaagacactcaagtggcttataaatagggggagaaaactcaataaccaagcacaggaaaataaaaaccatatcaatataccattacacacccactagattggtagaagtgtgatagtaagtgtttgtgaggatgtggaacaataagtgctctcacacacagcatataggagtgtagtaaaaccagttaaaaaaacaagtttggccgggtgcggtggctcacgcctgtaatccagcactttgggaggctgaggtgggcggatcacgaggtcaggagtttgagaccagcctgaccaacatggtgaaaccctgtctctactaaaaatacaaaaattagccgggcatggtggtgcrcgcctgtaatcccagctactcaggagtctgaggcaggggaatcgcttgaacccaggaggtggaggttgcagtgagcctagatcgcgccactgcactccagcctgggccatggaatgaaactctgtctcaaaaaaaaacaaaaaaaccccacgagtttgtcattacctggtgaagttgaacatgaacatatcccacaacctggaaattacacttctaaatatagtcccaagaaaacttttgcacatgcgcactaggatacatgtacaagaacgtattgtagtagccccaaactgtaaacaagtcaatgaatcccagtactaaattgtaaaattatgcagtgtaatattgcacagcagtgaaaatgaagaaactacaggaacacacattaacatggataaatatcagatacataatatttagttaagggaatacatgccttatgattcaaaaacagataaaatgtactatgtaatgctgggcatggtggctgacgcctgtaatcctagcactttgggaggccgaggtgggcggatcacttgaggtcaggagttccagaccagcctggccaccatggygaaaccctgtctctactaaaaatacaaaaattagctgggtgtggtggcacgtgcctgtaattccagctactcgggaggctgaggcaggagaatcgcttgaacctgggaggcggaagttgcagtcagctgagatcgtgccactgtactccagcctgggtgatagagccatctcaaaacaaaacaaaacaaataaaaaaacaattaatatgtaatttaaacatgcataggtagtaaagcttttttaaaagtaatgtgattttttgccagccacaagagtggttgatagacataatctgttagaggcatgcaggggcttccaaggtgttgacaatgttctataaatttggggatttttttttttgttttgaaaaagggtcttgctttgttgcccaggctagagttcaggggtgtgatcatagctcaccacaacctcaaactcttgaattcctgrgttcaagcagtcctcccacctcagcctccagaggacaaatgtgaactagatgtttattgtgcagttttggcagagttaatatttttaatttttttcattaaaaaattattatattttagagactaggtcttgccctgttaacccaggctggagtgcagtggcacgatctcagctcactgcaatctctgccycccaggttcaagtgattgtcgtgcctcagcctccccagtagctgggattacaggtgtgagccactgtgcttggccttttgtgtggttttaacagagttgtttaatgttttataaattgagtgtatatttcttatatgttattgtatatgaaatatttcacaatagaacattttaaaaatacattttgtgccaggcgtggtggctcacgcctgtaatcccagtactttgggaggctgaggtgggtggatcacaaggtcaggagatcaagaccatcctggctaaygcggtgaaaccccttctctactaaaaataaaaaaaaattagccaggcgtgttggcaggcrcctgtagtcccagctactcaggagggctgaggcaggagaatggcatgaacccaggaggcggagcttgcagtgagccgagatcgcgccactgcactccagcctgggcaacagagcgagactctgtctcagaaaaaaaaagaaaaaagaaaaaagaaaatacatattgtgaggtctaatggggaagagcaatgatggaacatcgttgattagccacaatttttttttttttttactttttagtttagagatggctgttcatgggcacaatcacagtgcactgcagcctctaactcctgggttcaagtgaccctcttgattcagcttcctaagtagctgggactactatgcccagctccacagatattttaaattatctcatatgtacagtgagtccaggtgcatggaacatagaggctgctaagatatttatggaccaggtgtggtggctcacgcctgtaatcccagcactttgggagcccgaggcaggtggatcacctgaggtcaggagttcaagaccaacctggccaacatggcaaaagcccgtttctactaaagatacaaaaattagctgggcatggtggcgggtccctgtaatcccagatacttgggaggctgaagcaggagaatcacttgaaccagggaggcataggttgcagtgagccaagatcacgccactccactccagcctgggcaacagagcaagactccgtctcaaaaaaaaaaaaaaaaaaagatatttgtggaaagaagggagtaatgtgaaatcagtgaaatcagaacctattattaatattatggtgcttatgattaagttaggggtttaaataagacataaccatgagaagataacatatgctcttataaggactttttcataattataggcagtaagtgctataaaaaaattctgtgaagaaagtggtatttatgaatgatatgataaataatgaatgatatgatggctttatgtcttatttttatgtcagattttccaggtgccctgatcctgttaatgccatcatttccttacctgttgtttatttttctttcaaaatacaaccacatatcatttatgaatgatatgataaatacttggggatatctagcagaggaattggtattcgaagaagtacttgactaatataataataatgttaattgctaacatttattgaacatttaatacaccctgttgagtacttaatgtatattaactcactgagttatcttcttaagaaccatattttttaaaaggctattagcggctgggcgtggtagctgatgcctataatcccagcactgtgggaggctgaggcgggtagatcatgaggtcaggagtacaagaccagcctggtcaagatggtgaaaccccgtctctactaaaaatacaaaaattagccgggcatggtggtgggctcctgtaatcccagctacttgggaggctgaggcgaggtattgcttgaacctgggaggcggaggttgcagtgagctgagattgcaccactgcactccagcttgggcgacagagcaagattgtgcctcaaaaaaacaaacaaacaaaaacaaaataacaacaaaaaamcgctattagcttgatcttgtasatgaggaagtgagagttagaggggtaggcaaagtaattgtccatggttacacagctagtaagtggcaaagttgggaatactggcagttagacctcagagcttttgctccagaccactgtagtttatggtctctttgtggttatatttacaaagaaaaataaataacaggtaaggaaatgatggcattaacaggatcagggcacctggaaaatctgacataaaaataagacataaagctagtaaagatgatttggagccagatttttttttttttttttgagatggagtctcgctctktcactcaggccggaatgcagtggcacagtctcggctcactgcaacctccacctcctaggttcaagtgattttcctgctttaccctcctgagtaactgggattacagcacgtgccatcatgcccagctaatttttgtatttttagtagagatggggtttcaccatgttggctaggctggtcttgaactcctgacctcaagtgttccacccatctctacctcctaaagtgctgggattacaggtgtgagccactgtgcctggccagaaatgtcatctaattcctaagtttgcctttctagttaaaatctttattggggcaggaaaaacaacagtgttcatatttcataagttatcttctcttttggattagaaagatacaagaatcaccataaatgaagatgtgatattttaaaaattaggtagatttcattttcttttctttctttctctctctttttttttttttttttttttttgagacagagtctcactctgtcacacaggctggagtgcagtggcatgatctgggctcactgcaacctccgcctcctgggttcaagccattctcctgcctcagcctcctgagtagctgggattaagatgcacgccaccatggctggctaatttttgtatttttagtagagacatgttggtcaggctggtcttgaactcctgacctcaagtgatccgccagcctcagcttccaaagtgttagaattacaggtgtgagccaccacgcccagctattagatttcattttctaaaagaacatgaaaagtcgagatgagatagatatagaggatattttaactaattttttacatccacatggtagataatcttcagctatatagtgctttttaaaaaagtccagtatgaagccacatgtggtagctcacgcctgtaatcccaacactttaggaggccaaggtaggtggatcagttgaggtcaggagttcaaaaccagcctggccaacatggtgaaaccccgtctctaccaaaaaataaaaatttagctgtgtgtgatggtgcatgcctgtagtcccagctactcaggaggctgatgtgggagaatctcttgaacctgagtggcagacgttgcagtgagctgagatggcaccaccatactccagcctgggcaacagagtgagacactatctcagaaaaaaaaaaaaaaagaagmccagtatgagttagtaagtgcttcatagtagtgacattgtattcaacaggtgaaacaactggtcatttagtacgtagtttattttcttgggtgggtcaagaacttgtttgtgatttcaaacccagtcccttacaatattagaagtaaatacattctcactcttagactcctgaaacagacacataaattctcagagttctaagtctattcattttggtcttttttttttttttttttttttttgagacagagtcttgccaggctggagtgcagtggcgcgatctttgctcacttcaacctccgcctcccaggttcaagcgattctcctgcctcagcctcccaagtagctgggactacaggcatgtgctgccactcccagctaatttttgtatttttagtagagacaggattttaccatgttggccaagatggtcttgatctcttgacctcgtgatccgcctgccttggcctcccaaagttctgggattacaggcgtgagccactgcgcctggcctcattttggtgtttctaagaaggcagagagctgactttcattgccttgggccttcataacacaggggaatttgggcaaaaggggatgttagtttctattgttataaaaatttttgaggtagctatgtgaaatttggcamgtcatagtgacaaggcttccttcagattataaaggttagaaaagtccgttcatctccaaaatgccagacataaaggtacatggatactttaatataatactaagaacatacaatagagttttaaggagttaaggcacagtggttatggtaatgttgatccaaatatagtattttgtttcctttttagattacagtgtatctgcaaactccagaatagttattgtcacagcaggtgcaaggcagcaggagggagaaactcgccttgccctggtccaacgtaatgtggctataatgaaatcaatcattcctgccatagtccattatagtcctgattgtaaaattcttgttgtttcaaatccaggtgagtcttctctcttccattctattgcataaggatgatctttccataccattcctttaaaagaatcaacttcattgagttaacatttatatacaataaattgcactcgtttaaagtatataacgcgatgagttttgataaatgtaatcactcatgaaactaccgccatgatcaagatacaaaacatttcagctacctctgaaagttttcttgtgcctccttgcagttcatctctcattccacccctggccccattttctggaattttatatgaatgaaatcatgctgaatgtaattttttctgcctgacttctttcacccagcataattattttgggattcatccatattagtgagtgtatcatattgttccttttttagtgccaaagtattcttttgtttatacatttttttgtttgtgtgtttgatatggggtctcactctgagatggggtgtcattcaacctctgtctcactcgaggttggagtgcagggcgtaatcttgactcactgtaacctttgcctcacattgatcctcccacctcaggctcaattgatcctcccacctcaggctccccagtagctgggaccacaggcatgtcccaccacacccagctaattttcatatttttggtagaagtggggtttcactattttgtccagtctggtccggaactcctaagctcaggcagtctactcgccttggcctcctaaagtgctgggattacagatgtgagccactgcacccagccattgtttatacatttaaaatgctattttgtttattcatctgttgaaacatattgaggttatttccagttttgggctattatgagtgaaactaacatcataatttgtatgtaagtatttgtgtggtcatatgtctttatttctcttggataaatacctgggagtaacatacgtgggttatatggtaggtatatgtttaactctatcagaaattaccaaacaggttgggcattgtggctcatgcctgtaatcctagcactttgggaggctgaggcagaaggatcgcttgagcctaggagtttgagaccagtgtgggcaacatagggagaccttgtctgtacataaaataaagtaaaaaagctgggtatgaagattgcataagcctgggagatctgggctgcagtgagctgtggttgtgccactgcactccagcctgagtggcagagtgaaaccttgtctcaaaaaaaaaaaccaaagcaaacaaaaaaaaaacagttttaaattttagctaatccaggccaggcgtggtggctcacacctgtaatccccgcaacactttgggagcctaaggcaggtggatcacctgaggtcaggagttcaagactagcctggccaacgtagtgaaaccccatctctactaaaaatacaaaattagccgggtgtgtggtggtacatgcctgtaatcccagctactcaagaggctgaggcaggagaatcacttgaacctgggaagtggaggttgtggtgagttgagatcgcaccattgcattccagcctgggcaacaagagtgaaactctgtctcaaaaaataaaaataaaaataaataaataaaataaaatacattttagccaatccaatatcattgtgtgtgtttttgttttgttttgttttgtttttttgtttttgagatggagtcttgctctgtcccaggctggagtgcagtggcatgaccttggctyaccacaatctccttgtcgcaggttcaagcgattctcctgttcagcctcccatgttgctgggactgcaggtgcacaccaccacgcctggctaatttttgtatttgtatttttagtaaagacgaggttacaccatgttggccaggctggtctcaaactcctgacctcaggtgatccacctgcctcgcctcccaaagttctgggattacaggtgtgagccactgcacccggcctgctctcttcttttcttggttaatcttgctaatagtctatcaattttatttagcttttcaaagaaccagctttttgtttcatttatcttttgtatttttttgtttcaatttcatttagttctgctctgatcttagttatttcctttcttctgctgggtttgggtttggtttgttcttgtttctctagttccttgaggtgtgaccttagattgtcttttgtggtctttcagactttttgatgtaggcatttagggctatgaactttcctcttggcatcaccttagctgtatcccagcggttttgataggttgtgtcattactgtcattcgattagaagaatttttaatttctatcttgatttcatttttgactcaatgctcattcaggagcaggttatttaatttccatgtatttgcatggttttgaaggttccttttggagttgatgtccagttttattccactgtggtctgagagtgcttgatataatttcaattttcttaaatttattgaggctcattttatggcctatcatatggtctgtcttggagaaagttccatgtgctgttgaataggatgtgtattctgtggttgttagatgaaatgttgtgtatatatctgttaaatccatttgttccaaggtatagtttaaattcactgtttctttgttgactttctgtcttgatgacctgtctattgctgtcagcggagtattgaagtccccactattattgtgttgctgtctgtcttatttcttaggtttattagtaaatgttttataaatttgggagctccattgttaggtgcatatatgtttaggactgtgatattttcctgttggacaaggccttttaccattatataatgtccctctttgtctcttttaactgctgttgctttaaagtttgtttcgtctgatatgagagtatctaccccagctcgcttttggtgtccatttgcatgaaatgcctttttccacccctttatgtgagtccttgtatgttaggtgagtctactgaagacagcagatagttggttgattagttcttatccattctgcagttctttatcttttaagtggagcatttaggccatttacattcagtgttagtattgaaatgcaaggtactgttgtattcatcatgctttttgttgcctgtgtactttgggtttttgtttgtatgtttgtttttgctttttaacttgtgttttagttttataggtcctgtgtgatttatgctttaaggaagttctgggccaggcacagtggctcacacctgtaatcccagcattttgggaggccaaggtgggcggatcacctgaggtcaggagttcaagaccagcctgcccaacatagtgaaaccctgtctctactaaaaacacaaaaattagctgggcatggtcgtgggcacctgtagtcccagctactcggtaggctgaggcatgagaattgcttgaacctgggaggcagaggttgcagtgagctgagatcatgccactgcactccagcctgggcaacagagcaagactccatctcaaaaaaaggaaatwaaaaaaaaaaaaagaggttctgttttgatgtgtctccaggatttgtttcaagatttagagctccatttagcagttcttatagtggtggcttggtaatggcaaattctctcagcatttgtttgtctgaaaatgactgtatctttccttcatatatgattcttagtttcactggatacaacattcttggctgataattgttttgtttgaggaggctgaagatagggccacaatcctttctaggttgtagggtttctgctgagaaatctgctattaatttgataggtttttctttataggttacctggtgcttctgtctcacagctcttaagattctttcctttgtcttaactttgggtaacctgatgacagtgtgctaggcaaaggtctttttgcgatgaatttcccaggtgtcctttgtgcttcttgtatttgcatgtctaggtctctagcaaggccggggaatttttccttgattatctccccaaataccaaatatgttttctaagcttttagaattgtcttcttcctcaggaacaccgattaytcttaggtttggttgtttattgtaatcccagacatcctggaggctttgttcatatcttcttattctttttctttgtctttgttggattgggttaatttgaagaccttgtcctcgagctctgaatttctttcttctacttgttcaattctattgctgagactttccagagcatttcacatatctaaaagtgtgtccaaaatttcctgaattttttattgttttttctttaagctatttatttatgtgaatatttctcccttcacttcttgtatcatttttttttttttatttccttgcattgggcttcgcctttctctggtccctccctgattagcttaatagctaacctcctgaattctttttcaggtaaaccagggatttcttcttggtttggatcaattgctggtgaacttatgtgatttttggggggtgttgacgagccttcttttgttatattaccaaagttggttttctgattccttcttagcctcccaagtagctgggaatgcaggtgtgtgccaccacatctggctaatttttgtatttgttggtagagacagtttcaccatattggccaggctggtttcaaagtcctggcctcaagtgatccacctacctaagcctcccaaagtgccaggggataacaggcrtgagccaccgcacccagccagtgatttgcttcactttgtartaaatctgtatttgactctaaaacaattcatctatgtattcaggaaaaaaaaawtttttttaagttatgatgaatctttttctaacacaaaatttttcttcttagtggatattttgacatatatagtctggaagataagtggcttacctgtaactcgtgtaattggaagtggttgtaatctagactctgcccgtttccgttacctaattggagaaaagttgggtgtccaccccacaagctgccatggttggattattggagaacatggtgattctagtggtaagtataaatctattattattacgtgactacccttcttatctctactagtgcttatttcctttaaagttttttccctgatattaatatagttgtataagtttaatttttttggtatttccctggtgtaacttttactattcctttagtttcaatcttttgcatcattgatttagctatctttcataaaatagtccacaaagcatatagctgttttaatagtcaatatgagtgtttctcttatctgtaatacttttttatttattgtgattttttaaaacagctttattaagacataattcatgatatggtttggatctgtgtccctgcccaaatctcatgttgaattgtaatccccagtgtgggagctggggcctggtgggaggtggttggatcatggaggcaggttgtcatggtttaacaccatctgccttagtactgttttcacaatagtgagttcttgtgagatctggttgtttaaaagtgtgtggcacccccctccccgacccccgctgtagccatataagactctcctgcttccccttagccttcttctatgattgaaagtttcctgaggcctctcaggaagccaagcagatgccagcattgtgcttcctgtacagcttgcagaattgtgagccagttgaacctcttttctttgtaagttgcccagtctcaggtatttctttatagcaatgtgagaatggactaatacaattcatgtaccataaaattcaaccagcaaattacagaattcatgagtttctggtatattcacagggttgtactaacatcaccacaatctaaatacagaatcttttcatcagcccaaaatgaaatccgcatctttttcccctaccctagccccaggcaaccactaatctactttctcactctgtagatttatttattccagatttttcatataaatgaaataatatgtgattttaactattgaggccacaccaacctctctctttactgaatttaaacatttagtctctgctacatggttagaactttatactttttacagtgttctttaattgtgtcatgtatgtaaatcttctttccataatggcaataaaccaattgagaataaagaccatttgttcaaacattcatttatttattcaaaatatttagagtgcccttttctttataatccaagagccataatataacaaatactttatttgatttggacaaatatttcttcagccagakccttactttgaccctgttggcttgtgttatttttcctgaagttcattaaaactaattttctctggtatattttaatttctcacatttaatattctataactttatttttagaaaacagtatattctgattagtattaatttgaacatgtttagtattctatttagcatgatttttcggtttccttcctctttttctgttttccattggatctactttctttaatttcctctaatactttgaattatacacttaccttataaatggttatctataaatttttaacattcatacttgacctcagatgataaatttatttactctcctttgggataatacaaagttttttttttttttttttttttgagacagagtttcgctcttgttgcccaggctggagtgcaatggtgtgatctcggctcaccgcaacctccgcctcctgggttcaagcgattctcctgcctcagcctcctgagtagctgggattacgggcatgcaccaccacacccgactaattttgtatttttagtagagacagggtttctccatgttggtcaggctggtctcgaactcttgacgtcaggtgatccacccgccacagccttccaaagtgctgggattataggcatgagccactgcacccggccgggataatacaaagatcttagaatgcttttagtttgatcatcccctttttttgatgttgacaccatcctctttctgtcatacatgtaattattaattccttttctgtatccatactgttcttatatcccccaaactagttataattattattatttgaatagttaatacttgttcagatttatttacaggttggccagttgtgttgcttatctttattttctccatctaatttcttcccctggattcaatttatttcttcctgaactctatcctgttggtgttgtttatatgactgttttagtctcatcttattctggaatgacaggttaattggatgtgagattctagattgacagttattcctccttggctcttgtttactattgagaagtatggtattaatttgacattcttttccctctcattgcttatattttatctttcttatcagtctttttctttgtttatactgcattttgcatattgcttaaaaatatgtatgttgcttaaaaatgcctcctataccacacaattataaataaattctactacatattttctaacaaccttataattttatttcttacatttccctcttttatacatttgaaacctatttttatgtatggtgtaaggtggtgttttaggccatttttgtgttgctgtaaagaaatacctggccagggccgggcacggtggctcacgcctataatcccagcactttgggaggctgaggtggacggatcacgaggtcaggagattgagaccatcctggctaacacagtgaaaaccygtctctactaaaaatacaaaaaattagccaggcgtggtggtgggcacctgtagtcccagtgactcgggaggctgaggcgggagaatggcgtgaacccgggaggtggagcttgcagtgagccgagatcgcgccactgcactctagcctgggcgacagagcaagactccctctcaaaaaaaaaaaaaaagaaaaagaaatacctggccaggagtagtggctcatgcctgtaatcccagcacttttggaggccaaygcgtgtggatcacttgaggccaggagtttaagaccagcctggccaacatagcgaaaccccatctctactaaaaatacaaaaaaaagctgggtgtggtggcacacacctgtaatcccagctgctcgggaggctgaaacagaagaatcccttgaacttgggaggtggaggttgcagtgagctgagatcaagccactatgctacagcctgagtgaaaaagaaaaaaaaaacaaaagaaatacctgaggctgagtaatttataaagaaaaggggtttaatttagcttgtgcttctgcaggttgtacaggcatggctccaagatatgctcttgatgaggacctcagraagcttgcaatcatggcagaaggcaaaggaggagtagatgtgtcacatagtgagggcagaaacgagagagaggaggtgccatatacttttaaacaaccagatctcacatgaacttagagtgaagactcactcttcaacaggagatgatgctaagctattcatgagggatctgcacccatgatcagacacttcccacccccaacactagcggttacatttcaacatgagatttggaggagacaaacatctgaaccatatcaggtggcaacttaacttaaaaaaacaacactgaactcaaactcctgatgccatattgggaagaagagtttattttgagatctgtattttttagtgcccttatggagtggggtgaatgttgctggtgttgctctgaagactctggaccctaaattaggaacggattcagataaggaacactggaaaaatatccataaacaagttattcaaaggtaatagtacctattcagtttcttaatgccttaatagtcagtcttaagaataaatatcacggacaaaaatcaagtagttgatccttgctttttgtgagataaataactctaggctyctgaaaaccactaaattcagacttatacatagctttctttttgggggcatttttcaaaaagaaaaagtacttattatttcacaactcatatatttgagagtaataaaagcatagtgattatgagcatggactttggacccaggttgtccaggtttgaaacctgcttcatcatttattagtgatatgatattgggaaattacttaaaatatcagaagttgtttacttatcttcgaaatggggataattatagaacctactttacataatagccttatggagagtaaataagttaatactacatgtaaaatgctagaaccatgccaagaacttattaaatgttcatcatttgagtagatgaaacattaagctaatgcagatgatcagaaatcaatatggttttcttataaatgaagcatctgactccatatatattagccttaacagcacacaggattattcttcatggtttagtcaagagtcaagttacatattagtagaagttatagaacttaaaaattggctgggcggggtggctcacgcctgtaattccagcgctttgggaggccaaggcgggtggatcacctgaggtcagcagttcgagaccagcctgaacaacatggtaaaaccccatctcttctaaaaatacaaaaattagctcggtgtggtgatgggcgcctgtaatcccaggtacttgggaggctgaggcaggagaatcactggaacccaggaggcagaggttgcagtcagccaagacagcgccattgcactccagcctgggcaacaagagtgaaactccatctcaaaaaaaaaaaaaaaaaaaaagaacttaaaaatcacttttggatattcacagcttggaatattgaacttaacaaaaaccacaagtctactgtatgtatacttaaaacaaccctacaaaaatgtgtaagaggccaggcatggtggctcacgcctataatcccaatastttgggaggccaaggtgggcagatcacctgaggtcaggagttcgagaccagcctggccaacatggtgaaaaccgtctctactaaaaaaaaaaaaaaaaaaaaaaaaacaaaaattagccagctgtggttgtgcgtgcctgtaatcccagctacttgggaggctgaggcacaaraattgcttgaacctaggaggcaraggttgcagtgagccartattgtgccagtgcaatccagcctgggcaacagagcaagactctgtctcagaaaaaagataaataaataaaatawtaggctgggcgcagtggcttatgcctgtaatcccagcattttggaaggcctaggtgggctgatcatgaggtcaggagatcaagaccatcctggccaatatggtgaaactccgtctctactaaaatmcaaaaaaaaaaaaaaaaaaaattagccgggtgtggtggtgtgcccctgtaatcccagctactcaggaggctgcggcaggagaatcgcctgaacctgggaggcggaggttgcagtgagccaagatcacaccagtgcactccagcctggcaacagagcaagactctgtttcaaagaaaacaaacaaataaataaataaaataaaataataaaacaaaaatgtgtaagaattagggcagagactaaaaagtcataatataacaagtgatcatgggtgagtttttattctcttaaatgccttttagttttaaaagtttatattattttatttttggttataaaaagtaacatggcaatgtgtatgagtacagagctacagtttgggaagatgaaaacatttgagagaggatagtagtaatgactgcacagcagtgttaatgcacttaatgccactgaactgtaattgttaagatgataaattttaccgtagttaaaaaagcagttaaggctgggtgcagtggctcacatctgtaatcccaaccctttgggaggctgaggtaggaggattgtttgaggccaggagtttcagatcagctggggcaacagagtgagatcatgtctccacaaaaaattttaaaaaattagccaggcgtggtatgtctgtagtcccagctactggggtggttgaggcaggaagatcacttgagcccaggcgttttaggctcaactcaaactcgcagaggtatgatcacaccactgcacactagcctggacagcagagaaaaatcctgtctctaaaaaaawaaataaataaaataaaataaattaaaaaattaactagttgtagtgttgcatacctgtagtcttagctacctgggagattgagatgggaggattacttgagcccaggaatgcaagattgcaatgaacaacgatagtccactgcattccaacctgggcaacagagtgagacctcatctcttaaaaaaaaaacaaaaaacaacaacaacaatattaaaagtatatagccacgaattgttgtctgaaattcagactgtccgactcacaggacataataggttttcacctagcattaagtttatctagcatggtgaaaggataccaggaagaaaacacagtatagcatatcagtatcttctttagaaggtatttcttttcttttttttttatttgagatggggtcttgctytgtcgccaggctggagtgcagtggtgtggtctctgcactccgcctcccgggttcaagcaattctcctgcctcagcctcctgagtagctgggactacaagcacgcgccaccatgctcagctaatttttgtatttttagtagaaacggggtttcaccatgttggccaggagtcttaatctcttgacctcatgatctgcccaccttggcctcccaaagtgctgggattacaggtgtgagccactgtactcgggcagttcctttttaatttgagacacttgctttaagggaacttttttaagatcacattttccattgaagtcctgtgtgatttgaataccaaatattccaatgtgtttcagatcagtacttatcactattggtcctctcaactctgcagtatctaaaattaaattatttgcctcttgatcatttagcagaggatctataattataaataatcctcagggtgctgctaatatttatctaaaaactactcagctctttttacacaacagcttctgatttgctgttgtctaaccaccaattgcagaggaatgacatcatgatttaataggatgtccttacttgttcccaagagggcatttggtttacaatgtgtatcagtttttgtcttaaagtaccatccttgaaactatttcttctatttgctccctnnnnnnnnnnnnnnnnnnnnagttgtttacttatcttcgaaatggggataattatagaacctactttacataatacccttatggagagtaaataagttaatactacatgtaaaatgctagaaccatgccaagaacttattaaatgttcatcatttgagtagatgaaacattaagctaatgcagatgatcagaaatcaatatggttttcttataaatgaagcatctgactccatatatattacccttaacagcacacaggattattcttcatggtttagtcaagagtcaagttacatattagtagaagttatagaacttaaaaattggctgggcggggtgactcacgcatgtaaatcactttcttaggcagaccaagttagatcaataaaaaaagtcaggagttcaagaccagcctggcccaacatggtgaaaccctgtctctactaaaaatacaaaaattagctgggcttggtggcgggcgcctgtaatcccagctatttgggaggctgaggcatcacttgaacccaggaggtggaggttgctgtgagttgaggttacgccactgcactccagcatgggcgacagagggagactccgtctaaaaacaaaacaaaacaaaacaacagtattgcaatgcttaggtgtagcttctaggccctatcactgcttggggcacactcagttacacagaaggaagctgacatgggggcagacttccccagcacaggaaagcggctgcctttagttctcaacagttttgttttttgtttttttttaactgcaaaagtgggaaattctcaacagttcttaatgcacttcctgtcacatagccctcagggtctgcatacttgatcccagtactgctagtcctgatacaatgcacaaatcaatggtttcataaaatccagtgctgataacctagttctatgatagttaatagtccacatttatcttaactaatttttatatctagaaaactatgttgcctgaactcaaactcaaggttatcttcccagttacttctggctttttcgaaagggctcaaatccactgttaaccctttacccttggtacctttccatgacctcagattattatctttgtatcatatattcttcagagttcatttgacaaacatttcttcaatattttataaatagaaaagacaagttagtacatctacaaccactagactctataagacacagtaggtaaacagaatccttcacaatgttttggtaattcttaaccaactagactgtttttttcccccctctatcatttactatcacttgcgtcttattaaaggtattgatacacgcattcaatcacatgttttatctctttctctctctcttttttttttttttttttttgagacagagtcttgctctgttgcccaggctggagtgcagtggggcaattttggctcactgcaacctccgcctcctgggttcaagcgattctcatgcctcggcctcttgagtagctgggactacaggagcgtaccaccacacctggctagtttttatatttttagtacagatggggtttcaccatgttggtcaaactggtctccaactcctgacctcaggtgatctgcccgcctcagcctcctgaagccaccacgcagtttttatatttctaaagcaaatgtatttctttttttggccaaactatttccataagtatcacatcaattgaaagttttaggtcaatttaccaaaatatcttttactttgaaaatcattattggtatgttttattttcttaaattctcttaagggaacctacaaatgctttgtttcaccaaaaagctttgaatgagaggttaaattaatccctagaaaacacaatatgtattaatattacagtatcttttcctgtccttctcaacaaaactgtcccttatgcccatatattttcagctataggggccaggagaccagtctccaataaatgcagggatctaactggtctggaggcacatccataccccccacccactaaggaacttgttttaaccgatagcggtttccaagtgttatggagcagcccatctacctcccatagggctgtcacagtgttggtctttatctacccagtcactaataattgtaccacagagaatggtagttctttyttttctttctttctttttttttttttttttgagacacagtctggctctgtcatccaggctggagtgtagtggcatgatcttggcttactgcaacctctgactcccaggctcaagccatcctcacacctcagcctcctgagtagctaggaatacaggtgcatgccaccatgcctggccactttttgtatttttggtagtgatggggtttcaccatgttgcccaggctggtctcaaactcctgagctaaagcaatctgcccaccttggcctcccaaagtgttgggattacaggtgtgagccactgtactcgggcagttcctttttaatttgagacacttgctttaagggaacaaggattaagatcacatttcccattgaagtcctgtgtgatttgaataycaaatattccaatgtgtttcagatcagtacttatcactattggtcctctcaactctgcagtatctaaaattaaattatttgcctcttgatcatttagcagaggatctataattataaataatcctcagggtgctgctaatatttatctaaaaactactcagctctttttacacaacagcttctgatttgctgttgtctaaccaccaattgcagaggaatgacatcatgatttaataggatgtccttacttgttcccaagagggcatttggtttacaatgtgtatcagtttttgtcttaaagtaccatccttgaaactatttcttctatttgctccctttaccctttcttttacaccagcaattttattttcatcaggatggttaataacaactaaaggattatgtttttagctattctcaactttcttctgtttctcaatctattttattaatacctgagaggataaatctgtcatccagattcaactggtgagatttgtccccagtaatctactgtagagctttcttttcttcarctcatagacagtatgctgtcaatcaagtgccaggcagaccstctttccctttccttttacttacccccggagtcttggccgtacagaattgagggtctaaaagtacttttgtcatcaaaagtattgcatggcctctgatagtggccctgattttggactgatagtcaaatcataggacactactgtaggaacagtccaggcccaacctgctgtgttcaggtggtatatatatatatatatatgccttatcttggcaaccaagtgtgttatgtgcattcttggggctttaaaayggggtagttgtaagacctcctgatatgaatgatatatgctggacagtctttgcttcttgtcctgtatcctttctaaaagttaaataaacttagtgctaaattaaaccctctttgtccagtgaagttgactgtcaatccaaacctgagaccactatttgtagcaatgcaaatatataataaatattaattgtaggaaataaggaaattcagacaggcataaagaagactcacctgtaagcctgtcttgtaaaaataatcactattaataacttggtaggttgatgcagctctaaagtttgtataaaaatttatattttttacaagccagagataagaaaatgcataatgtttagtattgtgctattttcctttgaaaatgtatcatgaatattttccatattcatttattattgatttagtgatatattcttaggaaagatatatacacacagcttacaactgtataaatttacattggcaagctagtaacaattttttttttttttgagacggagtctcactctgtcacccaggctggagtgcaatggtatagtctaggctcactgcaacctctgcccaccaggttcaagtgattctcctacctcagcctctccagtagctgggactacaggcatataccaccacacctggctaagttttgtatttttagtagagatggggtttcgctgtgttggccagtgttggccaggctggtctcgmacttctgacctcgtgatccacccacctcggcctcccaaagttctgggattacagatgtgagccattgcccctggccactagtaacaattttaaatggtccaagagatttatatggtaactttcaaggtgattagtttctatgttgcatatttaagcaacaatacaaaaaatattaaaagctagtttcatcttgagtggcacatttgtcctagtattctgcctttatgatttaaaaaaagggtaaattaatttttacttaaaaaaagtaggctgggcacggtggctcacacctataataccagcactccaggaaactgaggcgagcagatcgcttgagctcagaagtttgaaaccagcctgggcaacatggcgaaaccctgtatctacaaagaacacaaaaattagccaggcatggtggctcatgcctgtactgtcaagtagctacttgggaagctgaggagggaggatcgcataagcccaggaggtggaggttgcagtgagccatgatcacacacaactgccctccggcctgggcaaggaagcaagaccctgtctcaaaaaataataataataatcaataaaaaagtaataaagtatgtagtgaagttttattagaccagtatagaaagttttgttgcctgtttataaattctgtaagaaatctatgggaaaattctaatacaattgcattgacatgtagataactttaaaatggatgcttgaagaatattatgttttctctgggttgacttattatgaatttgattttcttactttctacaactgtagtgcctatgaaattatcaagctgaaggggtatacctcttgggctattggactgtctgtgatggatytggtaggatccattttgaaaaatcttaggagagtgcacccagtttccaccatggttaaggtaggcttaaattaaatmttcatttatcattctttcctttaatatttattgggtcactactatatgccaggcagtgtacaagatgttgaggatataatagtgaataaaaaatacaaagaccttgacctcaggtcaggtcaaaaaaatacagataccttgacctaaggaagggaatcctgaaagagaaccaggtttgaagatcacatttacagttttggacacagttttgagccctggcatataaacagtgtgaagccaactcaaactagcttatgcaaaaagaaaatttattggcttatgtaactgaaatgccaaggaggcctgattctggtactcagacaatattatgagagctgtcttttctctccattctcttggctcatctttttcctctattggcttccaactcatgcagactttttccatggggcaacaaagatgggtcacagtagctgcaggcttagatcctataatacctctggctgagaaccacttgcgtagactgaggaaattaagacaagtgtaatagctatttttaggaatttggttgtgaaggtaaggaaaatcagggcaagaagtttgtttgtttgtttgttacacagataagatgcttatagtaaagatcaagtaccaagggagaggatgaagacagaagtggtaagcagagggggatgcagtccagagcatagttgtaggcattacccctaaaaggaggaggggcaggagttaacaaaaagagaatgtgtactgatgcatgtagatttgtatatttgacattggaagcatctgatgacttctctatttttttttttttttttgagacggagtctcactctgtcacccaggctggagtgcagtcatgcgatcttggctcactgcaagctccacctcccaggttcacactattctcctgcctcagcctcccaagtagctgggactataggcacccaccaccacacccggctaattttttttgtatttttagtagagacagggtttcactgtgttaaccaggatggtcttgatctcctgacctcgtratctgcctgcctcagcctcccaaattgctgggattacaggcgtgagccaccacggcctgtygatttctctattttyagtgaaaggagatagtgaaaggagtaggataacgggagtgggagcagaaggtttcataagtgaaaaaagtytagagagtggaaagaaagggaattttggttggattattcatatgtatattgaagttaacaaggataatggcagaaattgagatagacagggaagactgtgagccatgtgtcagtctgtgaatgagattgaataactaggaggttagtccttacaaagggaagaagagctgaattagatgatcttcaaaaaatagggagaatatgttttgtttttataagaccaggggattaatgatttggaagaacggggcaggtgcagtggctcacgcctgtaatcccagtactttgggaggctgaggccggtggatcacttgacgtcaggagtttgagaccagctggtcaacatggtgaaaccctgcctctactaaaaatacaaaaattagctgagtatggtggtgcacgcctgtagtcctagctacttgggcagctgagacaagagaattgcttgaacccaggaggtacaagctgcagtgagccaagattgtgtcactgcactccagcctgggcaacagaatgagactctgtctcaaaaaaaaaaaaaaaaaaaaagatttggaagaggcaataaagagtacacaatggataccacacaccccttcttttctgaggctgcagaacctatgggagaataagcaactgcctctctaggactctggagaaagagtcagggaagtgtcaaatgagtaatcagtgaagaaactgagtaatatgggaatttaatagcctttaccgaacaagtcaatggacattatattttaatttaattttaatgttttggggagggatgaagtcttactctgttgcccaggctggagtgcagtggcgcaatctcagctcactgcaacctctgcctcctgggttcaagcrattcttgtgcctcagcctcctaagtagctgggattacaggcacgtgccaccacgcctggctattttttgtatttttagtagagaaggggttttgtgctgctgccaggctggtcttgaactcgtgacctgaagygatccaaccacctcggcttcccaaagtgctgggattacaggcgtgagccaccrcgccctgctgagttatattttatagggaacatttaaacatttgacgttacaagcagagtcatttgtatattcttattttttctttctttcccacttacttcacttttactacttcacattttcaccaaatcaaggtgtgcagagtttatttcacattaatgtattaattggattttttttttktktgtcaaatagggaattctctttaaacaatctctgtatttcacagctggtccaagagcaaatgagaacaaattctaatatatccaggggaaattatcactaaccaggcataaagcttaaagggaagagggtaggctgaggaggctagtggcaggtcacagttagcacacagggccaggcttggtcccaggattcaggcaggagcccttgttcccagcccacccagcagtcctcagatggcatgatgggtggacatgaattctcgaattccagtctgaggtgcctcttctagagagaagagagatgacaggaggtaaagggaaacaaattctggaaataaccagtagggaagcagagggacttcttcccctgccaccatcagaggccttgcctctgattacacccatggaagctcatgttaaagcttcaaatgtcacagaggtggcaacagaatgatcaaggatcagagagggagttggagaccaacctgggcaacataacaagactccatctctataaaaaatgaaaagaaaaatagccaggcatggtggtgtgtgctacttgggaggctgcagtgggaggattgcttaagcccaggaggtccaggcaacattgagctatgactgcaccactgcactccagcctgggtgacacagcgagacactgtctcctaaaaaaaaaaaaaaaaaaaaaaaaaaaaaaaaagaggatagggaagtgaattgcgaatttcagtatgactgtggctggagcctggctgaatagaatgtgggttgacagtctgaaaagacagtggctttccatagctaggcagatgccaaagtggaaggaatgtaagtagttcttggcggggcaccctcagggatgacacttggctgatctgatggtgcttatgagggtgagtgtaaagtggctaccaaaatgagggagctggactatggtagaggaggtaaccagagaatccctctgtggggagaagttactagagcaaaacaggaacaaggggcacaccttgtgctcctgagtagagccccagagatggtgagagggaagaatggctgaatagtgcccatgggctctgcagcatggaaagctgtgaggcactgctccagagtcaaggagcctcccctcttccttcaacgccattcctggtaactgtttataatcagtcctggagaagaacaatgccctcccttctcccacaaccccagactcagccccaaagagaggggtaaagagtgatgagtggtaggaggcagggaagtgtgagggatctactgggtgtctttttttttttttaactgggtgtcttttaacattttttaaattttaattttttgggggtatattgagttttcctatcttccaagaccagggaggatagtatggaggtggtggaggctggtacctatgcatgtagatgttatgtgagttgcccaggttgtaataggctctggcagctgcttctcggccttggctgcaggaatggagggaattttggggcttctgatgggaggttccaggggcccaggatagggcagtgccatggggctgcacctgtttcatggccctatccatgatgggaggtcccagatagaactcaggcggaggtagtggataggagtacagaagggcaggagtgcattccattgcagctggtgatgagaggcacaggccccaccgggcatgtaagagcatctataggctccactgggggtttacctctggaggcttaaaatgccacccgtagcacccattgtccaaactcaatgatgctccctgctgtaaaggtatgaagcagagccttcccagtcacctcctgcttcactrttgcctcgatgtagtttggactacacacaagttacttgattctcatagtactccttttgataaaatggcatcatgaaagaccgcatggcatcctttcccgtggaccaaaagatgacctggtaagggataaggtaaattgtatgtttctgggtccttctaaaggcctctggcatcttcttcatgtcactgaatgtaagttccacatggttataggacataaggatgctcttgcttttgctgaccatcactctgccaccctctgagcgattcttgttgaatgctttagtctctcctgtatactctcattttgatgcccttttgcatagctgcttttccatatcaggttatttgaacaatatcttatcttgcctttcagggattatatggaataaaasaagaactctttctcagtatcccttgtgtcttggggcggaatggtgtctcagatgttgtgaaaattaacttgaattctgaggaggaggcccttttcaagaagagtgcagaaacactttggaatattcaaaaggatctaatattttaaattaaagccttctaatgttccactgtttggagaacagaagatagcaggctgtgtattttaaattttgaaagtattttcatttgatctttaaaaaataaaaacaaattggagacctgtgacataactctagtctctcaagattagaacgagcaaatggtaaagagattttcctctttaagaatcatttatagctctattctaatgatacccaatctgtacaggtgtaagttatacttctgaggtatgtcacatatgttagagtgccttcagatgtagtagaatatgtataatcactataatacagagctttgattcttttcacaaaccaagccctttttctagtattacaattttatcttgtactttcatccgttagagtaccagcatattcacttcattacattagcgtcatatgtttatgtataatcattataaatgtggccgggcactgcagcctgggtgamagagtgaggctctgtctcaaaaaaaatcattataaatgcttatttttaagaccatatatatcaaaaagaaataaaaagctgagtgctgtggctcatggctgtaatcccagtgctttgggagggtgaggcaagaggatcacatgagtccaggagtttgagaccagccttggcaacatagcaacaccccatctctacaaaaataaagaaattagatgtggtggcctgcatctgtagtccagctacttgggagactgagaccagtagataacttgagcccaggagttcaaggctatgattgtgccactgcactccagcctgggccacagaggaagactcagactcaaaagaagaagaagaacacagaagaaaagcagaaacaagaagaagatacagatgtaactttacgatgtaaaaaatctaaataagattgtattcaactctgcaagtattatactagtcatataaactcaaatagttgatttggtgtctcaattgaaatatcacctggggagcttatgccatcctcagttatttgtgcagcagactattactatgcttgctatggtatagttatgaaatcagtatgacattatctctgccctcaagtatccacagtgagtatttagggtacctcaacgaattgatttttgactaatttttttttcctttttgagatggagtctcactctgtcacctaggctagagtgcagtgacacgatctgtgctcactacaacctccacctcctgggttcaagtgattcttctgcctcagcctcccaagtagctgggattacaggcacccaccaccacgcctggctaatttttttatttttagtagagacagggtttcaccatgttggccaggctggtcttgaactcctgacctcaagtgagctgcccacctcagcctcctaaagtactgggattacaggtgtgagcaactgcgcccggctgattattgactaatgtttgataatagtcattaatagctccctgttggtgtctaaaggtgaaaatgcttctactgatttatatagtatatagatacatatgaagtatttccttgattccacaagaaatttaaggcagctataggaactatacaataaaacaaaaactaagaaatcagtatcaaggtaatttacaattttttttctttttttagacaaggtcttgttctgtcacccaggctggagctggagtgcagcgggtaattgtggctcgctgcagcctcgaactccagggctcatcagatcctcccacctcagcctcctgagtagctgagactacaggcacatgccaccacgccctgcagattttcgtattttttggagacagggtttcaccatgttgcccaggctggtcctcaactcctgggctcaagcagtcctcctgcctcggccccccaaagtgctgggattataggcatgagccaccactcctggtcaatttacaaattaagactagaactggaccaatgggaaagatcagaaggtagatatgcagcccctgaggactcgcatgactagtgaaggctgactcatttggtcagagagtcatggcttaccctctgagtctgttattcttgctctcttgatagctttcattctggtcatctactcctgatcatgattagtgtcccattattttattatttcccctttttcttcagcatcttcccttgaatatatacaattattatcagttgagttaggatgagggcaaggggagtcttctgtgggttttggcttttttaaaagctcgtttgtacatcaaaacttcattttaggaaattcttgcagagattaaaaggctgaaaaattgatacagtttctacagggaacattctagtaagtaaaactgctctacatgtccccaagtggctgaaaattggttctgggtatgggggagggaggaaaaggtaaaaaaaaacttagatattacaagagtttggctctccagagctcaaccttgcctgacaaataaacgtatatgtatatgtgtatgtgtatatatatatatatatatatatatatatatatatatatatatattttttttttttttttttttttttaagagatggagtcttgctctgtcacccaggctgcagtgcggtggcgcaagctccactcactgcaacctccacctcccaggttcaagcaattctcctgcctcagcctcctgagtagctgggactacaggtgcctgctaccacgcccggctaattcctttccttttttttttttttttttgagacggagtctcgctctgtggcccaggctggagtgcagtggcacgatcttggctcactgcaagctccgcctccccggttcgcgccattctcctgcctcagcctcccgagtagctgacgcctggctaatttcttttatattagtagagacgggctttcaccgttttgcccaggctggtctcgaactcctaagatcaggcaatccgcccgcctcggcctcccaaagtgctagggttacagccgtgagccaccgcgcccggccaactccttaatatttaatttcatgatgggggtgcaaaacaattagggggaacatatctacaaagactcttgagggagtgataatgaaaaaagattgagaaacactgctctacattttataaaaatttgtcaatatgtattactgtattagggttctctagagggacagaacgaataggatagctatatatataaaggggagtttattgaggagtattgactcacacaatcacaaggtgaggtcccacaacaataggccgtctgcaagctgagaagcaagaaagtcagtcggagttccaaagctgaagaactaggagtccaatgtttgagggcaggaagcatccagcacaggagaaagatgaaggctggaagacttagccagtctagtccctccacgttcctctgcctgcttttatcctagacgtgctggcagctgactagatggtgctcacccggatagagggtgggtttgcgtcttctagcctactgactcaaatgttaatttcctgtggcaacaccctcacagacacacccaggttcaacactttgcatccttcaatccaatcaagttgacactcagtattaaccatcaaaattacgtattatgattcacaaatgagaaaacaattaggtaaaatgtggtgggagaagtagaaaccttggtttattccagactgattttcaattctacatttttgttttttatttttgagacggagtctcactctgtcacccaggctggagggcagtggcatgatctcggctcaccaaaacctccgcctcccgggttcaaacgattctcctgccccagcctcctgagtagctgggattacaggtgcgtgccaccacacccggctaatttttgtatttttagtagagacggggtttcgccatgttggccaggctggtctcgaactcctgacctcagctaatccacccgcctcggcctcccaaagtgtggattctacatttaaccacttaataatgaattgagctttcccttcatcttgtaaaaatggttatcaattggcactgcattcatcaaattcttcaggtttcatatcttatttccaaattccttttgcatacagagttttgttgttgttttgagacagggtctcactccgtcacccaggctggagtgcagtggcacaatttcggcttactgcaacctccgcctcccaggttcacaaacaattcttgtgcttcagcctcccaggtagctgggattacaggggtgcaccaccacgtccagctaatttttgtatttttagtagaaacgtggtttcacgatgttggccaggctgatttcgaacccctgacctcaggtgatccgcccgccttggccttccagagtgctgggattacaggcgtgagccaccacgctcggcccagagttttaaaattttactttttctactttagctcacatttgaggtggtaaaagttaatcttgaggtccctttctcctacagggctgggggaaaattttcacgtgagagtcaaacagtccttttcagatacatccagacaaggtttggttagaaataaaattacttgggctctctggtggatgggttctaggcaaacaactccgcccaacagcagaggccctgcactgcgttgtgcctgcagcacctcgtgcgccttctgcagccggccaaccacctacaccgcagcccgcccacccgcacgcgggggcggggcgggcaggcagaggcgcaggcgcggtgcttcgcagcccgcttccggcctcacacctgccaagcatcacacctgccaagcatcacacctgccaagcatcacacctgcgatgcctgcacgagctgggtgcggtccgcgcagctgcagtaagggggcgacccggcgtctgttagtcggcggttcatctccttcgtgcctcgatgagctttaacgccattttcctccattctctttcttcacctcttgagtgagtggccatgagctgggctgcaagagtcctggggagcagccagagagcgggcgccgcgggagcgaattgtttttgcccaaggatggttctgtgtctccgccaggcggcatgtgacctgctcgggcgcgggtggcccttcacccctgtgagtgtggccagaagtacctctcacctggacctgcggaccccgggcgcagtcctggagctgagaactggaggttgggggaaaagcagggtaaaggggagagaaaagggggtcagctgcgggacggagtgccgtcccagctgtagtttcatgtttggtggagcaacccctgttcctttcctctctctctctcttaattcctcttaactgtactcacgcttccttctccttcccctggtccgcttcatggatgctgagctgcctggccagaacctacccagcttctttgctggtcagatttgtcggtcttttgtgtgtctgcagcacctccttccacacgggcccaggagttctctatacgcgctctcaccgcaggtcttggaattccaagccatttccaattccaggtcttggaaatggctgtgcaatttgtcttcactgttaggtttccaagatggcaactatcaagagtgaacttattaagaatttcgcggaagaggaggccattcatcacaataagatctccattgtaggaactggatcggttggtgtggcttgtgctatcagcatcttattaaaagtaagttgtgtgctctgcaccacagggttcacctcagttggaggcgaggccacagcgtatggttgtggaggttgtgtccagttcaaggtggtgagtggggagccagtgtgaggggcatcagaggaaaaggtgccctttttttagttgttcacccagagggcgctcctttttaaaaattgtatgatgatatcatgtgggttagaagcatctctgtgaaagtatgttgacatttcactttcacgtaatgacaatatgaggtacccctttgcttgatttggaaactcagctcacaaaacaaactggagagaaataggtggcagaaaagagtatacaagcgtgtcagtgatggtaggcagcctacgagtaccaaatacaataatcttttttcatttaaatatctctctcccatttcctagtctgtatatctttatttcccttcgttccttattcatgttaggttagttttagtgtttagctgttcttagtattgatacagctgataaagttttatggctatagacagaggccaaaaaaagattctgacccctttctaagaatattaccctgatatgaactttattaccataaagttttaataaatcataagacactctgagctatacttttattaatgaaatatctgtaaaatgttttaagccatcttttatataacctttaatcctggcatgagtcattggatttaaaggattgcctctgggtttcatatctagatgacatagtgaccttatggcactaaggacagcagccacagccaactgctgctcctgccagccatacaaattccccatgattcattttgtcctacctattgtaatgcctttatcagcagtgtcctcactgctaatgaagaatacacacacgtgaaaaccaacacatc

SEQ ID NO: 93253 - DNA, 34427 bp, Homo sapiens
cttttgcttgattattgatggtacttactagcctgtgccagaataacgtcttagagccacccctgtgcttcaatttccgtatctgtaaaatacaaataatatgtacctcatagaagcattatacagataaaagaaaaatgcatagaaaagctgtaaagatcctgagctttaaagtacatccatactcagcaaaaaagaaaacaggaaagaaaaggaacaaatcactaatacctgcatgaaactcaaaagcattatgttaagtgccaggagccaaaaatctgtacatatttcatgatttcatttctgtgacattccagagaaggcaaaactgtggagacagaaatcagatcagtggctgccaggggctgggtgtgaggtgagagactttagacaagggaaatttctcgcagtgatagaaatgttctatattttgatcgtttggtggttacacaactatacatgtttgtcaaaactcagaattgtacacctcacagggtgaatattactgtatgttaattatacatcaataaatcttacttttcaaacattggaggaaagaatgtcctataatatacttcgttatgtgtacagtcctttgggataaggagctaatcgactgactactcaaccagtaaatacctattccaaattttttgcctctatgtcctgttgttcacaatagcacgtaatatgattttttgctaatatagaatgcttctctgcttgcagcttaaaatttttttttaattagaagggcactgaacacttctcttctaaaaagttcaactaactgttgctctgcctcaaggaatgggggaaagcaccaagagaataataagtcaggactgggctattaaatagcccagaagcacagagaggtgtgggaggtggggggattcttgctttggtctccaacaggcgagaagcactgcagtcctatagcaggtcattgtgtcgataataggcgttatcttggtttggagagaatgtccaactctggattgttcagtgttagtcagacttgtgtggttaaggacggcctaacattcacttaattaaaacaccagtcagatacacgcagagattgaggcgtgcaagtctctgggagcaggcggacgcgactgcccacgccccacacccgccggccctcccttctcattggccgctgcccagctgctccgacgcccgcttctataagagacaggcagcgcggggccgccggccgacccagcctgcacctactggcgcccgaggtgagtgaggcggcccttcccgcgggcaccggggaccgccgtcgaggctttggcggcgcttggcaggcgcggggctgggcagagtcaccctcccgggaggtaaattggtggtcttgcggagtcagatttgggaggtcggagttgtacccctataaacgcttactattctttcctcccacgctgtttggggagaaaagacactttctgagtgcctcctgtgtgccaggaacagactctttagccatcatgagatttcaccttcatgacaaactctggtagatatttcttgagtccccagatgaggaaagtggggtccagagtccaacccaagtctgtgtgactcctctatgttggcagaaacagtaagatttttcttccttcccttcctctccatcaaagggcaatgtctctttttttcttctcctcccatgaagggaagcttcccttaaacagcctcccgaagaagaaggagtctcagatgcaaagcttctcagcatcgcacttaccatcatcaccaccatcccaacagacgactgagagctttttgcaaggtcgcaattgacaaagaggactaggtccttgcggtttagagtcagttaagagtccgtgtgaactcaaccttgcctttggcgtttgattttcagaggtttaaaatgaacttctcattgatgtcccactctacttgacttagcaggaaaaagactagagttgaacttgctaacccaggaaaagtttgtgcctgttagttaaaaaaaaaaggggggggtggaattctaatatcaatgtttctgtaaagttataatctgtggtttacatatgttatcactgaggtccatttgtacatgtattattagattatctccagatagggatgtgtcttctatttccattttctctgccagtgcctttatttcctagaatactgtttttcatggatagtgttttcttttgtatttcatctacactttcatcctcattcccactccttatttagaaaagaaaatcaagactccgtagaggattccctccctctgaaagaatcctccttgcagtttttagttctgtcttcaaacaatatccatgctttcaaaagactaattcagtagtgctttgtgcttcctagatccggtaaatataaattacacttgttttactgattaaactaagggaagaaaagagttggtcattgtatacgccttgacctctcccaagggtcgggtctgttgatcttctgagtgtcttcttggtattttttccttatttccagtggtatgtcctacacagtgcatccttaggccaggagacgcagtaggaaaatgactctacctttcatgagaaaagggtaccagttggtattagctgatcagagagttgctttaaaaataaaatgcttatgtattgatgagacactgattcaaacaagtgtgacctattttatcttaccaggttagtattgtgtttttttgttttgttttgttttgttttgttttcctgaaagagtaggaggaggtgggtaggttgaaaggggaaaggaaaaagtaacaaggcaaaatattgaggttctgaaagcggtttggggttaactggaggaaaaaataactgatgcctcataagctctgtcaaccaagcaaagttatggccaagttttagtaacgatcaaagatctatgtcctgtaagattattttggggtgggggggaacaaaaaagagggtgagaattttcttctagttttctagtttcttagcaaaagttccttttgagaaccttcatttttaccatgacttaaacaaggaggagtgtttccacatctttttttttgagacgcagtcttgctctgtcacctgggctggagtgcagtggcgtgatcctggctcactgcaacctccgcctcccaggttcaagccattctcctacctcagcctcccaagtagctgggactacaggcgcccgccaccacacccagccaatttttgtatttttagtagagacggggtttcaccatgttggccaggatggtctcgctctcttgacctcatgattcacccgcctcggcctcctaaagtgctgggaattacaggtgtgagccacttacatcttaatataataatgtatgtctttaaatacatcaaaataatataaatgccttgcatatcataaatttcaattaatgtatccttcaccctcctctccccacaccaactaaggagatgttggcacaaaacttgatccattccagaatcaggtaaagaaaataattatgaaccctaaagggatggagccatgactgttagcaccttctcacaatagcaacttccaggaaagcttagggaccagttttgaaaattgaaggaaattctcatttttttttttttaagagacagggtttcactctgtcacccaggctggactgcagtggcgcgatcatggatcactgcagcctagaactcctgagctcaagcaagcctcctgcctcagcctccctagtagctgggactgcaggtgaaagccactatgcccagctaacttaaacaattttttttgttgttgttgttcatacagcatctcactatgttacccaggctcttcataatagtttttgttgttgttgttgtttgtttgtttttgtttttgttttttgagacggagtctcactctactgccctgccagagtgcagcgacacgatcttgctccctgcaacctctgcctcctgagttcaaacgattttcatgcctcagcctcccgagtagctgggattacatgcatgtgtcatcatgccaggctaatttttgtatttttagtagagacggggtttcaccatgttggccaggctggtcttcaactcctgamctcaagtgatccacccactttggctttccaatgtgctgggattacaggcatgagccgcagcagctggcctcatatagttttatatgaagagttttattccaagctccaagaggttgttgaaagacaaattatcaggagatctagaattctgttagtgttaccactgactggaaaaaatcagtggtaacttttctttactgttctctgatccttgctcccagttcttaaagctgatttacatgatgaagctagtggttggccaggaaatagcttatatttgcagaatcctcttccttctgcatgtcatggtgatggtatcaggaaacatgaggactcagtaactatagggtaactcagtacattttactttggggtctttgtctatttgtttgcaaaaaaactgctgaattattttcttgagatttggaatttaatacactttaggggttttataataaattaatgaaactgaaatcaccttgatacaaaacaatactgacattttatatcataaagcaacttttccacatgtttgctattgtaagaaatatgttaaccatcttgtaaaatgcctaattcctagggcaagaaaaattcttagccagaggtatttagaatgtctatttcattacttgaacattttctctttttttgaaaactggaaaatttgggacatattccccattacttgagataatacttattgagtacttagtgtaggttagcaactgttctaagagttttatgtaaattataactatttaattctcataagtttatatatgtttaatcctccttataatcatgagagtggtgttaattatcctccctccaagtttgcaaataaagaggttgatacatataaagattataacttgcctagatggatttgcagaaagatttattactagcaatttgttatattattttgcatctcttttattgtttacattttcacgctttaggacaacgtcgcccatactctgtgtttgataagaaaagtcaatctttgagtggtaattgaatgggtaagaaacgtttctgaaagttttcacatccctaaaaacattttgagaatgcttatctgaggccatccctgaatttttagccccagagccaccaatttggaattttctgtgtatacttaagtttaccttaagaaatggtcacttcctttgaagtggaaaatctcttaagatctcctgcttctcatccataaatcctttctcagcagagactcatggatgggctagaagctatattcagtcatctttagaagcacatgggatattgatcaaaggggtggggtggtgggaaggtgaggggtggttgagtgtactccttgggtgtcatggctgggatctcagtgtcccttcttttctgcttatttgtacttattgagaagtctgtcttccattttctccttccccatgaacaagtgtgtgaattatttggaggcaagttgtcttgtttttaaatttttactgccctaactttgactgtggtgcttcacacatgtgaatgcgcttgggttgaaattttattcgttttaccattagtaattatttgaatcaaagaaaaatccacataattattcagtttaactggccatttagttttatagcatttgaaatagaaattgtttttagttctagagactaatttggcataatttaaaaatcttggtagttttggaaacttgaacccaatgaattcataaatgttagttaaattttgaattatgtatctctaactcttcttggtacctgaaatatcctagtttcttccgtgaggaaaatctcagaatagcacgccatgttatgatgttttaaaacgagtgagaattttggatgttatgagttctggtagctgtttggtaacttagttttatattagaaaggttaagtagcatgcccgaggtcatacactgataaacatgaggccaatgattagatatgtctgacttcacattccacatatttccttacactgttttgcagtgtaaataggtggttaagaagataccaaagtagatctctggttcatcttctgagaagcagaactagaattctcctggctagcagttatccatctagtgcatatgtatctagagctggccaggcctttagtttacaaaataaatagaaagccttgtccccactctggaggagcttgctgccttgttagaaggtgagatatgttcgaatagaacatttggggaaaccatttgagacctggtataatgaagtgctaagattgtgggcaaggtggggaggaggtaggccttcctgactagtttaggctacaatagttgggaagactgcaagaagccagcaggcttcagtcatgccctaaaagagcgattggtttagaaaaaaaacaaaagggaactactaacatgtattctattctaggcaggtgtcaggcaaagttgtatcttattttggtctcactagwttcttgcaaagcttatctgcatatccaggttttataaaaggttaagaaactgaagctcctagaagtaaatgagcccttagttatcaaatattgtctgcattgtgcaacttcttttttagcccgtagtctttgttttcatactttagttttagagaattactccaaattcatcatgattgaagacaataaggagaacaaagaccattccttagaaaggggaagagcaagtctcattttttccttaaagaatgaagttggaggacttataaaagccctgaaaatctttcaggtaagcattttctgtatttttgcacagaattcttctagaaatgaatctctaaaactatatttaaaatatagggcaacatagcaagaccctatctcttaaaaaaaaacaaatttagctgggtgtggtggtggactcctgtagttccagctacctgggaggctggggtgggaggattgcttcagtccgggagtccagggttacagtgagtgagctatgatcacaccactgcactctagcctaggtatcagagtgagattttctctctatatatatatctatatttatatatagataaaatatataaatatataatttttatatattatatatataaattattgtaaactcttcagagatggagtacaaacatttgttaagaacttacatttctaaaatagtgctgaattctaacaagggatacaaacaatttacagaagaggagatacaaatagctacttcgagaaatgggggagaaaagattcactttatagattttagagaagcaaattttaattttatyytaataaaatattaaaattttatcaataymtaatcatatattattaattatatacttgagatttaatgatatagtcatagtatatttaatgatattattttcatgtagcaaagattctataatgacagtgtctcctattgtcagaacttcattgcattggaggtacattaccctccaatgcacctttggcacaaggataaatttgtgtaccatgtagggaaactatctggtaatatgtattatgagccttaaaatgttcatatttttgacccrtaattctaatttcataaatctgtcttaaaaatatggatcagtcaggcagaacacgaatatttattgagtccttactatgtgtcaggtaccacaccagacactaaggatgtggagctggacaaagtaaacacagtgcctgtcctcacagagtatgtaatctagtggggaaggcaacattaaacaaacaactgcagtaagtgaataatcactatgtgtaaagtgacatgaaacagaaataccagatattctgacagcattgaacttgggggacctaactgagtttaagggctcagggacacacaaagatttattgtttataggaactaaaaattataaataagccacttgtcctaatataggggatgttgaattgtgatagcagaacaccactgtggttaagctctggtctccagagacaggccacctggattcatatccttgctctgtcagttattacctgggtgatcgtgggcaaattgattaatctctccacacttcakgatttatgtccataaaatgagaactctacctacctcatagggtcattgtgagcattagtagagttaatatctctaaaatgcttaggatggtacagtacaaagtaagtgaacaatagatgttagctatgttaataatcatatgacatactattatatagctgtttgcaaagaatatttcaaagaattaaaaatcttaaatatagatagtctagaagagcttgtaatgaaaarcatcagttttcttacctaacacataccatattctcagtcccactccctagaggcaacctcttttaactatttctggtcgttmrtttttttggtggtgagtttatgaaatctaaacattgctcttatatgtcttttcaagttatcaacttcacactatattcatttactttctattatgaacaatgatactgataccacctccctcccttccctctcccagtccttccaaatctgatacttttattattacttttagctattctattgattacctttgggtctttaaataaaatacctgtatgtcttcttccatcarctttttttaaatttaatttttaatcgaagaataattgtgcatagcttaaaaacaactcaacctgtactataaaacatatttttaaaaaagtagtgttttgctccatctctcttcattccaaagttccatttaatttttttgcaaccttgtgtgcagaagcttgagttaatcacactcattaaatcacgtgtacactatcatygttgatttgtgcaacctcttcctgttttatttcattcttgaattctatctccatttctctcttctgatagagagctgctctcatgtttgatatgtacattgaattactttgtctgcactttagaatatgtagtctttgtgtgtgcgtatattagtaatttatataatcatattgtgctataaagattctttttcccatccagcactgtgtttttaagacctrtgcacgctgctgtgtgaacatctcattcattcttctaactgctacatggtgttctctgggtgtgtctccacctgcctagtggagacaacctagttatcccctgcctagtggaggcaaccattttcaactctttaaactatttttctaatatttacttccacacttataagttatatgcttattctgcttctacttcttgatttctagaattataggtaattatctattgattttcaacaatgaagtaaaaatttaggtttcttgacacaactccccttccgatggcctcttcaacttcttttccactcgtcttcccaatgtatttgtgtcccggtttttggctctgtcaatctttagtgtctttattattaagattatgtaaatattgtttgaagaagagccttagtatccacctttgtgactcttcctttcttgggcaacaggattacagcatagtgtttaagcacatggactgtggagctggacagactagatttgaattccggctctgacacttgtcacctgtgtgcttctggccaaactgcttaacctctctatgcctctgtttctgtaactgaaatgtctgatagggaatgtttcacttactacttctactttatctgaattttccagaccrtatttttcttccagatgaacttggaaattatttaattacatttcctcaccaaattccattgagattttaatttaggaatgattgacatttttgcatctttttttttctccaaagacatagtttagctttatatttattcaagtcatcatttagaaaatatttacaaatgcattattaatgtaaaaatttataagaaatagatgaaatgaaactcttctttacacctgatcaatcccaatatattttgtaactgacttctattgattctgtgataaattatatgttcccagataaaccctgcctattctaattttctaacatcctctatcactcactcctctttcttgttagctcatgttccctgataatatttttttttttttttttgagaaagggtctcactttgtcacccaggctggagtgcagtggcacaatcacagctcactgtagccttaacctcctggtctcaagtgaccctcccacctcagtatcccgagtagctgggactactggtgtgcgccactacgcctggctaatttattattttttgtagagacagggtcttgctatgtggtccaggctggtcctgaactcctgggctcaagtgattcttccaccttggcctcccaragtgttggaattacaggcgtgagccaccacgcctggcctattctatctattctttaagattcatttaagttcccacctgctccatgaaactttctactctctcttaagtcgtaatgcttttccctttgctgagcacctgcatccgaacactctttactttattttcttaatcttccatgtgttcaccaactagattctaaattcctttatgtcttccctttatattcttcgcagcccttacctagttacacaggtgttcattaagttattttaggatgcactggttagtattggagattatctgctctaaccttctcattkttttagatgaaaaaactatagggtgattagtgctcatgtttcattatcatgtccccagcactcttcctcagctacccaaattggtaagagaacataccctcctcccacacttatacacagagcacccccatcttaggctgacttgggagaggtcagaagaggagatctggttcagctgttactaagattgtagcttaagagatttgaggtattaaatactctgtgctcaagctgttcatctaatttaattaaatggatttttgaaagggaaactcttctttctccaggactaacattggtatcactttttgaaarctagcttttatttatgagaattttcaaaagattcctcttacccaggaaacttaataatattttgatttgaattctgattaattctgacatctgaaggacctctagtgtgtgttattttattggtttctggaggatgggatgaattttgaaaagttttctaatacataatttttaagaaggaattattttgttgttggcagcactaaaaacagtctttttccctttgctgttctgagaagtgtgaatctgatttttagtggtaattaaagtagcctgctcaaagactattaacatttgaggcagttacatgaaatcttttccctgtgctttacacaggagaagcatgtgaatctgttacatatcgagtcccgaaaatcaaaaagaagaaactcagaatttgagatttttgttgactgtgacatcaacagagaacaattgaatgatatttttcatctgctgaagtctcataccaatgttctctctgtgaatctaccagataattttactttgaaggaagatggtaagttcaaaatgtgaaaatactacttagaagatgaaacacctaatgtgtgtccagccttatatttatcttgaagacattaaaataataaaacacaagctctccaaattgcttacagtctgatagtgaagggaacacaaaatatagttgctccagataccaaagaaaaattataaagcaacatttgatcaagtgtaagagaaatgaaaaagaaaatcttgagtataagaaacagctgggtgtggtggctcatgcctgtaatccccgcactttggcaagccgaggcagactcacttgagtccaggagttcaggaccatcctgggcaacatggagagacccagtctgtgcaaaaaatacaaaaactagccaggtgtggtggcatgcatctatggtcccagctactctggaggctgaggtgggaggatcacctgagcccaggaggttgaggctgtagagctgagccgagattgtaccactgcactcccgtttgggtgacagaacaagaccctgtcaaaaaaaaaaaaagaaaggaaagagagaaagaaagaaagaaagaaaaaagaaagaaaaagaaagaaaagaaagaaagaaagaaaaagaaagacagacaatttggcataatcagaaattgataattgattatctctcaatttccaaatcatcaacatttcttgatttgacaaacctataattcacaatccctgagcacttagtaagtctcataagacttgtcatctagcagatagtaaatgaatatttaaatttgttgagaatgttgacagttgctcacaactatgaaatgacacacaatatgtatagcaggggactcgtccgtggcctgttaggaaccaggctgcacagcagcaggtgggcagcaggcccggcgatccttaccgcctgagctccgtctaggagcgtaaaccctattgtgaactgygagtgcgagggatctaggttgtgtgcttcttatgagaatccaatgcctgatgaaaccatctcccacctccccgtctttccttcttggaaaaattgtcttccacaaaaccactccctggtgccaaaaacaggaacaactgatgtacagcattccttccaaaagcaaatgggaaacaataaagccttttgaagtttcagatactcaggtagcaaagataaaggttaagatctctactggtaaaaaaaaaatccttggagttcactcgaggcaaaagacaaatagataatttaggtacattttatatatggtactcaatctaaaataatctcttcagattatgtccacartatttgaggtgtaatcaggactgctattcatctgctatgtgttcgtacagctatataattattaaaatactgatatatctccacttctggctggcagagagctacttccccaagtcccttgagggctcctcaccatgcctgaagcctctgttgctccagatactgtccccccaagaagtcccatacccatcattaacaactaaagggttaacaccttgcagagcagaagcctaggactctgctgatgtctattttgagtgattactgctccttttgtatttgttgttaaatcccttgaatatcactcctggatatgttagaaagagcaatatgctggggcaagaagagctgagttctagtcctctgtattccaaaaggagtgagttaccttggataaattacctctctggagtttgattacctcatctgtaaaatgcagaggtgtatagatgacgagatagttcagttgatatttagggtataccaaccttgtgacagatatttctactaaaaaatagggatacaaaaagatatagtctccaccctacagttgtttccagtctttcatgtaagacagacatataaacaggtacattataataaaacatagtaaaagcctttagagagaaacataacatcacaggaacccaggggacagataattagctgtacctacagggtgagggaaggctttgcggaatgagaagatctcattagatttgggtcttgaaggatgtgacggatattctcaggaaaacagaagggtagggtggggcagggaatgggagtggaatagctattccaggcagaaaagtagcatttataaaaccccatagtcttatgagggcttgcgtgtctgaggaatggtgagaagatcaaggtggcaaagacaaatgatttctaagatcttttccatcggcmaaaataaatgaagtttttattaagtttgtaccttggtctgtaaataaagttgtgcatctttattctgcttttgttgaataactaaatatgtagcttaagcatttttaaaactttcagtctgtttctaaagtacagtatttctccaaaacttagacatcaacctgaagactcaaaaaaaaattaaagctcagaaattttgaataaattttactttttagaaatagggcaatttacctaactcatataaatcttgccttgatgtacaagctaaaattaaaactctcatccaactgaatttaattttatcttctttattgtcttgtttaagattatctcttcaacttttactggtttttattttattttattttaaattttacaggtatggaaactgttccttggtttccaaagaagatttctgacctggaccattgtgccaacagagttctgatgtatggatctgaactagatgcagaccatcctgtaagtattttctttttttttaagagcaagtcttgctctgctgyccagactggagtgcagtggcacgatctcggcttactgcaacctctgcttcttgggttcaagtgattctcctgccttagcctcccaagtagctgggatcacaggtgcccacaaccacacccagctaatttttgtatttttagtagagatggggtttcaccatgttggccaggctggtctcaaactcctgacctcaggtgatccacctgccttggtctcccaaagtgctgggataacaggcataaactatcacccagtaagtatgtttaataaatatttttataaaaacaatttaaagcaaactaaaaattaagggcaacttttttagagaaagtgttttttctagactaaatgagacattgttttaatcaagatttcaacaagcgggccgggtgcagtggctcgcgcctgtaagcccagcactttgggaggccgatgcgggtggatcacgaggtcaggagatcgagatcatcctggctaacatagtgagacccygtctctactaaaaatacaaaaaaattagccgggcgtggtggcgggcgcctgtagtcccagctactcgggaggctgaagcaggagaatggcgtgaacctgggaggtggagcttgcagtgagccgagatcacacgaccgcactccagcctgggcaacagagtgagactctgtctcaaaaaaaaaaaaaaaaaaaaaaaaaagatttcaacaagtgttagtagacctccatattggtggaattgagactaactgcctgaaaaacatgtagcttcatttgttccaaaatatctgtcccatgcccagcattcctattattaagagctattcaaaaggttatactaaaacgaagacagcatctgcaatcagtttttatttaaatgagcatgggttattggaaagggagataaataaaagtgggccagagaaagacttgccccccacactgcccaccatgattggtttattaggcagttgatgaactaggaagttgtttcctgagaaaattgtacagtacaggcaagagttggagaattagtaaatctagagcatttctgggaggggaggagagaagagagtgcaattgtgaagttaaactgaccagagctttaatgtagcttctctcatgtgttagctgtgtgaatgtgacctttttatactaccttagacagccactagatgatctgtccaattattctataatcttattgaataactattgcaattaattgcagtacttgccggaaaggagcatgtagtctagttgaaaagctaaagcacacatatgtaaataaacacacacaagataaaatgtaaaaagtgcactaggtgaaaattttgcttcatgaaaaaattgcctcaaaatacacataagagagcaaacacttctagctgaagagatcagagaaaggcgacatttcaattgggccttaaaagatttcaggagataagagatggaaaggaagaacaattcaggagggaacaatatgagcaaaggttcagaggcaagaaaatctggggcatgtttatggaaaggtgagtacatcagttttactgatctactaagtcctgctgattttcacctcctaggtatttcttaaatgtgttccttattcatccctactaccacatcccttaaactggtctcccttcttttagccttgtcaccttcaaacacctcctccttatcctcattagaatgacctaaaacctcaatatgactattattcatcttctctcttaaaaatcaccaatggctcctaggtacatacttaaaagaattgaaaatatatgttcctacaaaaacatatacacaaatgattgtagcagccttattcataatagcaaaaaagtggaaacaacccaaacatccattaactgataaatggatgaagcatggtatatttatataagcaaatattattggccataaaaagagatggaatactggtatgtgctacaacatagatgaaccttgaaaacattatgatgaatgaaagaagctagtgacaaaaggtcccatattgtatgattccttttatatgaaatgtctagaatagaaaaatacatagaaatagacagtggattactggttgccaggagctgaggagggttggggtggagttggagagtgattgctaatgagcatggtgtttctttttgggtgacagaatctttctgaaattagatgatggagatggttgtttaactctgtgactatctaaaaaccactgaatggttattttatggtatgtgaattatacctcaataaagttatttaaaaaacaccagtgggttcccattacccaaggctaaactccaagctccttaatggacctttaatttgcagacaccaactagtttcaacatgctctgccttactctccaagtttgagcaacatggggttgcttatattttcttaggcacaacatgctgtttttgtttgtttgtttgtttgtttgttttaatcactgtgctatttccactcttcttttgtgtcttagctcgagagtcatcactgggaagccttccctgaaccmcacaatcgtcttaagtgtgcatgccgttctgtacaatatgatgagacatttattgtatcattttacaataacaggttcatgtaaactcctttaagccccagactgtgctttgttcatatctgtttttccagattttagcacaaatcatagtaaatctgtgctacctcatagatctgtattaaagagatgagtctcattctctcttttcagatgtccccttctttcccattatttgcatttttttctcctgggctttgatttttgatttttttttttttcaagatagagtctccctctattgcctaggctgggatgcagcagcaccatcatacctcactgcagcctagaattcctgggctgaagccatcctcctgcctcaccttcctgaggagctgggacaacaggcatgcaccatcacacttggctagttataattgttattttaaattttttttgtacagacagggtctccctttgttgcccaggctggtctcaaactcctgggctcaagtgattctccttcgtaggtctcccaaagtgttgagattacaggcctgagccaccatgctcagccattttgtctaaaaaaattttttttcatgagtataaattctaatgttactattttgtctgctttttaaatcatcattgtttctgcaaatggcaaatatatttgcattttgtgataaaatctaaggctagattcagttaagtcactatttcaaatattaattactttttattattaattactattacaggtaaatataacaagatatagtcaaatgattaaggaaaaaamccctcacccttggaaaagagccatgtatttaactgggatggtggtttacttattctttaaactgttttatctttgtaggcacaattccatctttgtatccattatatcttttatctttgtagctactggagtataaagctgtcatgtaacattgactttaaaataaaaatgatcataaatctctaaataatgcttgctcatagtatcaattatgtagccctttaatataatagctctagtaataatgaaatgtttcccaaatatcatttgtcaagtattttttagtatggatatttaaaaacatatctttaattatcagggcttcaaagacaatgtctaccgtaaacgtcgaaagtattttgcggacttggctatgaactataaacagtaagtatatttaaaaaaatatagtcaactttgagataataaaataagtgaatagaataaattgtgttyatttggtaagtagaaagtgaaataagtgccactatttattaaatgctaattcaaaacaactccttccctttatctcattagtggagaccccattccaaaggttgaattcactgaagaggagattaagacctggggaaccgtattccaagagctcaacaaactctacccaacccatgcttgcagagagtatctcaaaaacttacctttgctttctaaatattgtggatatcgggaggataatatcccacaattggaagatgtctccaactttttaaaaggtaataagctaattaattttttgtaagggagttgctgaactctgttttgatcatgacagcattttttttttttttttttttttgagacagagtctctctttctgttgcccaggctggagtacagtgatgccatcttggctcactgcagcctctgtcactgcagcctctgcctcctgggttcaagcgattctcttgccatggcctcccaaagtgctgggactacaggcacctgccaccacaccctgctaatttttgtatttttagtagggatggggtttcsccatgttggccaggctggtcttgaacttctgacctcaagtgatccaccctcctcagcctcccaaagtgctggaattacaggcgtgagccaccacacccgacaatgacagcatttttaataggggaataaagcgtagtgatatgggaggtcagaattttcccgtactctgtcctggtgtattggatccaggattgggcaccacattgaaggataatcataacctgcagccaaggtagaggaaagtgagcagaattataaggggatttgaaattgcatcacatataaaatttgaagaactcttagggtgtttaacctagagatttaggggctgttatagctttatttaaatatttgaaagccatctttataacagagggattactgtgcgactctaaagtaaaggactgttggatagaaacttcaagcttttggcctagaatagagaatatcttgttaaagagtgatttgaaaatagaataggctgatgagatggttagttcctcatccgtgggggtgttcatgcaaaagctccacacccattatttggtagaggagattcaaacatcttggagaaggttgaagacattttccacattaagattttataattttagcaagaaaaaagatggtgctagtagaggcataaacaaagggtaaggacaattttgttccttttagttctttatatttgtttgrtccaggcctctttacttttttctagctagtataggaagtaaaatgatcagtgatctatcttcaagggtttacaatatttaagaagtataaattttcccttttatctcagtagataatctcagcagattaccatagtggagaaaacaaagcagttatgctgtgactcaagagagtttagtttatttccatcgtggtctgaaattgctgtctttgagtttctctcatagacttaaaaaaatctacatatctatttaactccttaacagtattcaacaactatacacaaaactagaagaaataaacaggaaagagcaatacagtttctacaagggaagaaattatgtaagtggtttctataaaaactaaacttttgagaaatagtgattaaggatgatagagaaccaatgcacataacattgctggacttacaaagatggacaaatatatgctacggaagttgtaacatcaaatttgcatgagatttggaggaaacgctttgtaatgcacacaaaactgaaagctgatctcttagggtctggagcstgggctggctgcagaatgtgctgctgaaaatgcttcaaggtcaaataccaaagagaaatcaaaactaacagaaagttcaagcaaaagttggaaggggatatctgcactattaaatatggtagacactagaaacatttggttgtttaaaatttaaataactaaaataaatgtaaatcaagagtttggttcctcagtcacactaaccacatttcaaatgctcaatggctacatgtggctagtagttgccttaccggacagcacagatatggaacatttctatcactatggaaatttttaccggacagtgcagtctgcccatcagaatgggagcatccaaatacaacacagctggatggaagtggaataccagagttgtgagggtttggaatgaaggccaagattagggcttacaggggtctcctgaaccactgaatcctagtggcaggcctcttttacagtatgcatgcagtcttggctgttgggagatggaagggcactatccagtttagataaaagaaagggactactttacaagagatggtactggctaaaaatggcacagcttcaaaaatcgttctgatttaaatgaatacatcttgttaatgattttttacaaaaagaagattatctaggagatagtataaccccttaagggagacagcaaggtgttgtatggcatgaggaaatctgagttttcattctgcctttatcaactaatgtgtggacttgggcacattattgagtctctgagcctccatttcatagttgtcacaataaggagaaacatccttaagtcatgctgtaaatgtgaaaggagatgtgatatgtaaaaggtctaactcattgcctggccatagcaagtgcttaataataattagttccccttaatatgcatatgataaattatagtttccatgccttccatcaacgtgttacttggtgccactagcagaactaaaatgctgcagtcaggggtctattctggtaaagattttctttgttttctcctttgctttgcagagcgtacaggtttttccatccgtcctgtggctggttacttatcaccaagagatttyttatcaggtttagcctttcgagtttttcactgcactcaatatgtgagacacagttcagatcccttytataccccagagccgtaagtacttytrtttcagccaggaattcatcaaatggttatttataataatggcatctaccytatgggktcttttttttttttttttttttttttggtgtgcgaggattaaataaattagcacatgtgaagcatttagaatggtacctggcatgaaatacatgttccatgctctatatgtgttagccattatgattattaattgacaacctattaggtgmtagctgctattctgagcatagggaatgtaacactgaaaaaaatcagacacaaatttctgcctgcataaagcttgtattccagtgggggaaacagataataaacaaacaagtaaatgtatgcaaatgttgcatcgagtggtgttgagtcccatggagaaaaataaagctgaraaagggggatggaggaaagtgtaggtgggtgggagtgtgtgtgtgtgttgctgttttgaaaagggtgatcagggaaggccttgctgagaaggtgatatctgagcagagatctgatttgggtgtgtatgtggtggggttgggtgttgggggttgtggttttgggagtggcatgtggatgtccataggtatctgatgtgcacttatatgtgtgagtctgagtggccaaggttttgaaccaaaattgtttctttatttgattagtgtcctttgtgatccattactaaagtattatcacccgatcattagaataaaatattggatttcgatttgattgaatggttgattataaacgtatgttaagcactgcagcgtgacaaacttgtacctctmtttcagagatacctgccatgaactcttaggtcatgtcccgcttttggctgaacctagttttgcccaattctcccaagaaattggcttggcttctcttggcgcttcagaggaggctgttcaaaaactggcaacggtataaatctggaattagctatattttcacctggggtagggtgtatgagtatctgtgtagtttaaaagtacatattcagaatgaccattagaaaatttgtctttgcttggaggttgcagtgrgccgagattgtgccactgcactccagcctgggcaacagagagagactctgtcagaaaagaaaagaaaagagaggaaaggataaaaaagagaaaagaaagagaagagaagagtaaagaaaggaaaagaaaatttgtttttgctcataatctttaattcaaataacattaaagaaggatgtaaaattttaaggtttatcaaaaggagacatgagctttaaaaaaggtagagaaaaacaagattacaataataggttatctatcttttattttccaataaaaaggataggtttccttaaaattatgctaaagtgtttttgagtactaggtacaagacactgtgctggaaatacaaagatgagtaaggcctggtttctacctttaaggagcttatatactgtttgaggagacagttatgtcaaatgagatagcctatagcaaagttcacattgctctgggagcatagagaacctggggaaggtttcctgggagaaggacatctggattagytgatggaaaatgagtgatgtgctcagcaaggaaggaagaaatgcatctcaggatgagggcacacaaggaaagacaaggtggtgcttggtgtgtctggggaaacagcaagaagctggagcagagtgtccaagagtgagggaggcagcgtgaaatagaatagtgcttctaaaactgtggtttggggacctctggggtccctgagactcttttatggggtccttgaggtcaaaatcatgcctagataaaagatccattcaaagcacacagtggattttaatgtaacaggcagttcattgacataattcagattccacattgccgttgaacttttgagaaactctatccacttgttgagtcttcatgcagagtaaaaggagaatatccacaactatccaaaaagactgttaagatattcaatgcttttctaactagataaccgcatgaagctgatgtaactcatgtactcaaacagtatatcccaaaaggttaactacagaagcagacaygagactccatctgtcttctagccagacattaaaaaggtttataacattgtgaaacaatgctacttttcttagttttttgttttgtataatatagttatttgtattaaaacattctttgttaccataaaatgagtttattaaattttaaaatgaattagcaagcattttcctctcagttttaatttttaatatggctaatatagctagtgataacctacacatacacgcacaacaaaagctttggggtcctctaatttttaatagtacgtaaaagtcatcagaacagaagtttgagaagtactggtttagaatgaggtcagattgtagaaagacttgtgaactagactgggattttggactttattctagggtattttgggtcagtgactaagaattgtaatttgttttaagttgaattcgtcagtgtgtgagaataatattgatgttcttttgcagtgctactttttcactgtggagtttggtctatgtaaacaagatggacagctaagagtctttggtgctggcttactttcttctatcagtgaactcaaagtaagagttgcaaatctttgtatataaccatattcacctaacataattgataaaacctgaaatagtttttgcttttgaacaagagcttactatggaacatacttggggatgtcactaatcattacctgaatgtatttttctctatttcccaattatatattatatcatataatccaaatatgtgtgtgtgtatatgtdtagatagatagatagataaaataagaattttataagggcatttatggggaacagcaagctacttcttttgctggagtatactgtgggttgaatagagctgtggaaaataagtttggaattgtaggttggagccattgcattagtaatacacacacacatgaaatattttgatatatttctgatatatatgaaatggtatgtgtatattttaagtaaaaactgttttaaaatctttgcttacaaagtcttgctgtttcctcatcatttctgatatgctagcaataacttctataatttctagggaattctttgagatttattatttattcaatgaataaataaactcaagtttgttgagtaatgaatgtgtatgaaacaccatccaaggtactgtcttgctttcagggagcacttgatggtgggtatataagtcatacataggaataactagtgttgggtagaaagtaggtgccataatacaggaataaataaataaagatccttgggtgccttttacacaaagaagagaggaagaacaaagccatggagaggatcttgggggtatttacagggaagggcaagccatttyttttgctkgagtgtactgtgggttgaatagagctataggaaataagtttggaattgtagattggggccattgcattagtaatatgtttagaggtgagccaattatggaagttgcatgatctatgaaaaatagatattattctttgattcactgactctttgtcttctagcatgcactttctggacatgccaaagtaaagccctttgatcccaagattacctgcaaacaggaatgtcttatcacaacttttcaagatgtctactttgtatctgaaagttttgaagatgcaaaggagaagatgaggtacagtatatcttcttcacgccttcattttcttcagggaragatcagccccattatggtaacaagtcacagaagtaagcagctagataatttgaagcccacaaggagccttctgtctgtaacacatcttcctttcataacaagtatctagagtatgttgtatataaggattttgcatagttgcaaatatgaatcagatacattgagaaattgttttctttccaattcttccagtcagagagtttagtagtctaatagggaaaatagatgatatgcaaattactgtataacaacatggaaaatgacaagagccttggagagatacagatgaaacattgttctgcattttattcaagagcaattcatttcaggtggacaaacagggtaaccttaatgttatttgagaaaggacttgaaggataggtaatatttagatatattaagttttagactgagagttagcatgaaaaaaggtcaggatgttgagaaatataggagatatgtacaatgtaatcaaagctacgctttattaatcagctaagtgtgtggttaagaaaggaggatattggaggcagagaaactttttagaagattcttggaacacttcaggcgaaaataaatgcctgaactaagacagaagtagtaggaaaagaaaagacttttgaaggagaatcaatgagacaacatttagtggaagcagtcatgaggtcacattgtgatgatggagatcgataggggttgaagtcatagtccttgtctttcagagaaaccattagttggggagttaggccattcatgaaaccaaataataatactagcagggattcctctagcataaatgtcaactttttagaaaagggggtcccctctgtagaccaggtggattatgagttggatttcagctgctactgatgtatagttgtcctcagcttcacatttatccctaggagtcctggacatgattgttcctgggggtgccaaatgagaggttcaaacagtgatttgataaaggaggcagaactttaatgcttgaaaaaggggcagaatttaggtcatttgaaaggggcctagagggaaacattctaagcagaaaaaatctaacatgtgcaggaggtaggaccattcctagtctattttggggtgtgtgagtatgtgtgtgtgtgtgttatatgttatataaacacacaggttacatatgtgagtaggtakagttatataaggcatgactgagggatctgttactatgtggttaagtgttgtaatgaaacagttttacgtctactgataaaactacagtagttggtctccttactgtagtcaagagatgtatacagtaataaatgattaagaaatccatctatgggatctttccctagtaataccagggatttacaactactttataatgtaaagtacttataactattttataactacttcaggtttcccacttgtgtgggattccaggggacctctgcaaatgtagtgtagagaagtaggtcagattggttgtacacatatctaacaagaatttgttttttgcctagtatgtgaaatatattctgttgtttgtttagttttcatcattcactccctagaaattgattgtctcctatttgttttcttaaatagagaatttaccaaaacaattaagcgtccatttggagtgaagtataatccatatacacggagtattcagatcctgaaagacaccaagagcataaccagtgccatgaatgagctgcagcatgatctcgatgttgtcagtgatgcccttgctaaggtcagcaggaagccgagtatctaacagtagccagtcatccaggaacatttgagcatcaattcggaggtctgggccatctcttgctttccttgaacacctgatcctggagggacagcatcttctggccaaacaatattatcgaattccactacttaaggaatcactagtctttgaaaatttgtacctggatattctatttaccacttatttttttgtttagttttatttctttttttttttggtagcagctttaatgagacaatttatataccatacaagccactgaccacccatttttaatagagaagttgtttgacccaatagatagatctaatctcagcctaactctattttccccaatcctccttgagtaaaatgaccctttaggatcgcttagaataacttgaggagtattatggcgctgactcatattgttacctaagatccccttatttctaaagtatctgttacttattgctgaatttgtgccaagctcaatcacattcacactaaaatttaacaggagaccctgctgtctttgttgctagcatgagcaaaagtatagaggcctttgcacatggaggatacctagtaaagagcaagtagtctagtttcaagtgtagtatcttgtagggaaatgggagtagctaagcctggaaaggttgaatggggcataatcattaagactaggctaaaaattcgagactttattttttaggcattagggagccccttcccaagtgactatcttccttgaaactttgttttytttcaatgacatcacacgatactggttttattctggactatctatcctactcatgggtccaagggaaacttagtagagatgcgacttgcatggggctgtactcagacatgtggtcctaggtattataatgggattgtccccagattaacaggaagcattgttatcaaaggaagagttcaaactgagatagataagagaagcacaaagtaaaagatagaaaaaacagtgctgagtactttatttctaaggtataaggtgaggccataaacagaaaggtatgcaatgagagtagaggctgcagaaaaggggaggaaatagaatgtcagaaaggtcaagaagagtggtttaggactgagactgtaagtaatgtaaggattgccaaggaatggtttttatgcagagtcagctgtgtagcacagggagtaagcagtcctgttataaatgggtgaagctgaactccaaaatacaaacttatgtctctttaatttgcccctttcctccctctagtcactaaatgaagatgttcttcaagtttctgtctttgcacttctactctttttgccatctcttcatggggaatgtcacccagatacatgacttcagttcttattttgaatgactcctctatttgcagttataaccctgacatctttcttgaatttttttgccccttaattccaacgaactcctggatgtctatgtagatgtctcataatttaggccaatgctgtacaacttcatgtggcatcatccacatagaatgaataggggttgttcaatatgacagccctgccaagcatctcaaattgaacaggtctataaaggaactcagaatcacttgaatatcacagtccatcagcttcctttcccagtaatttaatttccattaatggtatattaaacatcgtattttcaatcatttttaggtttagtcagctacttaaaaataggctttttcttcacataaataaattgtataccatttaatgtgttttatttcaacagactaatagatcttttaacacttcttagtcctcaaaataaattattaaaaactttgtatttcatgtcatattatataaggaaatagaattttgaagaataattcatgctgttttaaatttttacattgtacattttaatagctaatcaactcttaagtatacatttgatggtaaatagatgctagctaatctagaatcatttgaartattgattatctgatttatagtttggttgcaaggaaatctactgtaagcaaatcataatagatagcaaatcttagaacatgtagaaaaaaagaaattaaaaaaagcaaatcttagaacatgtagaaaaaggaaattaaaaaatagatagcaaataacacaaattatgcatactatatrtggttattttcatacaactttgataacggtgaagaatcatacttattgaattttaaaatgatgatgtttaaaatcactctatgactaaagcacatgagaataaatgttaaaggcacagccttataatccacaacttcagaacaatggaatttttttttttttttttttttttttttgagacggagtcttgctctgtcgcccaggctggagtgcagtggtgcgatcttggctcactgcaagctccacctcccaggttcacggcattctcctgcctctgtctcctgagtagctgggactacaggcgcccgccaccacgtccggctcattttttgtatttttagtagagacaaggtttcaccgtgttagccaggatggtttcaatctcctgacattgtgatctgcccacctcggcctcccaaagtgctgggattacaggcgtgagccactgcacccggccaaacattggaaatttttaatgatggatttcagttcttctcacctctgggtatttgtaatatttggtaaatcaggagtcctgagagtcttagaattttcatgcattttaaatatatgtcttcaaagcacctaggaatatgtaaatagttacccaaatgtgagaacagaattgaactaaaagcttcgtttataatttttttttttttttgagacagagtctcactctgttgcccaggctggagcgcagttgcgtgatttcagctcgctgcaacctgggactgcaggcgtgcttcaccatgccccgctaatttttgtttttttagtagagatggggtttcgccatgttggccaggctggtctcgaacttctgaccgcaggtgatccatccgcctcggcctcccaaagtgctgggattacaagcatgagccaccatgcccagccggttaataattcttaatcagtaaatcattattcaaagacatagttaatatcttcatgacttcttaaggatgctcaaaagctggtcttcagaatacctacatttctttatctacatattctgtcatttggagttatacaagtagtaatgacacaccaaaatgtaaataattattgttagcttttaagttggcttccaaattcaaaaaagaaaaaaatcctgaattctctaaaggaacatatgatagagtccatatgttaattcataggaagtgtttaaggtactatggtctattttggtctaatctttgttttactatgtaatatatatttatgatttacaagtttgttattcagtgggataataaatgaacacaaaatttatgttctcaaccaatgtttactttttttcaaacatacgttaaaaatttatttaaagttacattagcaattttattagtttaggaaatccattgtatctttatacttcttaaaaagcctatggatatgagatagaagccaaacatatctggaacctggtaaccacttttcagagttcttcgtaaagtctgtgttatgttcctgtcaacgaaaagagtcaaacacagtaaagtatttgaagagccaaatatgagtgaccatggcccatgacacagcccttaggagaccctgagaacatgtgcccaaggtagtcagggtacagcttggttttatacattttagggagacatgagacttcagtcaaatacatttataagatacactggctcagtccagaaagctgggataattcaaagtgttgggtgggaggtttccagattataggtagttttaaaatttttctaattggcaattcatagaaaggaatgtctgggttgctgtatgagtttgtggagaccagagttttatcatgcagatgaagcctccagatggcaggcttccaagagaacagactgtcaatttttcttatcagacttaaggtctgtgttgatgttaatgctggagaggtataaggaggcatgtgcgtgaccccacttccagtcatggcctgaatcagtgtttcgggttacattttagagtgccctggcctagaagaaagtccattcagatggttggggggggccttagaattttatttttggtttacactcctcatctgtaaaatgaactaagtctactacactagattattggagaagttatgctgcaagaggactttgtaaaaaaaaaaaactcattttccacatgtaaagaattactaatacaatcactctcttaacagatattcccccttagcttctagatgattttatcttccacaagagggtattaatttttgcttctagtaggcagtatataatggcatggtaaagtctgagtccaattagggattgagccaaagagaagttgagcttcagtctttgtgagggctggtctatttccagttcaccttgacttttagggtgtagccctttagggatctcaagagaaaactatgagtgtgtaccagggcttctccttgggggctctggactactacttttgtcccctccttcatgtccaccattccctcctcccatccctaccctatgagattgctaaaggtactgctcagcttcttagttgttgatttcagcccagtttcttagcctccaagacattgcttagtaattagcaagtgcttcaagcagaaaagtagtgccaaatataatctctcagcttccagatcttggcccttcaagttcttcctgctttgatagctctccaataacttgaaatatattttaaaaatattttgtcaaattttctagttgtttttttatgagagaataggtatgcagctagctaatcttcctttatcaaaagtagaaaactgaccttgaagtaaataactactttgagcctcagttttctcatctataaaacaatgatcctggccaggcaaggtggctcacacctgtagccctagctacttgggaggctgaggcaggaggatcacttgagcccaggaggtagaggctgcagtgagccattatcatgccacctgcactccagcctgggcaacagagggagaccctgcctcaaaaaaacaaaataagataaaataataatcctaacagcacttatcatactagtattattgggatgatcacaaaaaataatccaacgggaaaaaatttcctaaccttcatggtacagagatgcaatctgtatgttctcaaatactttatactttcctcttttggggagataagccatctgaaagtgaagccattagatggtttaaatctagtcccattcaagaactgcaattcagccaggctgctcatgggaagaactaggcagtggcgagtacatagttgaaatagttgcaacatctcaacacttccaataaattgtattaagggatatgacatgataatataactgtaggttagttaaaatattgatgcttgtacattcaaggggtggagtcagaaaacaactatattctcccagaccttctctctattaaaactggctctgtaggtagttcttccttgcccttctggatgaaatctcaggttgctgcctgactttctgcttgctcacaggtaataaaaagtccttagctcctaatttccatttctctctctctctctctctctctctctctctctctctctcacacacacacacacacacacacactctctctctctctctctctttctcatttcaatatttaaaaaggctagtcctgtggaaaaactttgataaaacaaactttaaggttgaagcttttttcctcctccagaactgagaaaggagtgggtgtgcttagtttcttaatttccttgtctcttgttactcagtggatgcctgggactcctccagggttggggagatgtagaggggaggagaggtaaggaggagaaaagttctttttggtctgatactgttgtgaattgtcatcagtgctttctgtactttgtaaatattacatgctgacattttcttgtgggcattttggaagaccttcccaccttcttatttcttgggatttcttgatgtaggtaaatgtatctctctgggctgttaaattcatttccctcaccctcaaggaatctagtgatcgactgtcctgtgggtgtcacttcacccttccagaaattctcttggacaaggtctaagaccatcccccagccagtttgctcaggtatgggaaatactcacatgggaaatggacagtttttattttgaaaaactgtgggtgtgaaagacctccccaaagcatcagtttgtctttgctcagctattagagcagatatccagccacaagcccttgtatttctcagaacggattggacagaagcctgtctgggtcctaaatctagagggatgcataccaagctctctcagggacccaggtaaagtaactttccttagacctgagatgggttgagacccacaccacattgataattgtggccacatatcctactagaattctctctggcctctcaacctttttcgtagactgaaagtcatacactggtttctagacagttgctttgcaagacctgctttggtggtcttgaaccttactttatgatataggagtaactggcacttgttgctcagccaaaactgagcggtgaaggatcccatttttacatcctgttacacatgcttcaaagaaatggtcagcacaaaaaagcccactcataagacagtcagtaagcatggtatagctcctgcacattcagatccctagagaatgaagagctgttttatctctccaaagtttgcttttttcttggtatggtcatcgacgttctccagatgccacaggttggagagataaaggtgaggggctgccctcaagtggtcttacaggcagaaactcctaaaagtggatggagtgaaagaacaggaaaggacagtgtaagagctcattggagacacttcccagaagcccaggggtgaagggcagtgagtgctggaggcccgtgtcagcagaggggccaagtgctaccgaatgtgaatgtggatgatcatctttaatgtgaccctatgtgttctgtattcccggtacgcggtgccatattttccttcagataaattgaacttaattaactcccatcagcaacacgacgctgtctgagaaaagccattttatatggaaatgttcgttgggtgacgattatccagtattattaatagaatgagctcagggccgtgcccggagcgccgaggctgccccggcaggagtcgacgctaaccagcctcccccattcagcgtcgcgaggcgcgggttcccgctccgtgccaggtgcagagggcgacaccggcgacgtgccactccactcgcctcccaaggcgccccctcagatgtttgcgaacgcacaccaaagcgggctcaagacaattgcgcctgagacgccgggcaggaccctgccctacccctcaggctccatttcctgttcccgcaaatggtgatgccatcgctgccctgtcagcccctctgggctgtcgtgggcctccaaggagacaaaaacgcgaaggagctttgtgaactgtggcgcgcagtgcacctgcatgaaacatgaaattatgactaaaaataaagagtacgagggggtaggagcgagaggctgagaggcccagcgagacaggaggctgcgggcggagacgctgcgagcgccgccggggcgggctgactgggaggcggctccggggctgtcgtccggccccgcccaccactgatccccagtggcccgagggcccggccgcaccctctctcccggccygcgggccgcttcccaccacagaccccgccccgcgccctacccatcacgcgtccccggtccggctccggcgctcacctacccccggcaggcgccgcccccg

SEQ ID NO: 93254 - DNA, 75426 bp, Homo sapiens
  misc_feature (1)...(75426): n = A,T,C or G
nnnnnnnnnnnnnnnnnnnnnnnnnnnnnnnnnnnnnnnnnnnnnnnnnnnnnnnnnnnnnnnnnnnnnnnnnnnnnnnnnnnnnnnnnnnnnnnnnnnnnnnnnnnnnnnnnnnnnnnnnnnnnnnnnnnnnnnnnnnnnnnnnnnnnnnnnnnnnnnnnnnnnnnnnnnnnnnnnnnnnnnnnnnnnnnnnnnnnnnnnnnnnnnnnnnnnnnnnnnnnnnnnnnnnnnnnnnnnnnnnnnnnnnnnnnnnnnnnnnnnnnnnnnnnnnnnnnnnnnnnnnnnnnnnnnnnnnnnnnnnnnnnnnnnnnnnnnnnnnnnnnnnnnnnnnnnnnnnnnnnnnnnnnnnnnnnnnnnnnnnnnnnnnnnnnnnnnnnnnnnnnnnnnnnnnnnnnnnnnnnnnnnnnnnnnnnnnnnnnnnnnnnnnnnnnnnnnnnnnnnnnnnnnnnnnnnnnnnnnnnnnnnnnnnnnnnnnnnnnnnnnnnnnnnnnnnnnnnnnnnnnnnnnnnnnnnnnnnnnnnnnnnnnnnnnnnnnnnnnnnnnnnnnnnnnnnnnnnnaatccttgagatacggcacttgggcactattcctatacccctaaaaggattacctttgctgatttaggtaaggggataatatccagcttttgctgagagattccaccacaattaggttcatgaattcccatttgctcatttactctaacgatgagactaaggtccctggctgcataaatcctaaaggtctaacatcaggaaaacctcctgaagacttgctcttagagctaagtgctagaactacctcacattttttatggaagtgaatagggaaaaaggagaaaagggccaggtgcagtggctcatgcctgtaatcccagcactttgggaggccaaggcaggcagatcaccaagtcaggagttcaagaccagcctggccagcatggtgacaccccatctccactaaaaatacaaaaaaattagctgggtgtggtggcgtgcacctgtaatcccagctactcaggaggctggggcaggagaattgtttgagcccaggaggcagaggttgcagtaagctgagatcacaccattgcactccagcctgggtgacagggcgagactctgtctcaaaaaacaaacaaacaaacaaacaaaaaacaaaatgagaaaagaaaggagggaatggaaagaaagtagtataagcttgcaaaaaaaaaaagtgacatactttgctacttcagatatactagtctgtttcttcccctctgagatacttatttcagcattcaacaaaaatttattgagtacctactatgtaccaggcattgtcctggacacttaagatatatcaatgagcctaacggatgcagatgccctgtggaccttgtattccagtgggaaaaaaacagatatttaacagatattaaagggtgaacatacaaaatagataaactacctaatctatagctcgtaaataaatttattaatatagaatatatgtcataagaaatatataaaatatgagatagatattataacatagtttataaagaaattatccagtacattagaaggtaaaatgtgtcattataaaagaaaaggagagattgggactcctgaagggaacgggagaaggcaggctctgacgtattaggtagagaggtcaggggaggcctcaatgagaaaatgacagtggagcaaaaacttgaaggatataaaggcattagttctatgtaacagattgtttctttttggcatcccaaatgatcagaaccaaatttgaggttcaagcacagtactctagaggcccctgtggtctgtacgtttgtaatcttttgtcctcgagaggcaggataggacagtggttaagggtatcggttccactgtcaacctggattcaaatactgcctctaccacttaccagctacgtgacttagggcatcatatttcatttctcccaacctgagagaaatgcctccctatgcttcaaaatgaagataataatagtacttacctcacatggctcttttaaggattaaatgaaataatgtacacaaattcctttgcacacaagaataaactcaataaaaaaacagctgtgattattgagctttggtcatgtcactcaacgtttatttacattttctttggtcctgattctttatcctcattgatattttaacattgttttatggatcctgctcctttggtaagctacttcaaatcctttgtggattggggtaagttataagtaagtaaataaatacataaataaaaatctggatagggggacattttcactgaagcaaagcatttcattaccaagacagtgaattgcaagtgggccaaaagcaagaaagatggactctaatctctaacagtccaccaagaaccaccagtaaaacactctctggtttctcagaccatctttttctccccatctcctctttcttaaatccctcttcttccctctatcatgaaagggtaaatgagttacacaaaacggctcaagaagactcctaagtcgtcacaacctcacaactatttcattgccatgggcctcacaggactcttcctcatcagagaagagaaaggaaatcaaagcagtcactttccgtgtgttggcagggtgctggttaagtgaacagagtcagacataagctagaatctcgtttagtgagctctgtggccttgggaaagcccctggacctttctgtgcctcctattcctccttggtaatagcagtccctcctaaggtgttttggcagatcaaacgagagaatgcagggaagcaacgtggatagcttatttttaaagccctcagaaaatgctagatttccttcctgaactgcaccctggggtaacactcttcaataagagggtgtatagggtggaaacagggtgaggagactagtttaggtatatccctatctgacagaaactcaatacaagaaacaaaaggagaaagatctttgttgttgctgttgccttactactttctagaggtattgtcatacttcttccttcccatagccctttaagatgggcattattatccacatgtgacagctggggctgggctttgaacccagagcacacagctaggaatgtttgcgaggcaccgctagctttccgaagttgcctttacaagggcagccattagcctccaccacaggacatcagaggcagcactgacaggaacctgtgaggccccagtgcacctggagtaccatgactctgtgacccctgagctggggacatcaagaatctgggccaggctgatgccactgaagctctctaagccctactttctccccttccttccatcagcccaaagggctttcatgttaaggcatccctgcttctgtgaccacgtgctatggaactggctagatctgaatttgaaacacacacctcttaagtgaccttaagtaactcacttattccttctgcttcctctactgaaattggggatgtcaaaaggcctacctcccacagatgtcatgaagattcaatagagcagtgccttgagaaaacacaaaacactacctggcacatactaaagtgcccatgtatagtagctgctattgttcaactgatgcagcctggagaaatcagcctcatgccgaaccatggtgatgatgctctcggggggtagggagcaggtcctggcgtacaggctgaaatgtctactcacacttccacacaacccaagcagtatggcctttttacccaatatataatcctcccccaccccacaggaaactccttgagggcaacacagggacctaattgggtctaggtctctaggtcttttcctagggggaaaaaaaaaaaaaaaagaccaattgaggcccagcctagggcctcccaatcagtgccgttgatccacaaacatgtgctgatgggcccttctgtgctgggaactggggaaagggaagacaccccgccctactttccaggagttcatagtgcacctggggaaaaagagaaggaaccactatcacagcagacagaaagtaatgagagctgagtgtccctggaaatgtggggagaaggaggtggtatttaagctggaccttaaacattagtcaagacatgggagggatggcattccagactgaacagggacaacgtgaacaaaggcctagagacaggaaaacacagggtttgtttaaaaaacagattagtgaggtgaggctgaaggattgggatgggaggggattgagatgggagctggcaatgaagccagtgagcctcaggggcagggaacagaaataaaagtcatagctgcatggagaaaatgaggagggagggccagcaactttaaacaggatagttacagcaattatcttagaagcgacacattgagcctgggcagggtggctcacgcctgtaatcccagcactttgggaggccaagacgggcggatcatgaggtcaagagttcgagaccagcccggccaacatggcgaaaccccgtctcaactaaaaatacaaaaattagctgggcatgstggcgggcgcctgtagtcccagctactcggaaggctgagacaggagaatcgcttgaacccaggaggcaggggttgcagtgagctgagatggagccactgcactccagcctggacgacagagcaagactccgtctcgggggcgggggggtggggggagtgacactttgaagaggtaaaggagtagccgtgtgactatcagagggaagagtttccaggcagacagaccagcagtgcaaaggtcctgaggccacagggctgccacgccgatgatgcattaaaaaggccaatgtgactggagcgtgggagaagggggagggtggtagaaagagaggttaaagagctaaaaaggagccagttcctgaagggctttgcaggtcatgaggggcctttaactttcccttggatgaaatggagtgctagtgtaggatttccagtaaaggaacgacgtgctctgacttaaattttaaaggatcgccttgactgctgtgtagagaatcagctgcagggggccaagggtggaagctgggagaccagtaaagagactataatggaaatcccggggggcgggggtggatggtggctggaaccagggtggtagctacgtggtggctcgcctctgattccccgtgtaaaaaatggagtttaggatccctgccctgtgtgcagcccacagcctcaagcccccatggggatggaatgccggaaacctctggccagcgcactagcagcctggagaatacggaagattgtggcaggattgtggggcacatgggcagctccctgctcgtccgggcccctggtgcccacgagaaaaccaaaacaggtgcgtgccccgcgccgcacgtcaggagggcaagactcagtggagggaggggctgtccactcgctctagctccccagaggctgaacagggagaactgggaaaaaggacgcctcctcagcgtcctagaacgagtcctcggcacctggtattgcatgcgccctagtatggggccgctccacttgcgcaggtgttggcaacatgcggggagcgccacggcatgcccccaatgagccgactccctcccccaactctgccccctttgtctcgctggcccctactccttctgtctgcctgtctgtcccgtcccaggttcagcgcgcacggccctgccggggtccctctggcagttgccgtagccgcgcggcccgacccggggctcccaagaggagaaaaaatcatgaatgaaatggatgcgctgctcccactcctccgccctccttgtccaagcaaccttggcatgggggcgacgactgcggagactccgcgcagagttgctcgggagagggaggcacctgagatgaggtcaggggttaagggtctgtgatccggcccccttcgtgccccgggagcaggccgctctcccggtcccccgccccgccagccctgcgcaattcccggcgagcggcggaagcccgcccgggggcggggcggagccggggctggggggtgccaaacccacccggcggctgcgccagcgactctgcagctgaagcgcatttggtgaggcggtcgggcgagggagcgcgcacggagcgcgggacggagcgccaggcggacggaccgaaggacggaggcaccgaaggacggacgcccccgcacacgcagacgcacagagctcggcgcggcccccgtcgcatacacactggcacagacacaagcagggacacacgcagacacacgcacactcgcgcgcgcatcctcccgccagcctgcccgcctgctcgccggcgcccggagcccgctctggccggtaagtgcggcgcctccgtctgcgcctttgtgtgcggagccggaaggtggagggcgcgggtccctccttcgggcggccccgcaactgacaccttctccagccctcccggccgaggagccggcgcccgcccccgccacgcccccgtggggctctgggcgcccgcatgctgggggaggggtcccccatgcagaggagggggcttgkcgcttggtagccgggagggagcggcagccactccccacgaagcccgtgcgcggttccggggaggaatcgggatagtggtttggggtctgagcctctgcggccggcggaggctggtgcgcggctctgggctgcatcgcctctccggagcctgaagcccctgagggagattggaaatcgccgctagccttctggcctctaaagcgcggctcccagccttcccattgcttcgcctccaccgaccctttagctttagcctcccgcgtcccaccctcccctagaatacaagcttagcgcgctcccctcccccagcatgctgcttgtttctggttgaggcccaggctcctgcaaaaccggagattgcccgggtcagagccttgggaggcttaccttatcaaggatcacagggcttagaagatcagggccagacgaatcctgggaacttattcaaccttctcattttacagatggggaaactgaggcccagtaaggtggcggaccaaggtcaccagagagttagtggtaaagctttcattagaatctagggttcctggttttcatactcatgctcccctcctacacaactagatcccacccacattgaagccccagaaccccaaaattcacctgagtgtaccacgaaagtgtgtaattccagccctgccccacttggaggggcaggtgccattcattttctaccttccctacctatggtaccaaaaaaaggggagagggggctttaatttgcttccttcaacctcaaaggagagctctcataacactcaaacactccgggtttgggattcgtttgggagaatgaagaagcccaggacctgagatcagattcccaggcgttagtcctgatccacccaggacacactgagcctgagtgtcctcagttggaccaggtgatgtggcatcccaggattcgtcctcttctccactgtgtcctgactgcatgccctcccagtcacccttccctcccgcttgagggccagatcttctactccaaccaggcccctgtagtcatccctttgcggaggtccccacctctttctccttggggctcgttaagggcagcctcttggtgctgctgacaaagctgctggggaagcttgagttacaatcacaccaggttcgggtggtttctcagcacgcggctccctcaagggcagccaggtgtccccagagctgagcctgatgcctggtgcagagagggtgccccgagagatgtgttgaaggagtacaagcatagacggatggtgaagggatggagtcagtcaccttggaggagactggatggaatagttggcaaggagggcagtgttcagtctccagggacctgaggttctggtctcaagaacttcctttttttattttatttccatagatttttggggaacaggtggtatttggtttcgtgagtaagttctttaacggtgatttgtgagaatttggtgcacccatcacccagagtatacactgaacccaatgtgtagtctttcatccctcatccacctcccacctttcccccaagtccccaaagtccattgtgtcattcttatgcctttgcatcctcatagcttagctctcacttatgagtgagaacatacaatgtttggttttccattcctgagttacttcacttagaatcatagtctccagttccrtcgagaacttcctttttgaggggggtgagcagctcatcatggagctgagccagggtggccaagtggcagaacttcaggggctgccactgacagtgtagtccatgtagatggcattggctatgaagtttacacagacttcataatgaatggtggcccctgggtttttgccatgtagggatttctgccttgagagtgaagggatctggattccagtcccagtctcttcctcactggctgtacrgtgtcagtatataacccttttgggtctcaatttctccatccaaaaaaataacatcattggattgatgatgttatgaactatttggcggtggggtgggagcacgtatttatgtaactgctatgggcttcttttgctttatgaaggaataatttctgactcaagaatgatgtatgtagagtacttagtacagtccctaacacatagaaaatgctcaggaattggtagctagtaattccactaggactccagctttgtggatataccctatacttcttcctttcttcagatcatccaaggacatgggattcttaaggcctcaaagtcctcctccctcaaaaaattcctttccccctgacctattcctggacttcaggctcagccagcataaaacatctgtgaaaactccctgggaggatcaacacttttgtttattcaaccttttgtacgttagcgtaatagaatttcataattaatttgtatgtagtgtcaaaagctcttcctatactctgtcacttactcctcataagacatccgtgacaatagtgttatcatcctcattttgcagatagggaaattaaggcttggattttcacttatctaagggtgcatacctcaaaagtctcagatccagagagctaggcctccagctcagatgatctgactccagattctgaactctttgttctgtgtcgtattgcctgtcctttccctagacttgccctaaaagagaggcggataacyccttaaaaacagttgaaagaggacttttattctcctcacaggtcagtaacggcttcttggagaagccaagtagcatttaaactgggtgaatgatttgtacgttagaagaaaggaagaaaactatttcgaggagtggaaatagcatgagcagaggatggacaggcatggggacttctaggatatatacagaaactggaaagcagttcattccaactggagcaaaaagaataaaagaagggacttgagaaggaaggttgggtaaggggatggaggttattggggggacattgactgccaagctaaggagttgggagtctttagtttttgagtgggggagaaacataatcaaaccgtaacatgatgaaactcactctggctaccccttggagaacagattggatgtggagagcctgctggccagaagcccaggtaggaaatgatgacaatggtttaggtgagagataaagagagtatggactgggggtggttgtaagaatggttagaaaaaggagttgatgcaagaggccacagtgtcactaaaattggtaactgattggatgtaggcactaacaggagggaagaataagtgatggcaaggctttgaggctgaatggccaaggatgtcattcacagacacagcccaataggaggaggagtgggaggcttaggagtagggrctatgaatctaccagggaccataatgagccctcctgaaaagctggttcatcaakcaccctaaactatcaagaaccagttcattcattcatttattctctgaatacatataaacatctgttacatgccaggttgttctagcccctagggatacgttgctaaaaagacgaacttcctgcccaagctctaccaggggagacagaagataaaattgttcaggtggtgagcagtgctttggagaaaaataaagtaggaagagggatgactgggaggaagaatggagaaagagatctgcctttaaatagaattgtctttgaggaggtgatatttgaacaaagacctgagtgaagaggagacctggggaacagcattctaaaaagaggagaccacaggtgcagaggccctggggtaacaatagcttggtgtcttcaaggaacctgaagtgtacctgtaagagacagacaaagggggaaagtgataaggaaaaaggtgagagagtgggcagagccaatcatgtaagggcctatagacctgaagaatgagaagctgcatgatgttaatgaatctaagagaacacatatcctattcaccttatattctttgtgcctagcaaaccaagcctggcccttcacagtaaatcattgttgaatgagtgaatgaatgaatgaatgaatgaatgttggaaatgaccatttatgtgtgagactgcatatcttagacttatatgaaccaataaataaagatattataccatagtaagggtatagtaatctgtactatgatcaaaataataaagctcagataacttgaatgctgtgttgtcactcaagtatgaaaatttaagtgaagtctgcatattttattcagtatggctttatattataaacactgctgttgactaagacgaaatagtaaaacgtacctgaaatgactgtaaaacaatgaaaataacatttttggtctttcttcatcctcctccccgcacaratatacatccttctggcttcatttcaaattttctcttgcactctcaaccatttccttcatagaggttttaaggaaactcatctctaacacaaagacccatatttgcaggacaagatgctatcatctccagtaaactgacagattcccaaaaagagaaggcagtggggagggagaaattatttatagacatataaatgcttcrggcacctaatcagttgttgaaatggatctacaggtggagatgggaaaactggctggaccatgtgaggggctaggtgacatgcaggctcagtcttagaatcacaggatctctggacccccagtccagattccatctgcagccacaggtctgtcacctgtcatatgtagaaggtagaaactcaggtcatctcaaggggaaaaaagaaaaacaaaaactagaaactcttttctcttttaagcagtgttatcaccaaaaggctcttccttatcttaggggattgtggaaaataagattccccctattctaggccgggtgcggtggctcacgcctgtaatcccagcactttgagaggccgaggtgggcggatcatgaggtcaggagatcgagactatcctggctaacatggtgaaatcccgtgtctactaaaaatacaaaaaattagccaggcgccgtggcaggcgcctgtagtcccagctactcaggaggctgaggcaggagaatggcatgaacccaggaggcggagcttgcagtgagccgagatagagccactgcagtacagcctgggcgaaagagcgagactccgtctcaaagaaaaaaaaaaaaatagattccccccattctttaacatcatctccatcttttctgcatctggtgagatgtggaacgagcatcatggccaccggtgtctggcaaaactcagtaatttccaaactcttagactgagaaaagcttttcccactgtgctgcagcacatggaacagaagccaccctccttcctttgtccccattgaagcaagcgtgactcaagtttctatacctggggtgtagcatgttggatggggaggggatcccctcacaccagatgcgggagatccactgtttgcagatttgtaagggaacaagcatcatgggaattcctaactttgggctaatgtaagggataaactgttcacagccaaatttcctggttagtccagtagcaaaataaagaccctaaattgccctccttttttgtggtgaggtagttggttggagtcattagagagacacaccaagtcctgaagtgtctttctgaagagtcgacatgaaacagcccctcgcctcccattcctctgcaagcctttcgggagggatttgtgggcctcaatggtggcagcatatgggcatctggaatcartyctgaagattcttgcaaaactaacaatgtgtgtatttcatcatctgcctaaagatgttgtctggtataaattataaattacagttgtgaaaataaccatactccatgctagagaacaaacgtaagatgaaccatcattttatatgccctattctatgttttctgtaaatctgtattttgtaatagttgaaattagtccacatataggtttatagcctgcatttttcacttaacattttgtcatgacttctctgtttatacttggttggctgacccctgctttatttaactatgtctttattgttgcacatagtcaataatgagcatctccaggcacatagcttttccatctcagagtctcaaagcatccatctgaagcaccctcaagagatatgatgggatcaaggtggttaaagaggggtgcaaggaaaagaacatgtcgtggccctggcgtctggagtagaaaaagaacagggagcttggtgcagtggctcatgcctgtaatcccagcactttgggaggctgaggcaggggatcatttgrggtcaggagtttgagaccagcctggccaacacggtgaaactctgtccctagtaaaaatataaaaattagccaggcatggtggcgcacacctgcagcccctcctactcaggaggctgaggcatgagaattgcttgaacccaggaggcagaggttgcagtgagccaagatagcgccgctgcactccagcctgggtgacagagtgagaccctgtctcaaaaagaaaaaaagannnnnnnnnnnnnnnnnnnnnnnnnnnnnnnnnnnnnnnnnnnnnnnnnnnnnnnnnnnnnnnnnnnnnnnnnnnnnnnnnnnnnnnnnnnnnnnnnnnnncagggggtcaaggtcacagagccctaggggtggcagagggacatgcagctctgtcagatttcagagggaagtctgtccttccagtgttttgtttgtttggtgtgggaggcttttattaaattgtggtaaaatacacataacacgaaatttaccattttaaccaatgttaactgtataattttgtggcgttaagtatatttacagtgttatacaaccatcaccactgtccatctccagaatctttttatcttcccagactgaatcgctgtactcattaaatactaattgctcattcccatctcccccagcccctggtgacctccgttctactttctgtctccataaattcacctattctaggtgcctcgtgtaagtggcatcatgtttgtctttttttgtctggcttctttcacttagcctaatgttttcaagggtcgtctctgtggtatcatatatcagaatctcatttattttcaaagctgaatatattccattgtatggatataccacattgtttggccattcatctgtttccaccttttggctattgtgaataatacggctatgaacattggtgtgccaggatctgtttgagcccccgctttcaattctttggggtatatacctcgcagtggaattgctggatcgtatgatcattctgtgtttcactttttgagaggtgcagggtgcattttttaaaaaggatttttgtgtgcccagtatgaagaccactgagtgaagtcttaggaatagagagtccaggaagaagctgttaatttaaaaactaaatgttgtttgggttctgcatggccatggaggtaacagagaagagagaagagggaacagaatacaaatgagtctgactccgtttctgaagaattgttgtgatttagaggcattgtgggtggaaaaagaaagctctcaggagagatcttagtgggtggaattgattcaagcatgcaagtatttactgtaccaggcactgtggtggacacaaggccctcagcaatcaacacgaccacaaggaccctgcccgcaaggagcttaatgtctagtggaggtgccagaggagtcacctggcaacagtggtctgtactgatgcattctaggctcatcataagcactcactcttactgagtgcttactacattatctcaatcttggtgacagttcagtgaagacggtttctgttatcctcaatttgcaggtgaggaaacagagagcttgagtaactctatttcaggtacgcacagcaagagtcagagccagaatttaaacctaggcagtaactgtgctctgtagggctgtgggaacacaggagagacacctgcccaggacggaggtcagagaaggctttccgaaggcaggggtcaggtgagtattttcacgcaagtcagctgtgttcytctttagcccatgatgtaaaacagtgctttcctatagtagcagcagtagcgttcagccctgcttccagggactctagacactcagggagaccccttcactgagactccacttcagaggaagatgatcacttctatcatccttgctgcttatcatgaggcagggaggctgggggtgaggcattgccatttcccactgccatctgctgcctctgctacttccctagctggtcagcatctgaggtacctcagagggacctcctggggccccttcggggcagcatcaggccagtgggctaagagttaggcaaatacgaggcctaggagtggcagtgaaaatcatatatccaccttctgtgccacatcactgtcccaagatactcccaccaccacagagccctgtcttaccaaartacagatgtggccaagtctctggtgtttccatccttctgtggctccccatagcttgcagccgtatttctcaacagggacctactggcctttgggtgggagagttctttgatgtaaaagcatccctggccccatctcctatatatttgcctggagcacccttcagtcattataacaaccaaaaatgctcacacatgttcttcaggtttactttacaagcagtccaatgtatagatcttaagtgttctgttcagtgcattttgacaactgcatgagctcatataaccatcaccaagagcaagactcagaagatttccatcacccgcaaaagttcagagataacgattattccaatttctatcattgtagatggattttgtctgttcctaatcgtcatataagtggaatcatatagtacatgctcttttgtgtcatgaaatagtttttaagaagccagacgcagtggctcatacctgtaaccccagcactttggaaggccaagacgggtggatcatctgaggtcaggagttcgagaccagcctagccaacatggtgaaatcccatctctactaaaaatacaaaaattagctgggcatggtggtacacacctgtagtcccagctactcgggaggctgaggcaggagaatccctggaacctgggaggtggaggttgcagtgagccaagatcatgccactgcactcaagcctgggtgacagaacgagactccatctccaaaaaaaaaaaaagacatagtttttgagatccatccacgttgtcacgttttccccactaacccccaatacacacacagatttctaaatgccaactagcatggcaatacctgcctctgtccccctgagaaaaaatggcctgtgagtcaaagttagtgtgtcttaggctgattcatgaagccgtctgctgtgtgacaagagtccctcttacgtctactctgtggctacactgagctgcctcgtctgcctggcataccttgtgctttcacctctccgggcctttgccctgcagtgttccctgcctggaatgtcctccctgtatctggtgaactcctgcttgtccttcgggtctcttctgtgcmgcttcccagactctgtttttgtgccctcctgagtgctcccataagacagcctcagtgggcctttaatgcatttctcactcaactcactaggccgaatgctgggtggagggcagggactggctcttagttatctgtgtgtcccccaaggctcagtacagagcctgatattaaagaaattgatataagattatagtaagattatcttagagacaaactgggtttaaaatacaaaatatattctgaaccaccccctggagctaataaagttggagctgggcatggtggctcatggctgtaatcccagcaccaggccgaggcgggtggatcacttgaggtcaggagtttgacaccaccctagccaatatggtgaaaccccatctctactaaaaatacagaaactagccaggtgtggtggcaggctcctgtagtcccagctacttgggaggctgaggcaggagaattgattaaacccgggaggcggaggctgcagtgagcctagatcgcgccgctgcgctccagcctgggtgacagaggaagactccatctcaaaaaaaaaaaaaaaaaaaaaaaagtggtcaaaaaaagacagtctgatctctggctacagatgataaatgtaaactgacttcctgccagtgaggcagagacctccatcccttccccagaggacctagcatcatgggaagtggcatggatgagtgcaaagtagcgcagctcagggagtcaagggggccrgggcggggccgggggggtgcggcaaagatcagagtcaatctcagaaggctgcctggaggaggtgagttccaaaggttttcaaagaggtctctgtgtcaagcctaggagttgcataatcagagtgtgagagccctaaagcatgattcaaggccacctggatcgtgggcctgatctgtcctctcatgaccctggtactgagtgtcrtgcagcagcccttccctcttccttcactcctttccactcatgtctttcttctttttctcccacttggtctttccttcccatcttccttccaaatctgagtgtaaaggaaagagctggacctgccttccatgtttttttctcctctgcactgggctttctgtcrtgggggataaagagggggttttatcccttgccccttgtcagcctgggaagtttacagaagccaaagttatggacaagagagccagggagcagcccgggacagggtgtggctcattaccagtttccaagtcacaaaaagtgctgggggaaggattgagccagaggagaggtcaacacaccctagactcactagggaggtttcctggaggagaccygggctgaggtgggccttggaagggcaggaaaccacagcacaaagaggaggagcaggaaggcctttcctggccaggcctgagtgcagaagggttaaattaggcggggggcaggggccctgatgagaagctggagcccacagcagggtgtggcaggagctaggggccgctctaggagctgagagactaaggcagaaaagcaggagggagcatggctggggcaggcggatgtcatggcagaggaggatttgggaaatcctgtgaagtggagtttccagttcttttacccgccctttcctagggctctgggtctgacttggggacctggaaacagcctggagctctccagagggcagaggaggttctgctgggaagacccctctcatcctccagctgctgtcacctgcattgttctcattagctccaggaacacctgacagagcctgaggaaataggaagcagacctttgtagctgatggcactgcctggtacaaagagcaggagtgtctcctgtgtgaggttgacttggagggagacaggaagtgaagcttcgagccaggtcagcaggaatatggagaaggaggcctgcccaggactgccaagctctccctatgtacagccctcgcttcccaggcttcatcacaaccctgcagctctcatcggtgccatgttaagtgggaggaaattgagactcagagaggttaggacaccgacccaaggccccttgtggagaaagtggcagagcacagcatgttagccaggtctctctgcctctgaattcatccttttcccggaggaccagggttgccttacaatatgtgatctcagaatggtcagtctgtcrtgctttgaggaattcagcccgtgactgaggacctctgttgacagcctgccctgggcccaggtttccagctgtccactggcacaggkaaaggagagaatcagccatccttggcccaggaccagggagaccacgtacctgctctcatgtcagtccctaacctctcttaagtgcctatagctcctgcagagtgagataatgatgttttcatggggttgtctcaaagagctaatgaaataaggtactgagaagcatgtggcatatggtaggtctgcagctgctatttattaaatttgaattcaagaggtcaggctcctttcaaccttgactcttggtcccacctgggattttttcctagtttacactctatttttttttttttccttgcaaaagagcctcaaatccagctaatgtttccaaacccagcctcgctgtgtcttcccytccaggccctgcttctgactcagttagactcttccaccaaacctgaagatgccaagatcttcccaggttgccatgacgtgagccaggcctgagcacagaagggttaaatcaggctgagggtaggggccctgatgagaagctggagctcacagcagggtgtggcaggagctaggggcccctctagttgsaggtgggagcaaactgagctctgaacttcagctttcccctctgtaagtacatcccagccccatgagaaggagccttgtaagcaatgaggagcggagcagatgccagaagggatcatcatggaccatccggagcaagggacagcagcatgggcagcccaggcccagggcagcatgagggaagtctagggatgaaaccagaggcatgaaataatgtgtgatcagggtgggtgtgtaaccaacacaggctaggccagaattctagttccggggtgtatcagactgttcttgcattgctataaagaaatgcagcaatttcattatagcagtgcaagagactgagtaatttataaagaaaagaggtttaattggcccatggccagcctgtacaggaagcagggcactggtgtctgcttggcttctaggaaggcctcaggaagctgacaatcagatagaaggcaaagagggtacaggcacatcacacagcgaaagcaggaacaagagagtgagttgagggaggtgccacatgctttcaaaagaccagatcttgtgagaactctcgtcaggatggcacaaaccatgcaggatctgcctccgtgacccaccaggccccacctccaacactggggattacaattcaacatgagatttgggtggggacaaatatccaaactgtgtcacagagggagaagggagagctgcaagagtggacaaggcctaatcctagaaggcagagactctgcccatcagagcagaaggccagttgctggggttgggtcagtgtccaagccagataagcaacagtgagactgagttgaaactcttaacagtaatattggctaacacagagcatacagcgtgccatgtgctcgtctaagagcttcaggtttactcctcacaacagtattttgagttaggtcctactgctgctctattttaaagatgaagaaactgaggcacagattgagcaaaactctggacctctgctgagactggcagcatgactcttcacaatcatagcttgaaattagccatggtgggagcatttacaccatgaaaattggcagagggcacaaatcagggcccttccttccttccttccttccttccttccttcctttctttctttcttccttccttccttcctttcttcctttctttttctgacagggtctcgccctgtaagctgggctgaaatgcagtggtgcgatcatagctcactgcaaccttgaagtcttgggctcaagcgatcctcctgcctcagcgtgctgagtagctgggactacaggtgtgtaccaccatgctccgctcacatattattttttggtgagatgggatctcactgtttttcccaagctggtctcgaactcatggccccaagtgatcctcttgccttggcctcctaaaatgctggaattacaggtgtgagccaccatgcctggcctacattattctttttttaattcctgcataataatctcatttacttcatcttgctcccagtgatacagcagttcaggtccagtaaagagaaagttaagaaccggtttaccagcactccgcaagattcatcccagagtcttcatggaccttatccgtgggaggagaaaagttatattaactgggaaacaggcaaagcctgaaacacaagatgatgacagttaacatttttaggagcttcctggccctgatctacacattttccatgcatctcatgtaaaaactttgtgtgaagatcaacattcatttaatctccattataaccctctggagtgtagacacatttatccttgcttcacagatgaagaaactgaggcacagagaagtcaaaatcttgcccaagatcaggcagccagtgggggagccttgattcatactgggggagtccagagccaaagcctatgtgtttactacttttatggtgttgtttgtttgtttgtttgttttgagatggagtctcattctgtcgcccaggctggagtgctgtggcacaatcttggctcactgcaacttccgcctctctggttcaagtgattctcctgcctcagcctcccaagtagctgggattacaggcgcccgccaccacgcccggctaattttgtatttttagtagagacagggtttcaccatgttagtcaggctggtctcaaacttcttacatcaggtgatctgcccacctcggcctcccaaagttctgggattacaggcatgagccaccgtgcctggccctttatggtgtttttaatgagccatttgtaaatgctcaaacattaccccacttttcattttttttaacatttgcctggtgccagatacagtattggacatgggaagcagaaaagtccatatcagatgctgtaaacctagtgatttaaataaagcctggggttgagataaactgagtttgaagcctggttctgcaacataccaactatatgaccttgagcaggtgacttagtgtctccaagtcccaatctccacgtgtaggtggaggatgactttttacctcatatggttctagtgagaggtgaatgatgtcatacgtgtgcagtgcttggcacgacatccagcacacaataagcctgcaataaaaggaagctgcggtaatcacagaccacaggtttatgtccagggagctctgtgtgaggctgggagactggcatcaacagataatgaccgtatggaggggtaagaacagaagacggagtacccagttcttcctaagggagttggggrgggttctattgaggaggtgacatttgaacagagtcttaaaaggcaaataagaattttccaagcagagaagggaaaagggggctttccagtggaggaaaaagtgcatcctaaagcattataggtaggagcaagcatgtaactgaacggaaataccagaagacgcccacaagaagtgtgatcacacctttgcatttgtgattgcctgttttctcccggtaaattaaactgcatacctgggggcaggtgcagggagagggagcagaatgcartgttttcagagtcttggagaacagaggatcagaccggataacctttgaactccaaaatcctgcctttctatcttttgggtccgtgaccgccgcaccatttataatcaggtaggaccatccacagcatcaaatcacagctgaacctggactctcttaataattggctcaggccggacatgcttgcaggttgggctccatggaccaaggcctgtttccctgatgctgtgagcgccctctgctggttcactgccgttccaccctctgcctcgttaaacctgacaggcccggaattgaagcctgacctctaaggaaaggcccttagaggtcatctcattcaggccctttggttttcatttggagctactgagattcagataagggaaatgactagcccaaggtcacacagtagcctgggactagagcccatggcttctgggccctgggccagtgagtgtattcgtcatggcactgatggaacacagctgccaccaacacaggctccccacccaagccagcctcccaaactccccatgcaagctagcctcccaaggcctgcttcctgggctgttgcttcaagtggagaaacccgaggtcgtggtcccgcgcaggacttccagtcgttcttctggggagaacagcagtgakcccaagcaaggacacaggcacagggatctccctcttgctccttcactcgtttgcttgggtcacttcaccccctgagccttagttttctcgtctgtaaaaatggtgatcatcacatgctactcacatagatttatggtgaggattttttaaaagaacatatagaaagcaactgccatgatatgctgtctcttcctattgtatttgcggaatattttttcttaccaaaagctaaaaagtgaaagagaggttaggaatgtgkgcaatgggggaagttctgtgataactagctgtgtggccttaggcaggtcactttacttctctgaatttccatttccgcctttagaaaatgcaggaaacgttagtacgttcctccaggggctgctgtgaggactgagtttgctaacacmtgccctggagcagttcctggcctgtgtggtccgggtrcagtagtgacagctgccctttctgttgtgaagatactgtcattgttatcctcttcggtcgggagctaagatgttactgaayaggtggtccgaagattgcttctgccctttttcctgcttcctttctctctcagatcacctcctcctgttcccttccatcctcaccaacctgaccatgaaattttaaaagtgtagattttaaaagaaagccaaagtggccctgagaagaggctgggagggtccacagagtctgagctgaatcactgtgaatttctgaccctccaccccaaagatgtatttaggacagaatgtgttggcttcaatcatgagcccctggtctctctcaatgctgcctatgcagctagcccctgctactttggtcccagcagggtggccaaagccagcaaagaatctgtgtgtgtttttcctgctcccatcccacccaatctaggaatttggcaggacgagggctcctcaagccccctccagccccctcctcctcagagtacagggggaagctggtaaattcagttcatactggacctttggaccagaccacagacacctgcaggcccagcaacgcctttctgttgtcagcgagggagggcacatggtcctgggatgcctctcttgtccaaaggctgccccagacaacttggcattgttcagagccctttgtctacacctgcttccccaccaccaccaccctcatttctctgctgtgcctttgttggtggtttgcacagatcctgagcacctgctgttcaccagtcaccatgatagtcaacattcacctttctcattcactggtgatcttcaccgccatcctgtgtggaaggtgttgtcatccgtgttagacatatgagaaaaatttaaggctcagagtgataaagacactttcctagagccacacagtttgactagagcagagtgaagacctatccccasggaaggcttcctagagcaattcaagattaagctggagcttaaagtctgagtttgattttaaggaggggtgcaaagaggtgatggccttccaggcaagagagacaacgtaagcaaagggtgaagggaaggatgtccttcatggtcacgggggtgatgaggaggcagttayggtctgaaatcagagtgactggagcaggtggcccagcaagggggcagtccccagctgcagtcccaggctaggatgccccatctcttacctgattgacacacccacctttttggctggtctcctgcctcccaagccaagaatctattcttagaactggttgatttttttaatccttaatatcaggtatggaagaaatgtctcattatgctccttaaatgaaattagcccagactcagagctccccagcatccctatctggtaggaaattcaatcccagccatcactggaatgactctgacccactgctgtgacccccatgccagggatgtttcaaggaaaccacactgattatagctgagataccccagccccactgaagagcccctytgggtctgcagactctgtgccttctgtcgggaggacgccgtgtggggtgcagcggaagccctgcaggctgagatccagccctctctatgcactcagtgccacccacccacacaccaggcaccagtcatgaaactgatgggctctgtcaccttcccaggcccggagaccccctccccttcctcacacccccacctccctgacaaagagacacccgcccccaggtgctccagcttttacaaaacaaagactggaaggatagctcctccaggaacttggcctttggtcctgcagccaagccgcctctcccaagggaatataggtctgtcttacctctctggaaagaaggggagggaaaaggaaaaaattccaagtgagcggttcaccccctttccacactccccttttagactacatttctttctagtccttgaatgtgtcctgctttgtgtcaattccaggcccgtccacatgccctccttctacctggagcaccccaccccctcctgtctcatcccacggcctctcacccccactcctctttcacatctcaccagagatggcccttcctgggtaycaaacgtctcctgagtcctctgcctccttaggggtctggctggcactcccagggcaccctgctcgtctccccgcacacgggtcacctgtgtcaccattgccttttcttsttacstacatcccccatgagatgcttgtcgttcattgtattcccagggtcccacacgtagcctgaacatagcaggtgtttagtaaacgggttgaacaaatgaatggtccaatccctgaatcagactsaaatgaaaaatggacaactgttgcccgagcccctcagcaggctgggcctaccctgcacttttcatcttcccttccctggggtccctgccatgcccgcacccacttctcccactcagagaagaggagggatggaagggaagtcatttgtctgggcacatcccaagcagagaacactcagaccctgtgtttgggatccagaacactcaagtttgcagtctgctcagacgtgaggacagatggctggacagtggacagctgggcaaggagggtaggcagcttggcaggayggaaatagcagtgaactaagcattgggagtcctgggctcagagcctattcattccacgagtttgctgcacgcatcagtctgggttctgtggttgccagcaacagaagaggactctgagtaacttaggcagaaaagatatttattagaaggctttggggtatgatataaatactgagttctgattctgggctgtctgtgtagcaagaggcaagcagggcaccaggggaggagaaaggtgactcccagaaggaaatcaggattttaactacctgaaarcaaattgttggcacactgtgtgacctgagactagtcacttaatctctctttgcccygttttcccagctggatgatctgaagctgccctctctccttcatttatatcaccagcttgctttttgctgagaaagcttcctgccctggaagatggcacccttccccatccagacaccttgggaatgaattatgagggagccaggtgagtgagcgtttacgccgkccccctgcaacccgcccactgaggaggccaagccttctccatctggatgctctgggacacgtgacycattctcatgaggtgttcagcctgatcattccttttccrtgaaaccagcatgccctctgcccctgcctgctgaacrtgctgatgaaaatctggatggcattatgggcctcttcctggctatggtttggccatcttctttaattgggatgctcctagctggagtctgccttcctagagcccctaaagctaccaaccctgagaycctgccactaccctgcatttggcctttaaggtgtacatcaacaggctcaggccctgtgctaaacacctgggatgcagaggtggttgagggggtgaggatgctccagagtcggaagttggtgggagaggcaggtgcatacacagctaactatagcagcagaacaaagtaagagacaaagggacatatgaaccaggtgtgtgggggagcccagaagtgggaggacgcagttcttcctgagagatcagggagtgctccgtggaagacgcaccgcctgagtcgcaccttggagaatgagtaagatttgacaaaaggggaaraggatcttccaggctgagggaacagcacaaacaaggctcgaagggaggaatggacaggtttgattcagcgaatagagatgtcaggtggggttggagctttaagagggtggtaggarctccacgttgacagtgaggggtatttayggggtaccaggagcacaaagcccaggatagagggcatgtctgcctgggcttggctcagcctcacacccaggaatcctggcttcagcatcccagttcccccttgctcctcaccgaccttggaagcaggctcaggctccctgattggctcagcaaaccagccagctctttctctgcataagtcctgggcaaagctgggacttcatgttaggagactccaggatgtctcctaatagcaccccccatcccccactctaccccccaggcagaggggcggtgcctttgttagaacacttcacccagcccacggcagcagctgttctgtatcttctgcactggccgtgaacttctagaaaatggggtgggtggtctaggctggatctccagcacccagcactggtggcgtagctgcacaacgcattaccttcacacatacgaacgagcagaggaaggtgatgaccttcaagttacaacaggcttggagtctgaccaccatattttcataagtgaggcctcagacccagagcgcagaaaggattgcccaaaaccacaagygtgatgggaggagagtggaaacagagcagtttggttcacaggagcactactcacaaatagccaaaaggtagaaacaagccaaatgttcaactgatgaatagataaataaaacatcgtctgtcctacagtagaatattattcagccttgaaaaggaatccatgaaaaggaatgaagtactgatgtatgctacggacttgctaagtgcaagaagccaaacacaaaagcacaaaaggctacatattttatgattccatttatatgaaatatccagaataggcaaacccatagagacagaaagcaaataagccgttgccaggggctgtggggaggaggacagggagtgactccttaatgagtacaggatttccttttggggtgacaaaaatattctggaagcagatcattatgatggttgcacaacattatgaatgtattaaatgccactgaattgtaccctttaaaatggtcaaaatgttgaattttatgctatgggaattttagcacagtaaaaagagtagtttcagaccagatcggacrctaccagctgggtctaaagtccattccttaaacgtaagctgctgctcccccacttcstgttacagacctacccagccagaccaggtgtgagagagccagcatcactctcagtgcagggaagccacagggaagccacatgatcaagtggaagagggcttcccccgccaccccaggaggcaggattcctgtcttctaggctgcttcttgcccacgtgcctctgctgaggcctagcccccatctgctgctccatcccactgaccagcctacttctgatggcaccagatgttccacacatcttgggcctccatgccttgctctttctatttgctctacccaagaaatccttttcccaaccccccattcacctaaaaacatattttaaaaaccagtccctggccgggcgcggtggctcacgcctgtaatcccagtacttkgggaggctgaggcaagcaggatcacctgaagtcaggagtttgagaccagcctgactaatacggtgaaacctcgtatctactaaaaatacaaaaattagctgggcatagtggcaggcacctgtaatcccagctactgggaggctgaggcaggagaatcacttgaaccggggaggtagaggttgcagtgagctgagataatgcctctgcactccagcctgggcaacagagtgagactccgtctcaaaaattaattaattaattaatttaaaaaaaaaccagctcctgtctcccccttggagaagacttcctcttccccttgcccctcccacaaatgagcagagccttccccaggatggtcacatgcatacatcaattaaagcaggcatcagggtacagtcgtgtctgcatgtctgtctccctgagaagactgggagcctgcaaggaggggcctggattattcatcactgtattcctagggcagctccaggccttgctcacaggaggtgctcagcacacgcctgttgaatgcgacgatggctttgggaagctactttcactccgggacatcctccatcagtgaagtgggggcaggctgggtgatttccaagtcccttcatccctggtggtctctggttataagggaagcagtggtgggggcagcccagcaagtggctgctgttgtcacaggccagtgttctgttcctgttgcctggctgatagaagtggggaaggagagagcaggagccttagcaatccaataaaagcagctatttctgctcttggtggggagggaggaaggcagcgcccagagactgggttccccatccagcctgaatgggccatgtattttctttggaaagctaattaaaccctcctctggacagtctagacacgcaggctgtggctggggttgcctggagtccttcgactacagggaagagcagcagaggctcttgctccattttcctttgcagtcaagaggtgctactcgttctgcttttctggttatgaaattagtcattttctaggaagcttatttatagagtccactgcacacatgaagcactgagctattctgaacacagcttggggcctgagaggcttaaggtgtgaaagcaggtgtgagtcacacatgggtccccttccagaggtatctggatactgtgcctttctgtacccagccaggggtcagccctcatgggctgccatccagctaggtgctcgttagggtaaggaaagaacaagtttaggattggaaggttgggggtgggtgctctcaaacacaatccctgtggccaccaccaactcagtataaaatgtggggcaagtcagaccccattctctggctcagtttctcctctgtaaaatgagaggccttccagatctgtgaatctctgacttctgtggacaacagctgtggaggagagctcccagctacttagcaaagacccgtccacaaagcagctcagatgatggctgtgtttgagattcmtaatgttttctcaagaacgtcaggtcaacatttacttattccataagtgtttatttattgaacatcctactacgaaccaggcactgtgcgaggctttgaagatacaatggtaaataaaacagaaatagtggaccctgccttcatgaaagccacagtctaatgatggagacagatgttgaataatggcatatattacagtgacatttctaaccgtgtcaagtgcataccatgtgagagaaaagcatgtggaaggtgctgtgaggaaagagccttcccagtgtggctggagtgcagaggtcaagagggagagggacttagggtaagcctggagggatccacagggaccagaccacccaacatctatgaactatgccaaaggatttttctttgttctaagtacaataaggatgccatgaaaatattttttcaagaaaggttatgtgataaacgttgagttctgaggaattgattctagctcctctcttctggagaagcgttcaccatgccactttccattgcctggggcagaggggacttccacatccagttgtgcagtttgtaaactgcacagattttctgtgccataagcactggagccatgtggagaatgttttggaggccagcccgagtggatgccagcaaccagttaaaatattgccacagcaatctaggcaagagatgatggtggctgggaccaagatggggagggagaaatgtggagggactccagagacatttaaagaatgcacttaaagttaccttgaaggaagtgacctcctctctgcaggagtgctgggctctaggacttgtgattctcagagaccctggcaattgggttgaggaaaaaaataaaatgatataatgccagttgaaaaagaagatatcagagggagaagggccaccctgaacctgacctctctgcccttaattatttaaaatctggaattgggcctgaaactggccctagggccagtccaagaagcaggatagcaggacttgggggcagagaagcagctgagcctctggaattcctgaaagtatgctagcaaggctatgtcaaaggttcttttggttgccagtttcagaaatcacatcccactggcgtaagctaaaatgtggggatttattggaaggatccacggccatcttatggtcttgaagggcatattgtccaagactcagtacagatgggaacaaggcagctctcaggccctcagcagcaggtcttctctccagggcactgtggctaccatgattcagcaccagcaaaatgcatcagaatgcattttcagtgtgcaagggagaggatctgattgacccaggctggtttgtgtgttcagccttggatcagtcatcagctactgccaagggtcagagacatgaaaggcagacaaggccactggagcccacgctgcatttcaggccattcccagggtaggggaccccctgtgagtcaagtggttgccctcaagatatgtctactctcaagatgcttcatggggtctagctgatctccagcaacatttttccagcttgccaggtaaaggagaaaaactagacccccatactctcctataaggtgccctaataggttagaaagagggttctctgatttcaggaaggaaacatttagactatacaaaacatgtatgtaactactttttctagctattctggagaagagttctgcataccacttttcactgcctggggcagaggggacttgcatatcttggagagctggacacaggattgtgggttactcagagccctcttcttgtccacccatggttcaaaactactggaactaggagacagaatggcacaacagcgagagcatgagcctggagtcctaggtcataatttcaaactcatctctattctattgagctgtgtgaccttgggcaagttacttaacctctctgagcctgtttaatgatccctcattcatgaggtcatggtgaggatttaatgtgataaagtttgcaaagtgcttgcgtatagtaaatcctcctactgtagaggtgatgatgatggtgatgatgatgatgatggttgtgatgatactgctgccactgattccacaaggaagacacctgcaaaattctgctcctgcctctgcagcttgacccctcaacaggctggtattttcctcaggtccctttgatggggtggggttattcaaagggatacagaatacaggagagggagccttcttatctttgctcagggtttttgtcttgatcctggctcaacagcatattcttaccttttccatcctgctgcaggagtgagagagagaaccacgctgctgatgactccgagggaggggccctggacatgtgctgcagtgagaggctaccgggtgagtcttctcagcacccagctcctcccagacctcagaatggagagacaatgccccggctgaagctggggctggagtaaagcctagctagctgtgaacttgcgcaagaatatccatgcagctgctccatagctcttcgtttaaatggggacttgtttttctaatccctgatgccttctgacctgttatcacttggagctgctctaggctcacatggagggaagagcaggcaattgaaggtgtgctaggaagtgaaaagaaggacgaagagctgaggagtacagggctcctagggaatgaccactgaccrttcagggctgggctgacttcaagaggtaagggtaggaagcaaaacctgaaggcagcatgagccaaggatggggtgggggatgtggagaactacctgacctccctgttgagaagcccggcttgagggtgaaactgtgctgcttgagtccagttgaccacagttgcagggagccaagccattgcagccaccgtggagatattaccaaggcactcttgcccacagggtggcagctcgtcccagttgtagccccatgacccacgccatgataaacagcctcagaaggaagaaaaagaaggggtggggggagagttttacatttttttataagtttttattgttcttttccttcttataacaaaaggttaactgtcaaaatattagaaaataaatacaaataaaaaaagaaaaatcgccataatcctgtaacatagcatatattttcatatctctccttctgaacattttgttagaagacaagtcttttgggccaggtgcggtggctcatgcctgtaatcccagcactttgggaggccaaggcgggcagatcacgaggtcaggagatcgagaccatcctggctaacatggtgaaactccgtctctactaaaaatacaaaaaattagccaggcgtggtggcgggcgcctgtagtcccagctacttgggaggctgaggcaggaggatggcgtgaacccagagggcagagcttgcagtgagccgagatcgcgccactgcactccagcctgggcgacagagtaagactccgtctccaaaaaaacaaaacaaaacaaaacaaaacaaagacaagtcttttgaactctaacgttgaaattccaaacctgtagcttttcagagacctcatgattggcaaggaaccttagaatggagtcttcacgtgatactctttaagatagacattggaaacaaccaggtatgagtctaaagcgatgactcttcaaaataagtggtattttattcacaccacactcagtgccccagctcctgaggaagccctttgatgcagttcataccttaaccagtagggggtgccattgctcaaaacacttgggacagcctgttgagacggtctaagatgggaccgtctgtctagaagagaattmtctgaaaagatgtgagaacttcctgaatatctgaatggctgtcttgcggaaggggcagcagatctattctgtgtatcttaggatgacgtaagcccaaggcattgaaattaaaaacaggcctttggcccatagacgcagaactctctgactctaaaagtggtccagtcatagaactcaataattccagaggaagaaatgcgtgttccgtcacaggaggcattcaagtactagatagatagacaatggagaggaaatttccacaatggatgggaggtccagatgacatcagaagtccccttcaactattaaacagttctgtgattcagatatgagtcatagaattcggagatgactctacaatcagggatggcaccactgactagaagaaatctgcagaaaataggacaggatgaataggagtccagagagtagcacggtgtggaggaagaaagagcrtgggatttggcgtttgagtccgcctgttctgcttcaggctgtgtgtttatgcacaagtcacttaaccttgctggagctccagtccctcatctgtgagcagaaacaatagcaatatgaatatttatcctcacaagkstcctgggggaataaataaatgtaaccactcagtcattcactcaagtacttattgagcacctactaggtctcaggtactaggtgctagatatatagcggtaaataaaacagacatagtcccttccctaaggaaagttcatggacaacttcagctctgagctgcttctgcaaaatgggatgaagccgcagcagagaggctgcagtaataagcataataggttaaatcccaatgttctctcccatttctccccaaaagcaagcaaccagtgtagaatagaagagttttggtcatggaatatcctaggaaatcagtgtcatttgctaccccttcttacagatgagaggaccaaggcccagggagcttaggcagtctgtccaaggtcacttagctggtagagggaggattcactccaggcagtctctctcagtagcccgtgtcgtcaccgctaccttgttctgcctctgttgtccccatggagccactgtcatcttctggcaccctgtggactgaggcagaaagagtttaggtgtgtttgttccagacaggagtttggaggaggtagacaacgtccctgtgcctgtccctatctgtgtccttcctctgggaagtcctgcttgcagaggccgagcaagttgtgtgaccctctagactcccacgatgctgtcctgataggggattgcagtaattatttgcctcctccatggggtcatgagctctctgaaggcaaggacctctctgtttcatttctgcatcctccatgtccagcatgtattcactcatttcttcattctgtcactactgattgagcacctacatgtgctgggcactgttgtaagcactagagattgaacagaaatccaaactgaaaacagttcccaccctcccaggacagtattatgtgctagtcaagaacagggactctggacctcagcttggccccaccacttaccagtagatgatcatggacaagctactgaatctttctggaccccccattcacaatatagcaagaacaatattcactgctgtgcagagttgttagaggattcagtgaattaacagaaagcttagaacagtgcctggcatatagcaaatgctgtacagacatttgctattaaggaaaaatagacaamaaataaaayaagtaagtcatgccacatagtatggttaatagtagtaagtgctatgaagacaattaaagccatgaagagggggatgggaaagaactggggaatggtttgacattgtgaatagggtaaattcacattgaatttgtggaaatctactctacaccagagcctggtgtagagtagacttccacaaatgtttgtcaaggacactgacctgtactgcaacttggacataaaaggaaatgggagtttgtaggccaagagagttggagtgttaggcctttagaaggagcccatgagcactgcaggcaattgcataatgatggtataaaaatccagccctcaagtactctttccactctctgtcttacccagaggcgaggcagagtgagggccagccatgcctggtggctcattygttcccacacccaccttcrgatgggggcaacatggccaacactccgagccaccacgatcacccagatctgagccaacacaggacaggtcatacagtcccatcagagctttcttggtggaaacgtcctcagcatcaccaacactccctgggagctccccccaatgccccagagccaggcatgctgcctcacagcccctgggacaccccccacatgtgctctcgcacactcgtgtttgtgctcacttgtcatagccacatgctccccgatgcacatgcatgttcccacgcacagtcacccgggcacgtggcctgcctctgtctcacacagccctgcaggggcggacgcacacctccaggctcacacacctgcatgccttcctcttgcacactcacctctctcagctccatccctccatcccgcggcttccactctgcatgcttcctggtgatgtgcttgctctctcattccctccttaggtgtctttctctttctcccactactgtaccccttcttcacgcacactcttgaaaatgactaggcagactccttttctccctctccattctctgtcctcttctcaggctctcagtcatgcccagctccccggtactgtgggggcagtgagtgtctaccccactgccttccccacccctgtgcacatgtgcacacatgtatttttcttctccctcatgcacacaccctttttcatgtggtcaccctcctcttctctttcactcttcctttcttgctcacttcatttgctcacagtcacccaaacactttggtacattcaaactcacaatctctcttcttctatgkgtaggtgttcacatttgcaagacaccaggtggcactgctaatgttggggaytccactccttcccccatccagcaccagtacaggcctagcccagcatagtcctagctcccagcagytgccgcggaggtacaaggtagaagaaggaggtagataaagcagcagtaggtgccagtgggggccagcacatggaatagagcaacatcaccaggtgttgctctcagcagcatcatcatgcagactcgtgggcaggcctgcagggaccaaggtcagactgccaataaagaccctcgcagtataccacccctgctcagtcctgcactgcaagggccattgcttgcgtgcatgcatgtgggcaggccagtctgtatgttcaagcttggtccacactccaccctaatagctactccttggccacccctcaaacctgaagatgcgtaagcaggagacagtgtctaccctcacagggatgtacctgagcaagagacccatgcaggcttcaagccatttgggcaggaaatcctgaagtcctagtagttagagtgtatcctggaaaggggaacatggacaccagctgctaacagactctagttgagtatatctcctgagccctatggacttctctgctcatggggagtgccatggacagaagagacggggcacagggcccagrtctaaggacaacgctgctcttgggaacaaagtactcctggagccttcctgcgggcagctggctggagccatgacaatccctaccaacctgagatttcagtgtgtcatgattagctggctttatgcaaggtcatgagtatgctgaaggcctgagtaggccattgcayttttggtaggaacaactggcctcttgggctggtgattctgagacctactcttcaccttagatcctgatgtcttgcaacctgtccccaacccagccctaggcactctgctctgtatcattgtgggtattaagtggacccttccttcgggccaaggacaaggtctaggtctcagcaagaggccactgcccatcccgagtgccactttttaaagtaaaggagctggaggcctgaatcaaggaaagctttgtcaccctaatcctgcagygcctatctctgaccagcaggaaagaacaagtcatagctttcatagccttcctaccatgccacagatgaggtcttggaccagtagccaacaagggcagttgaaaaggcagcctgattcttttatccactcaattttattgagcacctactccatgctccatgcttgccaggcactggtgatacagtgacaagcaagacagacatggtccctgctcctaaagagtttagggtgccatggaagggtacagccattttgcaaccctatcttggtgggtcagggaaggcttcctctaagaagtgacctagaacatgaatagggtctcgattcatgtcttcaggaacctgctgtgtcaagcattttaaggagcaggtttacctcwtaatgggcctcatccctgatctgctagcccctgttttcacaaagctccccagagtggtgcttatattggtttaagctggtctgtgggcaggtgcagaagcccaaatggacaaacctccagaagatggacctggttgtagtagtactgctgagatgtcaccggtagctgtcaacactcagtggtagaggttctgktkmtttttatttctttgttgaattgatggttctgttttcattcaagacttcaaatacatttagagatatttattgtcattgatggtacgatgagttttttacttgagtcttcagaatggataattaaagtataaacgaaacaccatttggatgtgctaagaacactaactgggcagtattctgtaacgatgccattgtgttgagaaaagaagtaccatcccaggtgcccactggtcagcaatagtagaggctaactattctcagacaccaggatggagcccatctagctaggccttggggtgctatggccaggcagctgggttcaaatcccagctctgctattgaccaacagcatgacctgaggtaaattatctaactgctgtgagttccaaattcctcactctagaataagggtagtaatatgatgacatcttcacagagattttgtgaggattaaatgagttcatggacgtaaagtgcttattacacagtgctctataaatgatagctaatagtgacggtgatggttgttccaggatatggaatgtgaacagaaaaaaaacctttttttcctttgtgttttttctttctttgtgttcctgtgcctggggctcgggcgtcaggtccaggccagttctacagcagtggagtggggtagtgtatctggtggtcctttcttgactccccaccacaggtctgagacctcactgaaccagcacagccacaggcaggagtgttttatgcttacatatttaaggggccagggttggtggggagaatgatcctycgttttccttcaccaggatagaaacagttctcatattctagggagttgcctggatgtgtgatgacacttaaagagagtctttgcaactgaaagaaggaatgcatctggtccagtcccctgcatcttcaaaggttgatgccaatgcccttttagacaaatggrcatccatcgtactcctaacatatgcagtgacagatgccattacctttctctttggtctggctcagggacaaatcaccccagctctcaggaattctttatatctgaagaaaaaaaaaaactcatccttccattgaagctcatttcttcatttcagatctcagcatctgttttggttgtctgttgctgcctgacgatctcaacacttagtggcttcaaacaacaaccattttatttgctcatgacttggagggtcatgcagggtttagctgggtgattcttccattccatgtggcatcagctgaggtcactcattcagctgaacacacctcattctgtgctgggatagaatgtcsgagaaagcttttattatatgtctggcacctcagtgctcctaccttgggcttcctcacagcatgatggtctcatggtagttggacttcttaygtgattaccaagaaggagcactctaagaggggcaaaaaagaagcttcagatctcttaaggcccagctccagaagttacacaatgtcactccactacattttgttgatcaaagccagtcacagggtcagcctagatccaagggatgggaagtaaatgccacctcttgataggaggagtgcagagaatctgtggccatccttcatccaccagcacatcctctttataagctttcacattcctcctaacactagcttcatcctctcctaaagcttcctccccttggccttcatcccatgtctcattcttttccccaaccttccactatttgagctactgaccctttgttgcttaaatcttcggctcttttgctcttctcttttctttggctctcctccctgctacttcaaagagcacagctgtgtgcagtcccacccctaacatttgtaaggctgtatatgttatgtctagatagctaactgttcgaaagcaagctgataagctttgaaaggaaatatgttgtccttccactctgacgaatattcatttgtagggagtttaaaagccaggttcaaatagagaattctgagttctgcaccaaaatatggggtctagggaaagccagtctccagtccacccctgctctgtccagcaccacaaggacactcatgagcacttgggtagatgggtaccccagcccacacatctgagctccaaacacaccktctgcaaacagtcaccttagccagttctaggaatayacacagcacagtgtactctcatgaagcagtcaaaaaagagggccaccaggtccaggaatcaggctgaggagcatttgaccagggaatctggggttttgaatatgtggccttacagggagaatgtccctttggttccctggactccttacctgtgaggaggagcatacctgatggaggattggagcagggcccttcaaagtgtgagatcaggatgagggacattttcctgggtgtaaagacagtgctgagtgtgtctgcccttgtattgggcattgcctttcactgatgggcttggacaaaccctgyactgctccatccctcccatgaggcatttccactgtgaaatgagaaaagcaatttttttcatggtagttataagaattcagtgagacaatggatgggaatggggatttgtaaaccataaagtcttattcacagctcatttttttatgatttcttattgtcggattcagaagccctggatgtgaatgaatttggactccgccctttttgagcttggatcttgcatgaatcactttacatctctaaactttggaatttcacacacacacatatgaaaatgatgtgtgggacaggtggggatgtttattaggaccttggtgctgtttctttttgttttgtttttgtttttttttgttttttttttttttatggagtcttgctctgtcactcaggctggaggcagtggcacgatcttggctcactgcagcctgggtgacggagtgagaatctgtctcaaaaaaaaaaaaaaaaaaagtgaaggatgtaagggaccaagaagagttatcagcaaagagggaactaggctgtctgaaccagacataagccagatgtcagctggggtaatgttgccttttaaaatacagatgagaagcctgcccagaatttcccattgcacaccattttcctaaacaagacaaggctttgcatacagcatccttcttctgaggaccagtcactagcctaccccatctcagccctatttgggctgtgcctgacgtgactattagatattgaaaaagatcatcttttttttttttttttttttttatttagagtctcactctgtcgcccaggctggagtgcagtggcacgatctcggctcactgcaacctccacctcccgggttcaagcaattctcctgcctcagccttccaagtaactgggattacaggcacatgctaccatgcctggctagtttttgtatttttagtagagacagggtttcaccatgttggccaggctggtctcgaactcctgaccttgtgatctgcccgcctcggcctcccaaagtgctgggattacgggagtgagccaccgcgtcaggcccaaaaaagatcatcttttttcccatatccctgttgaacatcacctagcttgaggcaaaccccttatcaatcacaagcragaccatttggaattgtgcatyagtcctctacccagcccagtgccaccctctgccagtcttgagtagcctcccagtgggtcctggtatccagaagcagggcaacccgcatcctcttaggcctgtctctcctcattgggaatacagcctgctatgaaaatccatattacctgaggaagggataaaaccrcttgcattagttatattttgctacataacaaattacccccaaaactttgtaatttaaaacaacattccttatcccccacagtttctaagtcaggaaaccaggaatgacttagccgcatggcytaagtcagtctggcytgatctctcacaacatctcaagttgttgaccagggctgcaataatccccaaactcgactgtggmtgaagaatccacttctaagctcactcacaggtgattggcaggctccagttccttgcagcctctgggccagaggtctcagtacctcgccacacaagccactccacgagctgcctcagtggccacactgcagggcagctggttccccacagagtgagtgatccaagagagagcacacgagggagcaagagtgtgtccaagatggaagtcacagtctcttaggacctaatcctagagtgacatgccttcacttctgctgtgtgctgttggtcatgaagactaaccctggtaccacgtaggagggactgcacaaggatgtgaagaccaggaggcagggttcactaaggccaccttggaggctgtctgccatattgcttaaaagttgaatccttgtaatccaaagaggcatagtctcaggatatgcctacgtacaaaacgatgcacgaggtaaaagtgcacctacaatgagagaaaagtacatcaaaaggaaaacaacgcctttctcagtgaggcaagagtatggatgacttggttttgctttatgcttttattgtagggggaggtcttcrtattttctaaaatcattaagaaaaaatgattggccactccaaaatactaattaatccttgccaagcaagagtgatagctggtgagagagtgggccctctgagttgagtcaccaccctttgggttgattggttcaacttggcaggtggaaacatggggctgacccaaccctagggatcttaatggggctggttattcttgaagacagccaccaaggcatggaattcccctctccctgtagaaagccaagaacatgactcagaggtcatgttggtgaaccagctcggaggaaaggagattcaggggtctccttgacagtcggctgtgctgcagctcagtccatgagtctttctccsttcggagttgttgattcccaracagccagggtttctctctctccagctctcccagttccaggatgcaaacagggtgaagggccctcaatttccgttcgttgtttcccccattggaccttggctcarcttccaactcggtggttttgttttgggtttacttggagaggaaaaggtggttttcragaatttctagagcatcktccatcatactcctcagtgcatggtcctgttatctccagtgggccatactggctctctctttagttttattcacttatttacttccttttatgtcccactgctgtgccccctctctcaacaggtaatgtgtttaatgtgtgttttttgttgccatgcgcccttgcagaatgggtgatgttttttgtgtctatatttttaattgtgcatattgtactgtgttaaatcttgttctttttactcaacactgtgtttctgagttcccccacggtgccatggtactctgatcctttgctcctaagggctgcacagcactccccaagatgtccctgaacacttggcccaccagctccccagccatgggcttgcagatgtctctactcccctacccccaccacacatagcacaggagagaacactggcttacatgctcccttggggactgtgtgaggatttccttgacattaacatcctagggcagaaccaccagtttccagacttttctgcttcccatactggttccaacagaggatctggaagaagccagagcagagaaaactaggagaaggtgtgggtagagtctggggaggtaagcaggggccagagcatggtggtcctttgttgttagccatggcaagggcaaagattttggtttttatcctaagaacaaagggaagccattgaattaaactaaagcagaggttcagatttatttttaagtaacagtggatctttagagatagaaggaccctaaaagacccctagtcccactctttgaatttacgggacacttggaaggccccctgaggtagtgagatggatgccgaagatcacacagccagagagtccaggccccctgacaccttgagaacatggtgtgagcctcccaggctgcaaagaccatctgatggttggcagcctctggaggcttgggatttgccctgctgtcctggggggaccttgggctgaagagttcacttcctgtcacctggattttcctagacctctgagggcatttaacaggatgtttcaaagaaccccaagccagaacccagccttcyactgccatggggcctcaagccttagactttccagatatccacaggcaatccctgttgaacttcatatgctagcttaatgagagagctgaactagaggcttaaagatgagcatggcagtcctggttttgcctcttattctctggatctcatcagttttctcatctttgaaatgagaggatggagcaagatgctctctcaagtctgtcccttcctccccaagcatttgtgcttaagtctcaggcactggggacctctggtacctccctgccrcagggcctctgctgtcagctcttttagttctcagcatgggcagctgctgggggaagcaacaccctcagagtttcattgacccttttcaccctcgtacttctgggcctccacgccaaagaggcacaaagaactgagcctttgtttgcagcaacaaagctgtttgcaatttcagatagaaccattttattatatcccatccaaagagtacttgagttgtgttttgttttgaaagcttgttagcattctgaacttaattatctggcagagacaaaactcctccacccccagtccatgcccactccatccaccgaccccagttgccagccagcagcctcaaagcccctgcccatgtccaggtggggcacccattgtcctcctggggggctcatctggcagatgaaagggaaatccttactgctgcctctccctcactctcccctttccccatcatctctagattctggctcccatttattgagtactcaccatgtgccaggcagcaggctaagcattttgcatgttttaattcacagcatcctctaagtcctatgaggcaagtttatttgctcttttaagacggagtttcgcgcttgtcacccaggctggagtgcagtggcgcgctctctggctcactacaaactctgcctcccaggttcaagcaattctcttgcctcagcctcctgagtagctgggactacagacgcacaccaccacacctgactaatttttgtgtttttagtagagacggggttttaccatattggccaggctggtctcgaactcctgtcctcatgtgatccacctgcctcggcctcccaaagtcctgggattacaggtgagccaccatgcccagtgactacatggactcttataacctagccttacagtcgtataacatcacttctgccaccttcactccatcagggcaatcagccagagagggcacatagatgccacctattgatgggagaaatggtgaagaattacagacgtattttaagaccaccacaggagttaagttacagagaagttaaacaactggcctaagtcatgtagctgataagtggtgagcacccatgttttagtccagaatcttcttatgtcaaaatttgattccttttcccacgcccatcctgcctgcctggagagtgtggagattaacaagacttgggccctgccttcagccagcttaccatccgagatggacttgctgctggcccaaacccttatcatcttcctacctcctccttgcgtggatctcttggtcgtgttgctcactgatgagcaggactaacagggtggaggggttgcagagagccagtacaaattcccagaactccaaatccaccacctgtttgcttttgcctttgctgggagaagctggaaattttttcctccagggcttctctcactaggagtcctatcggtcagtgttgaggttgaaacatagaacatctttaaggcaggagataatcttagtgaagagccaggcatagagcaagtgcttggttagtgtttgccgtgtttcagggactctgctcttcagcaccatatatcctctaacacctactttgcctgctatacacccacaaaaggtagcagaaaatagggagccacctccagcctctcccagtgagaacagagatcacagcagtgcccagcaaggccaggctgttcctctcagagcccacrggagtrctgagggtgtgatattgcagtggcagaagtagctgattgggtgtattccttctagactcttccaccactccgcccttctcagttcctctagcagtacctcctttgattctggacctacccaagcaaaacctcaaaataggccaggtaggcaaacctgctccaccaatcccccttgtgggtttccagacctttctgtggagtaagagaaaaatcatagactgtggagacccaccaacctrggttcaagtccagttttgtcactgcctggctatgtgatcccaggccagtcacttaacctctctgtgcctcagtggctccccatgtaagacatgggcaatcatgtcaacctgcagcacagttgtgactattgaacagcataagactgacaatgtacctggctccaagctggcaggataggaggataagggagggcaaatcctccctgtggattcatctcttcacaggagagagctgttgggaaattgcccaagatcacccataccgctcctatatcgccctccatccccacaatgagataggagcaacaatcctatgaacaagaagtcagtgtctactggtggcattttggacacagttgacaggccatggagcccagcatcatcacccagatggttgaggggtgggagtgctggagacttgttaccaatgacgtggtgtggcgggcagaatgcctggtcctaggagtagggagttagtctcatctcgtgtgtggctaatagcatgggctctggaagcagtctgcctgggttctagtcttagcttctacccatttattagcagacctcagccaagacttaacgtctctgtgcctcagtttcctcatgtgtaaaatggaggtaagagcagcgcctaccttctgggattgttgtgaggattaaatgtgttactacatgtaaagcacttggaaccgcacccagcacacggtaagtcttcaacgttcaggctctgcccttggctggctgtggacctggggcaagccacttcysctctctgggcctgtttctccatctgagaaattartgggctgaaccagatatccctcagggcccatcaggctctgacagccggtaattcatgaagtccaggcaggtctgagtgtcatgttcttttgggtagggctccctgtgaccgctggccacattgggaagggaagaaaagctaactgggacagagcttgctttctcatgtaaacaggaacagactgagccagccttccactccagttccggtgggctggcagcctgggagctcaaagaatgagtcactgacaggagcagccacagttctggagctcaggcggcaccagctccagggcacagagtagctgcagagttcaatggtgggatttgggagccgggtgacaggagagggatcatagcgtttccctgtgccccaggtgaaatctgaaggccatttgcctgcatgccttacccaggatcctacagctttggcctgggatactgagctttgccttccagggcttgcttccttccctccatactacatgtatactttgaggcttcatcagctggggaccaggcacaaaatctgcaccgtggcccccatgcagctgattaaggttcaaggttctgscccccaccctcccccgaccccagacataggacctccctgccttgctgcagtgaccctttactgagaagcggcatggcaaaatggaaacatcacttgatgctggaaagccctgggtttgaatctcaggtctgcacttacttggccaagacacttaacctctctaagccttgatttttcttgcctggaaaatcccatcatcctgtgcaagaggtgagtccrtgaggagcccaatgttaaatcacttgtcagcaagctgcctctgagtcagggtttcatgcrtggcaaagcagctacctcgctgtgaactattgaaaagccagcccttgacacaagcagccrcctctcactgacaaaacagggctgacgatgatcgtgtctacctcatagggctgtcaaaagaagcaaatgcaattgcgtatgcagaggcactttgggaactgcagagagccagcccagtgaggtggtattattcccagaacaagatagtgagtaaaggagagggcagggaaaggataagagctgacgtcatttctaggagcaggacagagccsaaaagaacaaacgggcctaggaccacagtggtccgtgcaagtggaggctgtttccttcactgctgtgtccccagagcctagcccgtgcttgacaaagtaggcccccagtaaatacttttctgaattgcatgacattgaatctttgtgttcccagtgcttgacgtataatcggcgcttaataaatgtgtgttggactcaggcacaaatcagcagagactaaaaccwgagtggcaggctcctagcccagttctccatctttgaaactaacaccaatttccatcacagacatccactgcccacccccgagatcaggggttcttaacctgaggtccatgcatctccccaaaaattatgtgcagaatatagagtgtgtttgaaacatatcttgctggattaaaaaaaagtcagatttctacccagaaaaatatctaaataaatcctgctctgaaagatgtacatctaccagttgcccagtaaatacccatcagttggatgcatctggtccccagggctgccaggtgaccagtagtcttaaaaaaattgtaagcctccccctctctgagctacacatctagggccctatgagcctrcagtttttcctaccacctccataatgtgcaagacagttaacctatctttcatatgcaaaagtaatgatcacacattatccgagggacctgcctctggagtggctgttctgctgctgggtgggtctcacagagcctcgcatactctgtcaatctcttacatcctagtgtatgcatttagatgtgacaggtgggagtcgaggcctgaaacctgagaatcctgactaggcttcttgatatcaactctgaactttgatctttttgaaaaaaatatttttctcactagaaatacatgtgtgcatgtgtctgtgtatgtatacacacacatatatatttatctattagaggaaattgaggatatgtaaatgaaatcacctctaatctcaccccaccccaaagaactggtgttactacctggctttagtcttcccatttactgtgtacaacatttattaagcacttactgtgtgccaagagttcactgctccatgctctatgatctctatctcatgttaacctctaatctcacatcaggtatttgctatctttttatagacatatttgtactttcttaatttttaaggtcagtgagattatactgttttgtaaccttgcctttcttagtccataccatcaaaattttttcccatgttatcaaatattcatcagcagagtcatttataatggctgcataatgttttattgcaggcaaatttcatgcttctcagactggggtgcatgtatccctgagggcaaagccataggataaatgtcacacatcttcctgaagcaaaatttgtgattcagagctttaggagagggaaataaaacacattattttcatatcaaaacgagtacaaatatatcgtagtgtagaatgcagaacacccatatatcttaatacaggccaggcgcggtggctcacgcctgtaattccagcactttgggaggccaaggcaggcagatcacctgaggtcaggagttcaagaccagcctggccaacatggtgaaaccccatctctactaaaaatacaaaaattagccaggcgcagtggcttgtgcctgtagtcccagcaacacagggggttgatgcaggagaattgcttgaacccaggaggtggaagttgcagttagccgagatcacgccactgcactccagcctgggtgacagagcaagactctgtctcaaaaaaaaaaaaaaaatgcagccaagtccaagatcatgttattccccatagtcccatgttccctctcctctgaggtttgcagaaacatctaagaagcgctgaattctagttcaagcccttctttttacagataaggaaactgagacccagggagaagaagggattgcccaaggtccaagtatgtgctctgcagaaccaaggcacagaagccaggtaacccctgggtctgtcccttcccaccgttccatatttggcatcacctgtcaactgtgtgtgggcagagaccttgccccttgagaaatcaaccccctgcttatcaatagtagcaactcttgccttcccacgtgatccttcttttagcagtagcttttcctttttcaccttgctcccaggatctgaactgactgctcaggtggtcaggaactataacctccatggacaaaggtagataccctctcgtgaccctcttagactccattggcacttagatttattgcttaatgcactgtattgtaaacatgtctttactggtctgttttagccacgagactggagccttttgaagacaagwattatgtgttagcattataatctgccatttattgggtacttactaaatgctgaacactatgctaggtgtttcrtctgtagtatctaaaatatttataacagctgccgggcgcagtggctcacacctgtaatcccagcactttgggaggccaaggtgggtggatcacttgaggtcaggtgttcaagaccagcctggccaacatggtgaaaccctgtctctactaaaaatacaaaaattagccaggcatggtggcacacacctgcgataccagctactccggaggctgaggcaggaaaattgtttgaacccaggaggcggaggttgcagtgagccaagatygcaccactgcactccagcctgggtgacagaacaagactccatctcaaaaaaaaaaaaaakgtatatatatatatatatatatatatatatatatatatttatatttataacagcttttcaaagtatgtattattatctccatttatcaggcaaaaaaaactgagtaaaagagtgtcctttgcccatcatcattcactcatttagtaaacatttattgtagccttacacaccaggacttacgctacatgctgtagacatgaggatgaacaaagctgataccactctgccttcatggaacttcttggtgggtagaggagacgatattcaaaaattattttacaacccatggcaagtgtaatgtagcctgaagcctatctgactgccctggattgaagccacctcyacccttaccagctaagcaaccttgggcagctctgttaacctctctgcacctcatcttccttttctgtaaaatggggataatagtagtagcaactccataggggtgctgtgaagaattaaaaaattaacccaggcacacagagaagggcccctgcacattccaggcatattgctgctgctgmtgmtgatgatgatgatatgaaagagaggcatggggtgctcgtatgtgatagagcaggacctacttcaggggacatctgattgaggtctacaagatgaataggtgttaccttggcaaagtgtgtgggaggcaggggaggggarcagagtgttggagggatgttccaggcagagagaacagcatgtcaaagcatagggggcgggcttacctgaggaactgcaaggagtgaagctgaaatgggcccggctgggaagcaggagcctgtgctacaaacacagctccaggaccgggttctctgcaccacagtcttgatccaggccatgggagrtgctcagtaaatgtttgtcaagtgagcgagcagctcatggacaaacggctatgctgggcccacatggttctgttgtcacccaagtccattgtcccatatacagcatgatatgtagacagccccttcccagctgtcacactgtatacatccatgttttggtccctcttttcttgacagtaaactaaatcctgtgagtttgggtgcagacctccaatatctgggactcactgaggtggccgcagctagaatycccatgctatagccagggrctcagatctaagccaatggtattcagactctttagtagcagaactctgccttgaaataatcttagcagaaatccagtatatggtacagggacaggcagagcttctgcccttgaggggcagacatagggcctcagcccctgtgcacctgagaaaacactagggctctgtaaagcacagttagaaaaactagggttgaacccaaaccccatcttccaggtggggaaacttaagatccagagagggagtgactctccggagtcactagggacagacccagaactggccccagacatctggtatcaattctgctacaccaagattttccggcacttcgccctaactgcccccagcccctctcatcgtgcagggagtcttgagatggggtgggggcacatggatgtggtcttgtcaagagtctagcctccagccccagttagggcatggcccacatgagacaaaaatccacagggcaggcatgggtgggttgctcagggtcatggcctggttatgccatgtctttttttttttcctgctgctgcttcttttttaattgagtttgaggtggttgttttttgtttccttaagaaatggaaaagaatgaagctgcgtaaatacaactatattaactccctggaaaacctcctgccattttaactctgttactggagaaataaaagagaaataatttgtccacccacacttagctctttctgacgaaggtaggtgaatattgctttgctaatcgagggtgactgctggaagtggagccacgctgactgatcccagattgagaggcagccacagccaccccaaaaggggtggcagagccctgcctgtggacagggccggagtcatcggcccgcatggcccatcttccacaggtctcccccagccgatagtgatggaggcactggacgaggctgaagggctccaggactcacagagagagatgccgccaccccctcctccctcgccgccctcagatccagctcagaagccaccacctcgaggcgctgggagccactccctcactgtcaggagcagcctgtgcctgttcgctgcctcacagttcctggtaaggatggcacaggcctcacaagggtctggagagagggtgggtggagggccagcctcccacttcctccccaggatggccacctggaaggcaggaggataaggggcctccctggtgttcctcaggagctccaagccctcaaggctgggataaggggaaggctggaattctgagctaccgcaccagcatctgagacctcacaccctgcctccctaacctaagaatccagaacacagggcctccccgacccctgagctcccagccgtacagggttctcctgagaactcctgtctgtggaggcctttctaggagactactcttttgatgtacatatttgtgaggtcctctctggaaagggctttctcttggttcccttcagtcagcttttctccaaggagagtcctgaggcctccccgggcacgcagcaccggggccctgctctcagctgcccggtctggaccttagaggttcaggagcctccatgcagggccaggttgaggctgcaggtgagctctgctgggggaacacgggggaagggggccggctccatactcagcctgctcccctgtgccccagcttgcctgtggggtgctctggttcagcggttatggccacatctggtcacagaacgccacaaacctcgtctcctctttgctgacgctcctgaaacagctggaacccacggtaagtaagctttggggagtcctagggtagcagggatctgttgggggcctctagtcccaccctccccaacctccagattgggcttctctgagttcagaagatacttccaagcccctgaagttsttctgcctgctccccatcccagacctgggacgtgattttcagaatcttggttttgtcatcattgcaagagctgagaactctgcccccaccaccaccctgacctgtttatctgatgttccccaggcctggcttgactctgggacgtggggagtccccagtctgctgctggtctttctgtccgtgggcctggtcctcgttaccaccctggtaaggcgcctcctgaccccaacctcaaggctgtcctcctctgaccttgaggcctggatttctaccagctcccatctgacttataggctggacattctgggtggggcaaggagggatacctatctctttgcacaagtgtgccagcctggggcaagagcctccttctttccgaaaattggtttgcagtgatctgggctaaggaaaggggatgagacagggagaagactggtgtaggaactcccaagccccactgagaaggcctgaagccacaagaaacagagagctgggagagggaggggcagggaaggagagtgggcatggagcctcccatcgaggccaggggcagtgccttgtggacaactcccaggagagcagagctgctctagacacactgagggagtgggggggcgtcaatcccatgggcaytccaggaacacggggggcagccagcrtggtccgaaatctgtgatgctgtacaccccaaccaggtgtggcacctcctgaggacacccscagagccacccaccccactgccccctgaggacaggcgccagtcagtgagccgccagccctccttcacctactcagagtggatggaggagaagatcgaggatgacttcctggacctcgacccggtgcccgagactcctgtgtttgattgtgtgatggacatcaagcctgaggctgaccccacctcactcaccgtcaagtccatgggtctgcaggagaggtgggaggggtggaggaggggtgggctccacgggcccttgagctcttagctcctgatcagaagagtggatgcctgactctgactcctggtgcccagggcagagctggcctyatagcttagccagtgtagacatgtgctatccaggtcattcatagagatcaaagtgccccaagatgaatgctgagaaatactgttactgcacacgcacacataggtgtacacatgttcacacacactctcccatgctcaagtaagtttgggtggttttctttgctgcaggacttgtcagggcctttaacatgcttatgttcattgtaaatcagcaagggggcagtatgtggcatttcccaaagtcacttgaccacggaactctatttttttgttttacttttattttggattgagggggtgcatgtgcagtgttgttacctgagcatattgcataatgccgaggtttggggtacaaatgatcccatcacccaggtactgagcgtagtgcccagcagttagtttttcatcccttgcccgcctctctccctccctcctctagtagtccccagtttctattgttgccatctttatgtacctgggtacccaattagaacctgtttttatagggtagctcatagtgttccacagagcacactttgagaagtgtagacaccctcgtttcagagtctaggtgggtgagccagatcacaccaaatttgagttacccatgtgatgtcacagaaagaacactgggtgtggagtcaggaaacctagctttttrtttcagctctgccacccccttactgggagagcctggacaactcttggcccttcmtggggactcagtttctctttctatgtaatgaagccccatcctgtcctgtgtctgagactctgagtatagtagagtttgcccattgtagacatccttgcggccaccgtgctgctcctgggactccctccttcctgacagcgggggtcctggcctctcctggacaatatgtccttgactcaccagcagcctcatcccagggctgttgggcccgggactgcagtggggagggtctggagccatcctctcgggcccaagccccgcttctgtgcttcaggcaggtgtcccctctctgagcttcctggggaccacagggtagaacttcctccaacggtgatggaggagagtccagggtaaggccatgttggggtagctttggatggaacttttagaactggagccccaaatccccactaagttaacatctccactgcaggaggcaggagatagggagtcaggccaatgcctcagggctgagattcacgcttctttgtcagggggtcttgtcacactcccactcctcttcctcaaccccaccctgttcccagctgatctctccctccctcattttcccagccctggagaccccagctcatgcccgtccctctgcccctgaggctcacactccctttcctggtccttccaggaggggttccaatgtctccctgaccctggacatgtgcactccgggctgcaacgaggagggctttggctatctcatgtccccacgtgaggagtccgcccgcgagtacctgctcagcgcctcccgtgtcctccaagcagaagagcttcatgaaaaggccctggaccctttcctgctgcaggcggaattctttgtgagttcccttgagccggtcrccccactgtgtgcagacccatgtcaatcatccacctgcccaggtggtggagcgtggtgcctggaactcagcatctgcagtagattagtatcactttattatcagctctcccaccatcttgggcaagctgctttccctctgagcttcagtttcctcatctggaaaatggggatgaaaataatagaattgttgcaaagattaargagacttataacatgtgcagagcacccagccaggtgatggaggtacagtgacaatgctaagtctttattgcccagtgctgtgctctgaaagccacagagaaccttcacttctaactcttctgttttcccactttcctcctgccgagcattgttcttctgcctttgaaatctctctagtggcctcccctcgttaccacccctggggccctagcttaggtcctaatcacctccaccctggcttctgcagcagcctccagctgcctcctattggactttgaggggctcaataaatggcacccctgtttacctgcctgagtgctcagccagttaagagctaaggcataggagattacaatatcacctttgttgtcaataaaatacaggttggaaatgtggcttagcagggtacagcaagagtgagcctcccgatactgagacccagaattacatgcactttccaccctccacaggggtgccggcacatctcggaccttgccgcatgggggcacccctataattctttcctggcaggagggccctgagaggaggaggaaggaaggggctgaggctccaaagctccattcctcaaccaaattcaccaaacaggtaactcctcacttctgtgagcaggaaaaggcaagaggccaagagtatctggggtgagttcctcctggtagaagccacaggggtacagaagcaggtgcctcctccctcatagctcccttcctttggcctccgccctgggcctgtctggaccgggtagctctcccctgtgagaagacctccatcatcatctgatctgctgctccaagttctccagaacttggtaccacctgcatacaccatcagcaccccttacctcgtgtggccccagcctccttttccagccttatgccccatgccccacccctgcagggactgtcyacttcaaactgggccagtctcgtccgtgcctttctcctcctgtgcctttgctcacatcatcactcactccagatgcctctagaaagccttctttaaccaccccagcctcagctccttctctgagctcccactgccatcatctccccttcgagaaagaatcacatcctctacctcatttcctgtccggtgggtctttgttgaggaaggagcgtggcctgagcacccactctgggggcagttttgcacgtgttgtatttttattttgattttcacaatcctggaaagtgtgatgatcctcattttacaaagcccatacttagtgtgtccaaaaacaatgaacagtgtgaagttaggtgcagtcaggggctaagctggtggacagactggaaggaaatgcagaggcaagaggcatggagagtcatcccggaagatgtcaggaggagacagactcataggtgaactttttttttttttttttttttgagacagggtttcactcttgttgcccaggctggagtgcagtggtgcgatcttgtctcactgcaacctccgccttccagttccaarcgattctcctgcctcagcctccctagtggctgggattacaggggcccgccaccaggtccagctaatttttgtattcttattagagatggggtttcaacatgttggccagggtggtctcaaactcctgactttgtgatccgcctgcctcggcctcccaaagtgctgagattacaggcgtgagccaccgcgcccgggcagaggtgaactttaaagggtgggaacaacttggagagatgggggtaggggagaccagygccctcaggaggcagaacgtcacaagctcagactcagaggcaggactgagaacagcagattaacaacaggggagaaacaggcctaactggaagtaaagagaggccagattcaagaagccctcacatgccaggagagaagttcagactcagagctctggacacagacagtggttgggaggtgcagatattcctgggatctcagaaagaggcttctctccttctggagaatcagggaaggcttctcagaggaggcgggacatgagatgaggatggggtgtgtgttaccacagagcaagcagcacgaacctaggtcccgagatagggatgcccagggaggaatgctgcccagggagcatggaagaaggcagccattggccaggtcactttttgtctttttcttcattcatcagctatttattgactgtctatatatggcaggctggctctccataaacaatagtcattatcatatttattacacactcagcatgtgccaggcactgttctgaatgcgtcgtgagcactaactctcttaatagtaaatgtttgttgaatgaatgcgtgcactcaagccagcccctgggctaggagttgggggcacagcagcccctggattcaaacatctgtgagggcccatagctgctcacaccccgtgtcctccttccacaggaaatccccatgaactttgtggatccgaaagagtacgacatccctgggctggtgcggaagaaccggtacaaaaccatacttcccagtgagtactcactgtcccagagggatgggggcaggctcagcttcacctggggatcccctcaccctgaggaggaccctcagctgggcctcyaggggtgacaggactggaggaggtgggacagagggctgggggttgctggctgaagggaagcgctgccctggtgaggccagaggcgagtacrtttcctcgcacagcactctctggtcctttgccctgcctggccacatgttgtgctggaccctctagaaacccaaagagaaagggtggtaatgacagcagttcctagccacactgtggtaaccgaaactcttttcagagtgggcagattttaaggaaaggaagttaaggcttagagaggttaagtggctcacctgcagtcccacagctaggaagtgcagagctgaatttcagacctgggcctctgtgatcccagagtcaggctctctgtctacactgtgtggagtgtggtcgaattgtaagccctctaacagggacatccactcccacaggcaaatgagttgtctctgtcagggagtgagctccccattactcagtatattcaagtgaggcggcacgagcagtcccctagaaggtctgaaaggggttttcctcctttgggggcagttagaccaggtgacctgatgctcctctttcagccctggggtatcattttcagataacttttatcaagcctcgatgagcctgccaccctcgccaagttctgaccccagtccccagggctagcttgggcgttgacttgttgaaagtgaatccccataaacctactccattcagtttgtggagtagcgaggcttttaaaaagcagttttgccatcagcatctccaacaacatgtaagatgtcatgacttatttttaacttttaaaatatcgacttgtagttgctatggttacacagtctctaggtagttccggttaaacaaagagccatttaaggccaggatgcattattcagggatgctcacctcttccctcgwcttgccctccccgatcccagccctacctggagggagggactcgagtatcctagaaccttggactttgctggctgctcagaatggccactgggggaaggtgggagcagactaggattccgtgcagatgcagtccccgctgcattccaagaggcttgagctgcctccaaccatgccctgagcctccaggcccccgagcccaataaagaatcttgtctgtgtccagcaagaatggagcctgtgccctcagagactgggttggggggtgcagagggcaggtgaggctgagcagaggctgcctctgagatccaggacgcgctgaggtttgttctctcattcactgggcacacatttcctcggctcctgccccaggggctgaggatttagacataaataggacacagactctgtgcacaaggagcttccagcctagcgggggagagaggtccatgcacagttacagtcagagtgaacagtaacccacaggcagcattgagaacaagatgctgggagcaatttctgtccccttctccgccgtgtcccaagcatcaaagcagtgctgcctggcacatggtagacattctgcacctatttggactgttttaatttttgtagagatggaggtcttgctctgttgaccaggctggtctcaaacttctggcctcaagctgtcctcgcctgcttcggcctcccaaagtgctgggattataggcatgagccaccatgccggggtctgcacctatttgaatgaatgaatgaataatatctctcaaatctacatcctcttctccagcctcactgccaaatgatgtttttgaggttagggctttcatgttgtccaattccaggggacacaatttacatagactacattgacataagtgccccctggagccgtgccaggctggacagccctgtgatccttgacacttcttacttggatcattgcagtaaacctctaactggtcttctggcttccacactctcctctccatcttctaccattgtcaccaaaatgaggcaaaacaaatctaattgtgtcattctcttccttaaatgccatcattgttgtcaccctygtaatcctcaggtttaagtccagcttttttttttttttttggggagacagagtctcactctgctgcccaggctggagtgcagtggcacagtctcggctcactgcaacctctgcctcctgggttcaagcaatttctggctaatttttgtatttttagtaggaacagggtttgactgtgttggccaggctgctctccaactcctgacctcaagtgatccgcccacctcagcctcccaaagtgctgggcttacaggcttgagccaccacgcccggcctaaatccagctttctaagcctggtttataagaccctttgtcgcctggttcctctccagcctcaccactcaccactccctaccctgcactgtgcacgtgaatctgacagaacagcattgcctgcagacaaggagaagggagacggcccatacagagcttcctgcccctctctgctgcaggtcccccaaaagcccccctcccgtttaccctgtctcctctccatccctgccaccctctacaccccctcttcacaagaactgccccaaatcacctgccaaaaccttagacattggggttgggctaaagaggcgaagcttgtgccctttacctccccaatttctcctactgggtttaggatccttctttttatcctttaacttgtggaacttgtaataatgtcaggaataacagcaactgatacttcgtgttggtcctagttactggcataaggactctagttgttaaagttaactcctttacaagataagcaaggtcaytgtggaatgaccatccccagattacagataaggcacagggagataaagtaaattgtccatgttgacactgctagtaagtcagaatcaggatttgaacctagcctctctggctcagcggtgtagactcttaatgactcccctatactgcctgtgagagcctcctaatgtgcacactggaagtgcctttagtccagtcctccctattataggaaagaaactgagkcctggacaagtgagctgatgacaaaactaaaccagaacccaggaatctggggccccagccagcttcccccttaccccatacaacctcagtcttggcctctgcaggctgacagaatagtcaatgcagagaggctgtagctggaacaaaacaaaatctactccaggaagaagagcagagtgggggctgggcacagtggctcatgcctataaccccagcacattgagaggccgaggtaggaggatcacttgagccaggaattggagaccagcctagtcaacatagcaagacctcatctctaccaaaataaacaaataaaaataaaaaaataaatttagccaggtgcagtggctcatggcttagtcctgcttactcagggggttgaagcaggaggatcacttgggcccaggagtttgaggcggcagcgagccataatcgtgccactgcactccagctgagtgacagagacccttttactatgggatttgacatgtgaataaattgaaaggaaaaaaaacctttttgcatatgtggacatgaggctgagaccccacagtcttaatccagatagaggagactatcgttttcatgttaatagcctccgtcaactttctactcccgaatcttaacagccctttatatttataaagcactttacagtttacacagaactttcacatctcttttctcattcatcttcccaacagcccaagcaagtaggcatctttgcctccatttgacagataggaaaactaaggcttagaaaggccatgtgttttacaagcctacacagcaagtcaatgacagtgtgtactcaagctagctgtctcttgctgaacaagatctgtacaggaatttccctaggtaattccattgttgacttagctgtctcctctccagaagctaagatgcagtgagtatagggcaacttaagaggcacaggctaaggatagagacagaggtagagacccggggacccccctctctctccaccctcctcctcatcctgagtcctcacctacaaaatgaaccatgaatgggtcaatgttttgctgctgggcaagggaaggaagaactgctaatgtcgcagaagaagtgtgggtatgctggaataggccagagcaagtgggtcctgcaccagagggcccagtttccagccttacttgtctcccaccaccccagaccctcacagcagagtgtgtctgacctcaccagaccctgacgaccctctgagttcctacatcaatgccaactacatccgggtacgtattcccaccctgacggcctcttgctcaaggggaggcctgagtcgatgggatccatcctccagccttgtccctacaccagtctggctcctgccagctcctgtgaagagcctgagtgtggggatggggtcctgggagcactgcctctgaccctgacagcctggacttggctggccgcagggctatggtggrgaggagaaggtgtacatcgccactcagggacccatcgtcagcacggtcgccgacttctggcgcatggtgtggcaggagcacacgcccatcattgtcatgatcaccaacatcgaggagatgaacgaggtagggacccccgtccccattctaagtgtctgctacattgcgccctacactaagtatcttgttctcaaattaatctttatgacaatctcaagaggtcggcggygttcactccgctgccaagatgaggagatgtgaggctcggtaaggttaagtcatttgccccgggcttcacagatagaggcatgcctggaggtggcctctccacttccagtgcccgtgaccttaaacacagcactctgctgcctcccagcctgccaggacagatgttggctactcctgtacccataagggcccatttaaccgaatctccataaaagtccttcagatgggtagcacttctgttttccagaggaagaaactgagactcaggaaacggaagtagcttatagagtttgcagctgagatttgaacccaacactctgtagcagcaaccctgttgcccttgtgtatctctccgctggccctgaagagagtgtagagagttgtgggaagggaacaggattgtatggcagcctgatctgggcccctgcagaaatgcaccgagtattggccggaggagcaggtggcgtacgacggtgttgagatcactgtgcagaaagtcattcacacggaggattaccggctgcgactcatctccctcaaggtgaggcctggggcagggctgggtgaagctgaggatgagtgtaggggcttaactgggggctccacagagaacaggtcccccaagtccactgtaactgacataaaagccagtgtcactcccagattttctgataattacggatgagtgagaggtgaatggacttgggagccagaggtagaatcaaaccccttgcatttcccagtcctcagttacatttcatgctgttgggctctctctgtctctctactctgtcattcataatgcattctagctatgcttcaaatgtacccaaggccaggactgtctggatgaggggacttcagcagcctccagcactgtgcttataattgagggttcatcatgactttgagatcctccttagaaacatctcttcacctgggatcctgggcttctgrcctgtagtgcccaatctgtccacaagagggcaggcactctttgctgctttggggttgtacagggggctgtggttacagaaaacagcaagaaaaaggaagacacacaaaatatgagcaatacaaaacagcccagaagagtgggagaaggtatcctcccaccctgaagttgtgcttcctccaggatcagcataatagaggagactgttcctttgaaatcgggattagtggattctgtttgtgagaaataagacccatgtttagggaaggctgtaattgtaataaccccaaaggctggaagaggtgaaccaggcatcaggaagctgatgccctatccaggagcagccaaggaagttcattgatgctgacagccacaggggttactgagcacaagaccggagacttggccctctgagctgttccctctcccactgaataggggccaggtagggtgtcgagagcatctcagcccccaagagcagtgcccccacaagcagctctaagatccaggtcttgttggagggcatgaagggccaggaagtgaaaagcagaagtagtggtcactgtcacagccaggtaactcaggacttgagaaaatggcttcctgagtagaaattccccagaaagasaggctgagatgaggcagggctgctcaccttctcaatgccatggagatgatgagggaagaaccagggcatcttggagtttgagggaatttacttttgtccataagacattacgagcacctggcctgagcttggttctgggttggatactgtgaacacagagcttcccaaagcttggactctttccttgagaagcattgtataagatggtaagtactgagctagagataggtatatagaatataggatatgtatatcatatgatgttatattggatgaatataggatatgtatatcatatatgtatgtatatatgatatacatatcctattatacctatatataaaatatatataatataaatatataatatataaaatatatataaaatataaatatatatataggtgtgtgtgtatatatatatgtataaaagaaggacactctgccagctgatgtgctcagggagggcttcctgtacatggtggtgctgaatggggtcttgaaggataagtaagagttgaccaggggcaaacaagtcaggagaacattcccagtgagaaaataataaaagtaaggacatggaagatggaacacttgtgtgcatgtatgtgtgcacatgtgtttgtgtgtgctgctgagattttacctacaaaccttttggagtgtgggagcattgagtacaagtacgcaggggcaggaggtgtgtctggaagggcaggccctgtagcagttgtcttcctagccaggtgaaggactgaggagagtgggtcttattctgagagcagtgagagacattgaaggatgttgtggtctgctcaggctgctataacaaaataccatagaccaggtagcttgtaagcaacaggtttatttttcacagttctggagactgggaagtccaagatcaaggcaccgtgaccctggtgaggacccacttccagggtcatgtcctcacgtggcagaaggagtgaaagctccttttgtaagagcactgatcccattcgtgagggctccgttctcatgacttcatcacctcgcaaaggccctcccttcaaataccaccatgttgggatttggtttcaacatgtgaacttaaggggacacacacattcagtccaaagccacaggttttcagcaggagagcagcatgtccagatgtgtgttgtacacagactattttgactctgtggatctgagacagttggggatgaggcagaaatctcccacactcgagcaatgataaaggtcaaggtggcagtgaagcggggagtgtgaagaggtggtaaaacttgcagcactaattgcagcactaagatagaggcgagtcacgcaggcgcaggcgaggcacagcaagaggcgaagaagagtcccggggctgggttatgtgacaaagggatgactgggggaccatttgttaagataaggaaccctggagatagtaataaattggagaaggggctcttggcccctcttggatgatcctgaagttgttggggcaggaccaaaggcaagatccatgccaacgctgctgaccaacccccaaaaccaagctggctttgggtctgtgtctggtgccactgggcaatgtggcctagatggaagggtgaaggggtcccactctcagtgttcttcctgtgttcttcctccttccatctcatctctatctctgggctggtttgtgagctgaaagagttcacacatacctggggtgggcctctgtctcctcgacagagtgggactgaggagcgaggcctgaagcattactggttcacatcctggcccgaccagaagaccccagaccgggcccccccactcctgcacctggtgcgggaggtggaggaggcagcccagcaggaggggccccactgtgcccccatcatcgtccactgcaggtgggtcctcccagccagccactggagcggggcagccccccacccgctgggctgccctgcccctcaccccaccggtcccctcggccctcagtgcagggattgggaggaccggctgcttcattgccaccagcatctgctgccagcagctgcggcaggagggtgtrgtggacatcctgaagaccacgtgccagctccgtcaggacaggtcagcccaygggcgggagtggggacacacaagggagctagagccccgagcgggtagagggagagacccacatgtgcatgggcggggggtgaggggcagatggaaaacactggyacggactgatgggcagacaaggagtagcgaggacagctgggtagaggggcaggatccagacagtggggggccagatgaagagggaagaaaagcagagctggtggataaaaggacagaggccgaaagtggtaggacatgtcatctgtgtccctgataggaaggggcagagggtaatggttggcaagggttggtctctccaagacgcacaggggcaaggcctggcaagtgattgctactccatggcttttggggcacctcccacagcccatccctccacgaccctgcccccactgtgcatctctgccgkgcaggggcggcatgatccagacatgcgagcagtaccagtttgtgcaccacgtcatgagcctctacgaaaagcagctgtcccaccagtccccagaatgactgcgcttctcctacaaggttctctgggcactgcccagcctgagtctcggccctcacccagggccctgcctcgggtcctgggcctgctccccgcttcctccccttcagtcagctccctctgtcctctgtcagcctggcctgacccctaccctccagcattgctcttcctactgtacatattggggagtggggggcagggtcgggaagggacatgccaggccaggcctggggccccggggcctgacccacaccacgcagaccccgggctccagtttttaacgatggttccatcaatacctgatccagaatgtttccstgctacactttgtgtcctgctgcaatgtgttctgtctgtccatccatctctgccctctgtaccggacactgtgtctcctcagccaggaaggggtaatgagctccagcccctaagcaaccggacttgcctgcctcggcctcacccgcacttctcccaaaaggcagatgacggggagttaggcatggggagctccagaaggtcaccagagagctttcagctgagggagagttctctaggttggagtgggcatcacagccagggtggcctctgggtgtcagatgctctcaggagggtgcccagcctgtgaggcactggcaaggtagggggcagatggggcatggagaacccagaggatctaggccctgttggggaggggaggggagctcaaggtttgggtggggactcagcccagatctacgtgagacatttttctgtgtcactgtgggaaagccttcccagaagtctcactgcgtgttgctctgcgtgtgttcccatgtccatgcgtgtgttgagagcccatcaggagggcatgcatgactctttggcaacatgtattatcttggagccacgtgtttttattgctgactttaaatatttatcccacggcagacagagacatttggtgtctttttataattcgctcgtggtcattgaatagagcaataaacggagcattttgagcaaaactaacctcctgggtctgtgtgatttgcctctcccctccactgccttccttcctgtacttgggtctttgtgcccctccccagcatgagcacagtgagcttggcccttctgctcactggagccccttgtggagactgggagtatggagcgagtccaaatttgtaaagccaaactgggaacattctgcaggattctcacacagcctcagccctggccctgacacatgctctgggccatggggagcctcaaggacaggtgtggaaggcttccagggaaggcacagtggctggcaggtcaccatttccaacagatgtgccagagaagccaaggctagggtaaggagacattcaggtcacacccaggcccctccctgttggccaaactcttatcccatgttagctccacagatcccaacagcagctgcagcccagtaatttcccttgtaaggcctgggctcagagtagctcctcccaaggggcccagggaatctgcatgtgggctgagatcctgagccatcctggacactcctgctctattcttgtcccctgcccccctgggatggagcaaaagtagccatgatgccactgctggcaggtgggggtcaccccagggcagaaggaggggtccagggcaagggtgctgaccaacaagtccttacaagatgccagaaccttgggtgggatccagggtccaggcatgcggggtgtgctacagatgatgagaaaacaacagggtgggctggacacggtggctcacgcctgtaatcccagcacattgggaggccgaggggtggcagatcatgaggtcaggagttcgagaccagcctgaccaacatggtgaaaccccatctctactaaaaatacaaaaattagccgggcgtagcggtgcacgcctgtaatcccagatactcaggaggctgaggcaggagaatcgcttgaacctgggaggcagaggttgcagtgagccaagatcgtgccactgcatccagtctgggtgacagagactccatctcaaaaaaaagaaaagaaaagaaaacaacaggtggctgaagcagcccagatggaagtccttgagaagaggtggccatactctccagtcaccctcaagcagagacctccccacaacccccggaggatgggccctcctactcttctacccagattagggagattgggctgttgaagtgggaagaggaaggagacctaacatttccctgttcttccccagggtggccttgtaaagatactcaggctgtgtatgaaccacacataggagtgcaacatgaatgggaacccctggatttgtgtagcaacgcagcagatcccagaggccctccccagttcaccgtgtcccagtccctggaaaatacagacctgttgctttgctccctgagccctgctggactatgcatgcacctgtacctgagtgtgtgcctgtgcacacacactaccctgagcccctcagctcagagaggtcctacccagcagcagtgagagccaaaacctgtaccacaagggaacaaaaaaagtacccctggactgccaccctcagcctccttcccgcctggccttcagtgtttcccccagcctggatccagctttgcttcccgcctcccttctccaccgccctccccctccccccacaaccaagcagtgtgccatctagctgagacagctgcagagcctgactaaggaatcgcccccagggggccagacatttaaggaacagatgacactggtagcctcactgttggggcaaaggaagaaggagacgggccaccctacagtccaggcactagctgagcctccaaagccgtggacacagcattcgagtgttgggagggactggtcagtgctgaaggtaaggctcccctcctccctcaggaaggggacaaagctgaccaccttctgagcccagaggggactatagggtagagggcaggaataggaacaggggagtagtctcagaacccaaaggtagaagcagcccaggcagagatatattagggggtggagagagggaatagagtttaacccctaactacctgggttaaagaaggctttggagccctctgggacgccactggactggagtcaaaagctaggagtctagtctgagtgaccttggacaggtcatttctttcagacatcagtttcctcatatacgaaataggactttaaaaactgcaatgctgggccaggcgcggtggctcacgcctgtaatcctagcactttgggaggctgaggtgggcggatcacgaggtcaggtattcgagactagcctggccaacatagtgaaacgccatctgtactaaaaatacaaaaaattagccgggtgtgatggcgggtgcctgtagtcccagctactcgggagcctgaggcaggagaattgcttgaacctgggaggcagaggttgtcgtgggccaagatcgtgccactgcactccagcctgggcaacagagcaagactctgtctcaaaaaaacaaaaacaaaaaaactgcaatgctggccacatgcagtggctcacacctataatcccagcactttgggaggccaaggcaggcggatcaatygaggctaggagtttgagaccagcctggccaacaagatgaaaccctgtctctactgaaaacacaaaaattagctgggcatggtggcacgtgcctgtaaacccagctgctggggaggctgaggcaggagaatggcttgaattcgagaggaggaggttgcaatgagccgagatcacccaaaaaaaaccgcaatgctggttaaataaaacattgagaaaacatggtgctctgaacaggaatgaggaaacgctatcatctggtatggaaaaaatctccaagacacattaaatgaaaaaagaaagggtcagaatagtgtgtataatgggctaccttatgtgcttttttaattaaaaaaaaaaaaggaagatgataagaacacatgagttttcctatttgcatgatggaggtctagaaggagcctagagactggctacctgttgcaatggggaaggttgtaagatagacgcaggagtgggagggagcctgtccatatggatttttatattgttttattctttaactatgtgattgaattaccagttcaaagaaaaatgtaagaaaaactaaacctttgcctttaccatgtcgcaaacacaagcagaattgtagtgatgttttgtcatctgttttagcattccaccagtgccggggtccccagggcccaggaataagagacacagcttccttctaaagcccactccagtatggcttagtcaggaagttctttcttaggtctgactgcattccctcctgatgaaacatccagcactgcctccttagtgccatgtagctatcaataggtatcctcaactccctccaggccttacttggttggctgggtaagtctaagccctataacctctccctctgagaccctggaatagtttggagttactcagtgagaggacaggcctattgggtctggtaactaaccaggaaaaggaagctaggaaatgaagaaaagagagctcgactgctctcctggccctctcctgtgtgcttccatctcctcttatgtctgaacacacacataacatctctgaatctccctcctactccctgtcttgtccttcatggcctcatcctcttccccagtctcacaggtgagtgcccacgcctgctgtcaccatgacaaccattcacagccggcagatgctgcaggagcacgtgtccatggagttctccagctccaccacccacgtgcagaccttctcccagacaaccaagatcgtgggaggcaagtggaatgggggcagggaagggatcgggaagggcagctattcttcctccacacccatcccttgggtggccccagttttgccactaatgggcccctctggagcccacaataccaacagcaacccccacccaacgtgtgcttctaatcttggctttgttaaagcttcagccagctggatgttcaacacagatcagatctccaggaaaacagcttagaaaagatcaatcatgtggatgtgtgtgaatgattgataaactcttaattgctgaaggagatcagagccataggtgaacagattctatctccaaaggtagaatttcaggcataggggaaattaggaaggtagccaccttatctacatatcagtaatgctgaccctgctccacttaagaaataggagacttggggctaccagtggagaaagaaggtgaacacataaacaagaaggtgaccttaccttccaggcttttagccctctggggccagacttggaagagggcagatccaagggaaagctgagaaatggtctcagagctgaacagagtgttttagtcacgtctctagtggaaagagattaaaagatggccgggggccaagacattggataccccttctcacagtcattgcccctccctcaaagcctcaaagggatagagtccctcaaagtcctccgtgcacagaggtcaaggccagataaacactctataccaaccaacacctcctggccagtgaggcagagcaagtggaacagctgggactcaaggcctatggtctagaccagaagttccaaactcaagtgatttacagcagtgattctctgctgtggccgcacatcagagtcaccttagtgcagggggtgtgaggagggcaaaaatatggcagtacctgagtctcaccccagaccattcaatcaggtatttcttataaagttctccatggattatatatgtgcagccaaagctgtagaccactgaccaacagggcccaggcagggaacataaatgtggggaaaagactggggtaaactagagactgtatatcccatctaaaggggcagccactattcacctcccactgactgttgccatatgggaatacaggttcagtgttgagaatccagaaatctgaatttttatgtgaaatctttctctttcagatgtagggctacttttttgtttaaacattgtggaggtcacataaaagacatctgcaggccaggtgtccactgcactctgcctgtttgagacctcttgctagtatttaaaagcaggccatgagagcttcttaacacacttttccccctctgtcagattagtgggataataaaggcacctacttcagtgggatgctgtgaagatggaataaaatcatctctgatatgtgcctagcacagttcctgactcaaggaaagtgttccatgattcagagcaattgttgtgaattgataactcaccagccaagaagattgtctgtagttttatactgcaaaaacagttttttttgttttccaaatataaaattatatttccacattgaagatgtgctttcagataaggatattcccatatatagctccactggagtgggactgtgtcgtgtcctgtccctcactcaagaatcactactcccaaggcaatgaatgctgaacccacagaatggcagggagaaaatctagagcagagctcagccaagctgcagacctcccaggcagaagcaggcctagcccctcttaatgctactgggggaccaggacttccaggagagaagcctaagagaccaagaaaattccaaaagagaagcctcctttaaaaaaaaaaaattaggactcagggctgtggccccataaaggtaatggaccactgaggtgtgggaaaggagttcgcctcccctagtggttgaaacttgccataacacaatggcccatcgactcaccctgctttctccccatgtagctggtcctgctcccacttccctaaatgctctttgttcccatgctccaccgtcctctcaagaaagctctgtcctcccatcgcgagctgggcttctacctggagcccattctgacctctcgcctgcccccacagaggaggtcgtgaggaggaagtcctcgagcatagtggagttcttcagcttagtgacccggagctcaaacatccctgcgggcgacagcgtccctgagttcgtggagaagcctcaaccg

SEQ ID NO: 93255 - DNA, 32000 bp, Homo sapiens
  misc_feature (1)...(32000): n = A,T,C or G
atataaacaatcctgcaaatcagtaagacaaatattttttaaacccaataaaaaattggcaagacacttgaacaggtactttaaaacatgatcttcaaataatctataaactcataaaaggtattcaacatcggcggggcacgatggctcatgcctgtaatcccagcattttgggaggccgagacgggtgcatcacctgaggtcagaagctcgacaccggtctggctaacatagtgaaacctcgtctctactgaaaatacaaaaaattagccgagtgtggtggtgtgcgcctgtaatcccagctagttgggagactgaggcaggagaatcgcgtgaacccaggaggcggagattgctgtaagacgagatcacgccattgcactccagcctggggaacagtgcgaggctccatctcaaaaaaaaaaaaaaaaagcattcaacatcatgagtcatcaaataaatgcaaatttaaaccacaaaataacatttcattccaacaggattggtacatttttttagaaacttacaataccaggtctggcaacaatatggactaactaactaaagctccatactgctggcctgagtataaattggtaacatttatttatttttttacttttattttattctattttaacagtctcattctgccgcccagcctggactgcagtggcacaatcttggctcacctcaactctgcctcccaggttcaagtgattctcctgcctcggcctcctgagaagctagaattacaggtgcacgccactacgactggctaatttttgtatttttagtagaaaccgggtttcaccatgttagctaggtcagccaattggtaaaattaacttagaaaacagttttatattagccattaaagttgaacatatacttactatggcccatcaatttcactcccaggtataccgtggttcttaaatttcagcatgcattagaatcacctggagggattgttaaagtcagagagtcacattcacagttgttgcttcaatagttcaggaacccaagaatttacatttctaagaaattttcagatactgatactgctggtccagaggccacagttcgagaactactagcttagagaaatgcacacatatgtacacaagaggcgtgtgtacaggaatattcataatagcagctgggcacggtggctgacgcctgtcatcccagcattttgggaggccaaggcgggaggatcacgaggtcagaagttagagaccaacctgaccaaccttgtgaagccccctctcctaaaaatacaaaaattcgtcaggcctggtggcatacacctgtaaccccagctactggggaggctgatgcaggagaatcacttaaacccgaggcagaggttgcagtgagccaagattgtgccactgcactccagcctgggtgacagtgagactccgtctcaaaaaaaaaaaaaaaattcataatagtgtgtccagaattggtgggttctcggtctcactgacttcaagaatgaagtgctggaccctcgcagtgagtattacagttgttaaaggcagcgtgtctggagtttgtttcttctgatgttcagatgtgttccgagtttcttccttccggtgggttcttggtctcgctagctcaagagtgaaactgcagaccttcgcagtgagtgttacagctcttaaggtggcgcgtctagacttgctcgttcctcccagtgggtttgtggtctcgctggcttcaggagcgaagctgcagaccatcatcgtgagtgttacagctcatgaaagcagtgtggaccccacaactgaacagcaggaacttaatacaaagagcaaaaaaacaaatcctcccccacgtggaaggggacccgagtgagtcgctactgccggtggggcagcctgcttttattctttatctggccccacccatatcctgatgattggtccattttagagagagctgattggtctgttttacagagagctgattggtccattttgacagggtgctgattggtgcatttacaatccctgagctagacacgaaagttctccacctccccaccagattagctagatacagagtgtcgattggtgcattcacaaaccctgagctagacacagggtgctgattggtgtgtttacaaaccttgtgctagatacagagtgccaattggtgtatttacaatccattagctagacataaaagttctccaagtccccaccagactcaggaggccagctggcttcacccagtggatcccacaccggggccrcaggtggagctgcctgccagtcccgagccatgtgcccgcactcctcagcctttgggtggtcgatgggaccgggcgccgtgaagaagggggcggcgctcgtcagagaggctagggccgtgcaggagcctacagcggagggggagactcaggcctggtgggctgcaggtcccgagccctgccccgcggggaggcagctaaggcccggcgagaagtcgagcacagcagctgctgacccaggtgctaagcccctcactgcccggggccggcggggctggccggccgctccgagtgcggggcccgccgagcccaagcccacccrgaactcgcgctagcccgcaagtgccacgcgcagccccggttcccgcccgcgcctctccctccacacctccccgcaatctgagggagccggctccggccttggccagccggggaaggggctgccacagtgcagcggcgggctgaagggctcctcaagctcggccagagtgggcgccaaggccgaggaggcgccgagagcgagcgagggctgtgagggctgccagcatgctgtcacctctcaatagcattatgcataatactaccaaacctgaaacaacccaaatgtccatcagcagaaaaatggattaaaaaaaatttttttttttgatacggagtctctctctattacccaggctggagtgcaatagcgcaatctcggctcactgcaacccccacctctcagggtcaagcaattcagctgcctcagcctcccgagtagctgggattacaggcatgagccaccacacctggctgggactacaggtacgtgttaccacgcccagctaatttttgtattttttgtagagacaaggattcgtcatgttgcccgggctggtctcaatctcctgggctcacgtgatccttctgcctcggccttccaaagtgctgggatcacaggcatgagccattgtgcttggcctctacaaaaaaaaaaaaaaaaattagccaggcatggttgctcacaatggtagctgctcaggaggctggggcagaaggattgcttgagcccaggagttgaaggctgcagtgagctatgatcttgtcactgcactccagactgggtgatagagtgagaccctgactctaaataaataaataaatgtttaaaaatgtattagtcactgttagaggtcactacactacacagactcattattttgcagaagggtaaagagaaaaagctgagaatatatgttacctttccagttggaattgcattttagtgtaaactaaacccagttgatgagagaaagcccttctttacaaagtaaaataagcgataaacgtgaattgaatgataggattataaaaatcaccattttgcaacctctaatgaaatcatttagtcaaggatggatcaccagtgaatagtgaaaccattaggtgaaaagttgatgaggaactagatagtctcacagtgccaaagtatcatccaaggattacatgctggtcacattagaaaaccacagctttacatacagagatctggctgtctctaccttaaaccagtgatcaattttaacatcactaatagaacagtcagacatcatgtacttcctgaaatgatgcaatgagaggcattttgctttaaaaattctttaatttgatacagtcaatacttcatatataacttctagtttacaggaaatacaggtgatatacaggttatacactggagaaatacagggaaatacaacatgaagaaaaaaatcagataaacccagaagaagagttctaaagaaaaattgacctggtctatcaacatgacaatgtcaaaaatgggggaggggagagaggatatggtgtctatgctaatttacagagattaagaaacataacaaaggccgtggttgttcttaattgactgttattttgaacaaaacacctgaaaagaaaaggcatttttggggaaacaatctgagaaatttgaatatgaactgagcattaaattatattaaggaatgcccgggcgcggtggctcacgcctgtgatcctagcactttgggaggccgaggtgggtgcatcacgaggtcaggagatcgagaccatcttggctaacacggtgaaaccccgtctctactaaaaatacaaaaaattagccgggtgcagtggcaggcacctgtaatcccagctactcaggaggctgaggcaggagaatggcgtgaacctgggagggggagcttgcagtgagccaagatagtgccactgcagtctggcctgggcaaaagagcgcaagactccttctcaaaaaaataaaaaaaaaaatttaaaaaattatattaaggaattattgtaaatttttttaggtgtcataacagcacttaggttatgcaggaaaatgtccttatttcttggagatgcataatgaaatatttagaagagaaatgtcatgatgtctatcattcatgtttaaatactaaaaagaagcaaatattgtaaaacatcaataaccattaagtatggatgatgagtatgtaagtattcattatgcatttctgtcctttttaaattttattttattttactggaaagcaagagaggaaggagatcaaatctgaacttaagaagctcactcccctacttattggatgactagagtggaagcaaaagagcagttactagctgattgctgcagtggtcgtggtgaaagagcacagtgtttcagttcaggtagtgaggatggacagaagtggactgatgggagatgtattttgcagggagaaaccataaaatgattgatagcctcgaggtggcacagacggagagaaaggagagtcaaagctaatgatgaggccaggcccggtagctcacacctgtaatcccagcattttgggaggcgaaggccgttggatcacctgaggtcaagagttcaagaccatcctggccaacaaggtgaaatcccatctccaataaaaatgcaaaaattagccgggcaaggtgctgtgcgcctgtaattccagctactagggaggctgaggcaggagaatggcttgaacccagaaggtggacattgcagtgagccaagatcacgccagtatccagcctggccaacagagcaagactccatctcaataaaaaataaataaaagctaatgatgacagctaatatgtatggagcatgtagtatgcaccagtccagtcatccttctaagtgatccatattagtgtaacgaacaaaatcttcacaatcactgtgtgaggcgggtagtaactattaacacctccactttgcagatcaggaaacttggacgcagacaagttaaacaaggtgcccaaggtcatacccttagtagatgccctgctagaactggaatctaggcatgcctaaccattttttcttaaggaagagaacagtatcttcaatgacaatgagtaagagtacttattctacccacttttctgcttcttgtcttcgggtttatcgttctggacccacctatctttcctggccccccacttaacttaacccttttcacccaccctrgggcggggagacagaggtgatcctagaagagggctacagggatggggccaagtgggaattctagcgaggcgcctactatttgatggaggagggatgggctaggtaggtcccccgctccgacagggctcttacgccatatgtgacgcaaattagcttacgagccgggggtggaggtgtcgtcagcacccgcctgcggttggccgcgttgcagcgagaggggcatgtagaccccgcctcgtagggaggtggggagcggcaagccccgcctcagcccctctggcaggctcccgccagcgtcgctgcggctccggcccgggagcgagcgcccggagctcggaargatgcggcgcccgcggcggcctgggggtctcgggggatccgggggtctccggctgctcctctgcctcctgctgctgagcagccgcccggggggctgcagcgccgttagtgcccacggtcaggaggaaacttgggctggcgggtggtggggggcggggagcagcttggggcctggagcgaaactcggtgggggtgagggtgaaatgtcatgaagctcggggagaatatgggttgggggaggcatgcgagatgaggaaggtgagagggcgtctcggaggaaaggggcgtaggcctggaggtggggctgggaatacgggggcgggacctaagagaattgggctctggggaaaattgcaggttcgggagaaggacacggggtgcatgtgggcagagggacttagagaccggctgcgagaccacaggagaagccacttgctccgaggcgcctgggaggtggtgacaggcgctgaggaatgggaaggggaggtggcggggagaatgagggaacggtgatctctgggcagtggaagcctgggccgcagacatagagtccnnnnnnnnnnnnnnnnnnnnnnnnnnnnnnnnnnnnnnnnnnnnnnnnnnnnnnnnnnnnnnnnnnnnnnnnnnnnnnnnnnnnnnnnnnnnnnnnnnnnnnnnnnnnnnnnnnnnnnnnnnnnnnnnnnnnnnnnnnnnnnnnnnnnnnnnnnnnnnnnnnnnnnnnnnnnnnnnnnnnnnnnnnnnnnnnnnnnnnnnnnnnnnnnnnnnnnnnnnnnnnnnnnnnnnnnnnnnnnnnnnnnnnnnnnnnnnnnnnnnnnnnnnnnnnnnnnnnnnnnnnnnnnnnnnnnnnnnnnnnnnnnnnnnnnnnnnnnnnnnnnnnnnnnnnnnnnnnnnnnnnnnnnnnnnnnnnnnnnnnnnnnnnnnnnnnnnnnnnnnnnnnnnnnnnnnnnnnnnnnnnnnnnnnnnnnnnnnnnnnnnnnnnnnnnnnnnnnnnnnnnnnnnnnnnnnnnnnnnnnnnnnnnnnnnnnnnnnnnnnnnnnnnnnnnnnnnnnnnnnnnnnnnnnnnnnnnnnnnnnnnnnnnnnnnnnnnnnnnnnnnnnnnnnnnnnnnnntgtgaccccttcctctctggtaaccgcctccaaggccagcccttggcggcgccagactcagagcttcagcaccgcggacagcgccagcggctcgggacagygcgaggagagatgcctaagagacaccctccccagccccacccatgccctctttcccccgaccgggggaagtgtgctagaacctcttctgagttccaggccattataggatgcttttccatatttgggaaggaaattcctctttcagaatttggccaaaacctctcctgcagtaattctatgaatctctctccctgcacctggaaggtttcttccctatcactcagttaagcaaacagaggcttttaaggatacagactcacaaattcttaaaatccaaaacaagatcccatgcytccttttaagaaattcaggcctgattcctactctcctcccagcttaaggccttctttagaatgaaagaataaattgcatctgcttctcccgttcccagcctgtccacccatctgcccattctctgtgagtgggtgtctgagcctctgctcacctkttcctctacaggctgtctatttgaccgcaggctctgctctcacctggaagtctgtattcagggtgagtgaggcccaagcatagaactcacaagatcggggggagaggggcaataaaaaacaagaaggggagakaaggcccagaaaggaagagggctactgggcttgagaagaaggaagacttgcctggaggaggagaggtaggggagaaagtgaagagagtacagtccatttgcaacctggactttggaaggcctcttattcaagccccctgctgacaccacttttgtgcccttagatggcttgtttgggcagtgccaggtgggagtggggcaggcccggccycttttgcaagtcacctccccagttctccaacgcttacaaggtgtgctccgacaactcatgtcccaaggtaaggtctgggtgcactggaggagagagattggaacttggttagttatgggtggggaagaagatttctcttcaaggaatattcctatcacccccactgctggagcctcaccttcccatatcttgctagagtaagaggtggaaccctagagatgggctattcacatttggactctctggagaagcccagaggagccttctaagaagaagtcactggaaaaggccagcttccatcttcttaggaccagttcctctcactggcattgtctgagtgctacagagccaagaactctggaatcctcagccaggataatattccactcacccaattcctcattcaacaagtatttattgagtacttactatgtagcaggcatagttttaggtatttggaatgtatcgggaataaaacaaagatctctgcttactggagtttctgtttgggggataaggggaggaaacacgctataaaagttagaaaatacatagtgtcttagaagatgataaatagcatataatattatagcaggataaagtgatcaaaatggtgaggtagaaagctacagtattaaatgaggaaatcaggtggttaaggtggacattattgagactatgaaatctgaacagactttttaaggaggtgggggagtttgtcagaagattatctaggggaagagtatttcaggcagaccaaacagttaggacaaaagcacaattctgaagagcaccatggaggccaggggactgtagaagactgatggagaggaagagtagaaggtgaggtcaggtaggtaatgggggaagggatgtggatcactttagggcctcataggggaatgtatggacattagctttactctgagtaaagaaggaaactattacaagatttggagcttgggggcacatgatctgacttacacttgacaagcatcacttttgctgctgtagtgagactagaatagatggagtcaagagttggtgagggggaccactaaaaaccaccacaataggttgctctgtctatggagtgccattcttttgtttcttcacttctctaataaactgctttcactttactaaaacaaacaaacaaaaactaccacaataactcagataagagatgaatgtggatggggccaaggtgattgcagggaaggaatgaaggatgagagaattctgcatttatttttaaggtagtcagcattatttcgtgaaatattggatatggttataaagagaggagtcaaagtttttttgggtttattttgtttgttgattgttgttgttgttgtttgagacagagtcnnnnnnnnnnnnnnnnnnnnnnnnnnnnnnnnnnnnnnnnnnnnnnnnnnnnnnnnnnnnnnnnnnnnnnnnnnnnnnnnnnnnnnnnnnnnnnnnnnnnnnnnnnnnnnnnnnnnnnnnnnnnnnnnnnnnnnnnnnnnnnnnnnnnnnnnnnnnnnnnnnnnnnnnnnnnnnnnnnnnnnnnnnnnnnnnnnnnnnnnnnnnnnnnnnnnnnnnnnnnnnnnnnnnnnnnnnnnnnnnnnnnnnnnnnnnnnnnnnnnnnnnnnnnnnnnnnnnnnnnnnnnnnnnnnnnnnnnnnnnnnnnnnnnnnnnnnnnnnnnnnnnnnnnnnnnnnnnnnnnnnnnnnnnnnnnnnnnnnnnnnnnnnnnnnnnnnnnnnnnnnnnnnnnnnnnnnnnnnnnnnnnnnnnnnnnnnnnnnnnnnnnnnnnnnnnnnnnnnnnnnnnnnnnnnnnnnnnnnnnnnnnnnnnnnnnnnnnnnnnnnnnnnnnnacacccatgaggtggatgagataaccaaaagattgagtgtctattaagaagaccaaggatcaagtcctagataattcttctattaaaaggaccaggccaggtatagtggctcacacctataatcccaatactttaggaggctggggcaggcaggtcacgagctcaggagttcgagaccagcctgaccaacatggtgaaaccttgtctctacaaaaaatacaaaaattagccaggcatggtggcgagcacctgtaatcccagctactcaggaggctgaggcaggagaatcacttgaacctgagaggcagaggttgtggtgagccgagatcgcaccactgcactccagcctgggtgatagagcgagactccatctcaaaaaaaaaaaaaaatgaggaccaggataaagagaggaaccatcaacttcctctcagggagactgagaaggggaagccagtggagtaggattaaaaacaacagtgttcagtgtcccagaagccaggagaaagtgtatcaaggaggaggagtgaccaacagtgtcaaatgatgattacgggataagtaaaataagatatgaaaattgaccactagatttggacatgcagacaaagctgctcttgatgagagcagctttggtagaatagttgggaataaaatcctgaataaagtggattaagagggaatagaaagaaaggaattggatacagtcagtatagacaactttttctagaagtcttgctgcaaagatatggagtgatccctagagaagaaagtgggatcaagcagtatttttcttaagatggaagaaattgcatattgtttgcatgggaataatgtgaataattcagtagagaacaaaggaaattatgtaggaaagaagagagaattgcaaggagaatgttcctgaataggtgagaggggatgaaatctagtgctcagaggaactggctttaaataggaacacagacagctcatctaatgtgaataagcaaggaggcaggtgtggatgttggtagataccagaatacaagttaagagcagcacagattttaaatccagaactagagaagaaaaaatgagggtgaaaagtgggaaattattcctttagaataagtgactgaactttcctgagagcagagtttttttgggggaaagagtcaaacaggagagctgtctatgaataagatgatgatgataatggtgatgatgatgatgatgacgacaatgaagatgatgatacatgtttaaaacatgtggattatgctttagagttttctaagcactttgatttccctgatcacacttgatcttcacaacagccccctgaaatatgtatcgtttccactttacaaacagagaaagttgaggttcagggtcaacacaaagaataataacaatagtaataataattatggtaatagcatttgttaaaagttcactacatgacaggcactattctaaccgtttgatatgtatatgtgttattttaatgataataacaatcctaggaggtataaatccccattttattgatgagggaattgaggcttggagaggttcagcaacttgcccaaggttacataattcatcagtagcaaaggcaggattcaaacccaggtggtctggctccaatagctgtacctgagggtgggaagaagacagctcagatcacccactgagtttgtccctctactctgacaaaccccatgagctgcagggcagagggtacagttctgatccccartggtccccrttactggatccccagactcctgaaccaacttacgctgtcctctttcctgacaggattgtcctggcacgatgacctcacccagtatgtgatctctcaggagatggagcgcatccccaggcttcgccccccagagccccgtccaagggacaggtaggcagcctttctctacaactctagcaatggtgaggctgatgaatctgtggttgtcctaattgatggagagaaggggaaggaagtgggcaccaaggccagcatgctggggcacaggtaaagaggtgcaggaatggtcactctctgacatgctcacrtgaccaagaggagctgagctcatctctagggatccagaaaaacgggcattttttgaatgttttgaaaaacattgacattggctactttaaaagaagcatcaatgtagtcatcatgggagaaattagaatgctgttggactgaagttgttcaatattccatttcattactatgtgaatttctatatgacaggagccaccatcatctttttgtggttagggcctctaaaggcatcattcagactgcaaagcagaggaaagtaaatgaggtttagggagctcagatgatgataccaggatgaagatggcatagtggtggggggtggaggagcagtcctgaatatttggacatatacttggagagccaggtgtggggacatggcacacaggggcaacggggacagctgcagccacagttcatctagagaaattcctggttgccttcccctgctcctgtttgccccttctccatccccagcctcatgattacccagcctttgcagttgtttcagagactcagccatgctcaccagggaggcagatacctctgccctcagcttggccctctggtccctccccattcccacccagcccatctctcttcccctgaggtcactcagtttctaaagaggtcaggcctgctcttaaccgctgagcctgcctggccccgaatagttctgccttgcaggctctctatgccctttcccccgctccaacacacacactttgctttcctctacaggtctggcttggcacccaagagacctggtcctgctggagagctgcttttacaggacatccccactggctccgcccctgctgcccagcatcggcttccacaaccaccagtgggcaaaggtggagctggggccagctcctctctgtcccctctgcaggctgagctgctcccgcctctcttggagcacctgctgctgcccccacagcctccccacccttcactgagttacgaacctgccttgctgcagccctacctgttccaccaggtaagtccttgactctggtcccaccccaaccgcagtccctcagcccggacttctgctcttacccagatctctggttttccacagtttggctcccgtgatggctccagggtctcagagggctccccagggatggtcagtgtcggccccctgcccaaggctgaagcccctgccctcttcagcagaactgcctccaagggcatatttggggaccaccctggccactcctacggggaccttccagggccttcacctgcccagctttttcaagactctgggctgctctatctggcccaggagttgccagcacccagcagggccagggtgccaaggctgccagagcaagggagcagcagccgggcagaggactccccagagggctatgagaaggaaggactaggggatcgtggagagaagcctgcttccccagctgtgcagccaggtaacaargtcctcagcatccacctccctgtgagggctgctttgggggaaccatggtggggcccttccctgacaatctatgcgtttgttaacttgtccttaaagtcattcatacatttaaggaatgtctactgacaagctgttctatgccaggcactagggaagtggtggggagtggagttgacgtgactctccttccagtggagagtcaagatgtcctgaagtttgatctgggtcccaggaagaactttcccccaaagtgtggacaagggctgggaaagggagggcatctcttggtgtcctggtgtctgggaagactctcttaacatgctagtcccttcccaccctcactcactcatctgcawccctcaagttcactgcgcaatcagccctaagctctgtgtctggctcccagcagatgcggctctgcagaggctggccgctgtgctggcgggctatggggtagagctgcgtcagctgacccctgagcagctctccacactcctgaccctgctgcagctactgcccaagggtgcaggaagaaatccgggtaagtgtccaggcagagggagggaccaatatctcccggctccatggaggcctcttgccctgcctcgagaccacttggagtagcctggagaggaagagtcaggcttcaggggaaagagttcctttgagacatagggtcattgccagcaaggcagggagcaagggggtagggtggcaagcttaggagttagatcaggaaaagactagatggtggaagtaatggaaaaagcagccaacagagggtgtgagcagggaaaaggaggcatcgggaaggatgggttggtgacaatgagggcctaaaaacgggcatagccagtactaagaagaagccagtaattgatgggtagagaaataacygaacaaagaatagctttgagagagatggccaatggtagagggaggagttaataaaacagtaaattgggaggaggaagcaaaaaggaatgaggccaggcttaggatgagaccagtaacagggtcttggtcactgactgagatgaagaccacagcaaatgttccaggctcagggtctctggccctttctcccrcttgtgttgtgtagaccttggccatggccatttttccagactcttgtttttcctgtctcgcaggaggggttgtaaatgttggagctgatatcaagaaagtgagtccccagcacctccttgactcataatcaccccatggcagcacgcccccttgccaaacctaaatttcaaattcaggacctagaatctgtatcctcccacccctcattttgggggaaaccaaggcccagagaccrcaagttattgcctaaggtctcccatcaagttgatggcagaactggagccagaaaactgaattcttaattcattcctcttttcactacaatcatttcagascatgctctgaggattcctaggggaggagggaagtttcgagcagagagcccttcctgagcttctgtagcaggaggagctctgcttctttctgtttcatgtgttggatttctaagactttgtggctaaacaaaagtctagaaaccatcgcctgcctgtttgtcttttaccctcaccccagcttctcttgctgcaggggttttctgtctccagccccattctgtggattagtacagaccattttcaatcattcaatcctttattcattcatgcatccacttacttgtctcagatgctctggtgtcctctctgtacccagcactgcagtggtccctgggggtagaaagtgaaaagcaggtcctgagctccactgtggagagctccgagtccagggtaccccttcccccagcactgtccagaggccacacctccaccctcttctgaacagacaatggaggggccggtggagggcagagacacagcagagcttccagcccgcacatcccccatgcctggacaccccactgccagccctacctccagkgaagtccagcaggtgccaagccctgtctcctctgagcctcccaaagctgccagaccccctgtgacacctgtcctgctagagaagaaaagcccactgggccagagccagcccacggtggcaggacagccctcagcccgcccagcagcagaggaatatggctacatcgtcactgatcagaagtaagggctgcatcctgggaagctttctggtctgctaggatttgggctggcctgcctggccagaagcagagggcagaaatccagacgtgcagggacagggaattggcaggctgctctgtacccctggagtggcctgttttaagaaagtgactgagagggttgccccactttccttcctctgccttctcccatctccaggcccctgagcctggctgcaggagtgaagctgctggagatcctggctgagcatgtgcacatgtcctcaggcagcttcatcaacatcaggtggggctggcatcttgctagggcagtggccgagatctagaaagcagcttgagcaaggaggtggctggaggggcctgcgggaggaagagcagacaagctctgagctcagggatgctcccagctgtactgaaggtacagccacacccagcccgttgctggccccacccagcatcttccttgcctaagatgcccctgtagggcatccccgatctgctccagccccatcctctaacggggagagggccagagctggcctcttttttgaagtctgcggtctggggtggagaaggcagtaacatagctcctatctggcagtgtggtgggaccagccctcaccttccgcatccggcacaatgagcagaacctgtctttggctgatgtgacccaacaagcaggtaaatatctctgcgacctcaatcccaggcttggccccagccccactcctaagaggatatatccaggcctgttrctgatgcccccttgaaatgttcccagcccacatgggccctgcctgctgcttggcagagcaagacagaggatggagaccacatggggctggagcaagcctgacctttgtcctccctgcagggctggtgaagtctgaactggaagcacagacagggctccaaatcttgcagacaggagtgggacaggtatgcgctaactggagaatcagtccaagtccccagagggctgatgttgtccgcaagagctggaggcaaaccagaggggagaactggagccgaaacgtgtccgtaggcacggctggctggaggcggccttcgcccaagcagcccctccccgcagttctctttctcaccagcagatggcrtaggtgtcccctccctgcaggaccagccctctgtagtaaaaaggccygagaactagttgagccgcccttagtctgctggagcrcagtctccaaattccaagggaacaccttgcacagaaaggacattatactcaaaatatgttttgtttgtttgtctgagacagagtttcactcttgctgtccaggctggagtgcagtggctcgatctcggctcactgcaacctccacctgccaggttcaagcgattctcctgcctcagcctcccaagtagctgggattacaggtgcctgccaccacacccggctaaatttttttttgtatttttagtagagatggggtttcaccatgttggccaggctggtctcgaactcccgatctcaggtgatccgccaacctttggccccccaaagtgctgagattacaggtgtgagccaccacgcccggcctatactcaaaatacctttgtcttctgcatccaacactgatgcctcacgttctacaattcaattcctagggttctctgtccgtttttaaatgcaaacactcctggtgggggcctctggcactgcactgtggttgagttgatccgatggggattgagaaggagaatctgagcccatctggctgtacyaccatacccctaatctcccagctttgccccaggagatgtcctaacagggggtgtggcatgggaccggggtgaggagcagctctgaaacctccctatgccactgcctcccttgattctagccttgttcccacagagggaggaggcagctgcagtccttccccaaactgcgcacagcacctcacccatgcgctyagtgctgctcactctggtggccctggcaggtgtggctgggctgctggtggctctggctgtggctctgtgtgtgcggcagcatgcgcggcagcaagacaaggagcgcctggcagccctggggcctgagggggcccatggtgacactacctttgagtaccaggtgtgcagccccagaagctgattgagcaaaggaaatgcaaggggcctgggagtctgggtcttgmgtggactaagggtcggaactgaatggggagtgagccctcatccctgggaaggtccagtggaggctggagaagccccagtgggagggagtatggtaggggcctttatgaacgcatgggaattgggagcatacagtgcctaaggttcttcttggtgctgtgcttctggggctctgggattccactctgtcatgtctgaggttgacataagcaccacccaagcaaaacagccctggaaaggatcagggccaggcagaagaccataccccagaggagctgagttccactgaaaatcagtcaagggcaagcctaggagcccagagttgaacccagggccctgttgaaaagtttcaggggactcttggacctcacctgattcttcctccacaggacctgtgccgccagcacatggccacgaagtccttgttcaaccgggcagagggtccaccggagccttcacgggtgagcagtgtgtcctcccagttcagcgaygcagcccaggccagccccagctcccacagcagcaccccstcctggtgcgaggagccggcccaagccaacatggacatctccacgggacacatgattctggtcaggacagggcctgggcccagagtgggtgaaggaatgggatggtgagagaggccaggctggctgtgtgggccagagccagaccgtggtgcccccacaggcatacatggaggatcacctgcggaaccgggaccgccttgccaaggagtggcaggccctctgtgcctaccaagcagagccaaacacctgtgccaccgcgcagggggagggcaacatcaaaaagaaccggcatcctgacttcctgccctgtgagtgaaccctgctggcccacctggcccagccctctctctgctgcgaggtctggagggcttggggtaaggggttgggcttctggctcaggctgagtggcagaggtcccgcgatgccaatgaccagagggccatctggggtggggtgtcgggtctgtgcagatgaccatgcccgcataaaactgaaggtggagagcagcccttctcggagcgattacatcaacgccagccccattgtgagtggccctgactccagcccccacctctgccccatcattatcctggccctatgcactccatttccccgtggtcacctgccaccccaccaaccccctggagtggtggggcctgatatcctagcaagggggaactgccagccttctcagaccctgacccacttrctctgaccaygcctgtccatagtggcatttcccacactggctcatggtgtatcttccctgcctccagattgagcatgaccctcggatgccagcctacatagccacgcagggcccgctgtcccataccatcgcagacttctggcaggtgggctcttaaagggagggcttcgctggggtccttgtggccacgaggtcccagggaggttagagtggagctcaactgggtctctgtccctagatggtgtgggagagcggctgcaccgtcatcgtcatgctgaccccgctggtggaggatggtgtcaagcagtgtgaccgctactggccagatgagggtgcctccctctaccacgtatatgaggtcagcagggccccacagcaaggggacaatggatgtgggaagagtagatgatggccttttcgtaacgttttcttcaccaaatgagcactcaacagtctttttaaaaaggcttttattggccctgctcatgattcatacatatatgaatatatataaacacatatatgcatacccatatattcacatatatacatgtgtgtgtcctgtttacagaacatacatgtgtgtgtgtgtgtgtgtgtgtgtgtgtcctgtctagagtcaaaaagcgttcatagagacttatgataaaggcacagagatmaaactataaaaccaccaaaaccgaggtaagaagctaacagctaagtgtatattagacagggaagataaggatacccaaagactgagattaagacctacgttaattgaacctaatttagctctgagtttcctggtggccaaagcaaagaaagacataccacccgttacatacgttactaatgtaaaagagaaacaaactttttcattaggagagagactaggtggaggggtggagaaggagggggaactgggcagaggccaagcaggggaaagagaaatatttcagacaaatgggagaacgtgagtccccactaagacaaaaaaaccttaagaacacagcagaagcttctcatcaccagatgagcctgaatagtaattttttccccaccaaataagcacatgacggtttttttaaaaagcctttcattggtcctgctggtggttaacgaaaaaaatccagtaagaatactacagaatttcatccaagtttatggcacgtgtagcaccgatactctggtagaccctgcgaggaagagggaggagaaactccgacctcgagaggctcacratagctgtgtctgggtggaaaagctactagtggtcctgagcagtagataagtgacaggcagccagggttcctgggaccgctggaacttagaatttgaaccggcctgggaggccgggcggtggttggagagaccgagaaggtcgcgaggagagcgcgcgcaacgcggggactggggcagcccgyggcgctcaggcctgggcccctgccgggcaggtgaacctggtgtcggagcacatctggtgcgaggactttctggtgcggagcttctacctgaagaacgtgcagacccaggagacgcgcacgctcacgcagttccacttcctcagctggccggcagagggcacaccggcctccacgcggcccctgctggacttccgcaggtgagcgcgggcgcccccgcctggagggaccgcatgggcgggggcggagccggggtccgcccgccgctcggcctggagccccgggtcgggcctggagcctcggcctctgacttctggccgcccgctccagaccccacgctcccacccctaaaagcaggcctgaggctccggctgtgcccttccccgagcctccaccacccgcgtgggccagctccgcgccggccgctgctgctctgctccctccctctcacgctcccgggactggctccttctcctccacctgcttcctccagagggccctctgctttctgtctcccctccctctccaggacccctgcttcctttctccttccagttccctcctgccccgctgtctccaggccctgcactgcgctgccttgctgccccctccgtctctcactcccgcctgcccgtctcccctccttcatccctctccgtccctccttcatccctctccgtctcttcgcctcttttttctgtgtctttcattctttttcctttcctctttcttcctcttctctctccccatctctctctcactctgtctctgcctcaccctttccctctctctccatttctccctctccgcgcttctcttcctttctctctgccctctcccctgtttttctccacctccttcccctgtctgccagtttctctctgctgctctgtccgtctctccctctccctcccgctgcctgtctttcctctctctgtccttccctctcccttcttccctctttctctctctccctcacagctgccagtgtcatttttgtgatctgcagctagtattctcactccagttgcatagtcacaaaagtgatcattggcaggtgtggctgctgcatggacagacaggacatgtggcccggggaccaccccgagctgggagcaaggggtacagggaagaggcaaagactgtcgaaaggagtgtgggaggatctctggattctggggggctcagtggagcaggtggggactagacaggggctacctgagggacttacccttttccaacactgacaccaagacaggtcagccctccagcgtcccctgcttttcctagccccagacaggtacttgggaagcccactaccaagggcaggggcccacccacactgcrcccttctcctggttctctgtcccttgccaagctggcctgatgtctctaggtactggacagaggagcagagctgggggtggggacatgggtatagtttctgaacctcaggacagcagtttctaactggggtccctgaggcctgagacacaggcgtcttgaaagcagtgccagggtatcagagctatttccttttttccatatttaaaaaatcctggtagaactagtgcatggatctgttttaaagctgcacagataagctaaaagattgctttaggctggaattatgtaaactcagttggcattagacatccagaacaaataaactgttgcttaagaaatgcagttcggggccgggcgcggtggttcacacctgtaatcccagcactttgggaggccgaggtgggtggatcacttgagatcaggagttcaagaccagactggccaacatggtcaaaccctgttctgccaaaaatacaaaaattagccaggcagggtggcgagcgcctgtactcccagctactcgggaggctgaggcaggagaatctcttaaacctgggaggcagcagttgcagtgagacgagaccgtgccactgtactgccacttgggcaacagagccagactccctctcaaaataaataaataaataaataaataaatgcagtttggtcaagcccccctagaaggaaaacaaattaataaaagagaccctaagaaagtgaccctgagtaagttccttggcttccctccattccgctacctgtgagatggggatgattacacatactttagagcagaggttcccaacctttttggcacaagggaccggttttgtggaagacaatttttccacggctgggagagggggtggtttgaggatgaaactgttccccctcagatcatcaggcattagattctcataaggagctcacaacctagatccctcacatgtgcaggtcacgatagggttcgcacttctgtgagaatctattgcaatggctgatctaacaggaggcggagctcaggtggtaatgttcgcttgcctcctgctatgcggctcggttcccaacaggccatagactgacactggtccatggcccagggattggggacccctgctttagagggckgttgcaagatttgataaagtatgtaaaatctagtgtaagtgcctgatacatagcaagggctccgttaattctagatgctgcctattatcattattaaatgagcaaaaacaactattgtgattactcttctaccctagccctctgacgtaacagccaatgagctagaaaaccatgtggactcctatgaagccattctaagtcacctggtcctatagctgaaggactgtgaagttccaaacttcaatctgacaacccctaagaaggtcttccctggttctggcttgcagggatatcaggagtatgcaggtgactcccaaagcagaaaggtcataaaggacaagggcaggttagatgggtccattgagagacggagaagccccctgctcctcactgagttgtggtcaggggcagtggagaaaggtctgaggtccaaggggaccccaagtctgaatataacgcagccacagaatgcctgtgctgaagtgagactgctccagggagacaagcagtagcacaatgtcccgagttgaggggttggggttgtcctcccctggcccagggaacactatgcccagggcagcctgatgtcacaactggtaaggaccactggagcctgagtcgggaggaaaacagcctgggtggtcataaagaatggcagagggccagagcagggatgtggcaagactgacacccttgaagtcaccagaaagctatccccttggacttgggcagaagtgtctcttaatatgatgatgtattatcattaatagttgccacctgctaccatgtattgagcacctattgtgtgccagacctagcacttagctctttacatgggttatctcatgtgatcattgtaagaaccctaaggaggtttttcttactatcctccattttacaggtaagaaaactgaggctcaaagaggttaaatcagttgttccasgtgcatagcttgggcacctagcttgcaagtgacaaggcgagcccaatgccacycacaccagctctggttctttgcctccagccctggctcctttctccaaccatcttccctctctgccccgggcagrtggggagaaaaggaagaaagagaggcccacgtcatrtgtttcagcttccctttccctctctgctggtgcccactggccctcacacccatttcttgttgcaggaaggtgaacaagtgctaccggggccgctcctgccccatcatcgtgcactgcaggtgggtggagaggagattcatctctctggtcccactccctgtgtgygtctcctgtgcacattgcctgcctgtccccttggtgctagcaaactgcaggcatagtccaaatccagcacaccacctgtttttaatggccaagacctaagcgtggcattcacagttttaaatgggtgaagaaaaaagaagaaaagtrtgtgatacaaactgtatgtggcccacaaagttgaaaatattgaccattggccccctatacacaaaaagcyggctgaaggctagagaggcccatccaattccctcctgctgcctctgcttctgggctgagccatggctctcctctttggttgtcccattgcccaartgacacccacaggtcacagactcccctctcaaggcccaagtcccagcgtgcaggtgctatgagctttccttcatcctcggctcactgtccctctccaagccaaccccaabgggtcacccagtgtcctcccctcccccaggcctccaggcctcctcgcctcctccrtccctccccctttctgctgcatctcaagctaaacctgtcactaactcctgtttcagtgatggtgcggggaggaccggcacctacatcctcatcgacatggtcctgaaccgcatggcaaaaggtagggagcttccccacggtgcccgcagcccccaggccctttttagaggctccccagcacacagggtcctgggagctcagaaggagcaggttgtcaacctccaggctctgcccagccctccaaggctctttgcctccaggaggcctcaggttttctgggtcctgtcctcctctggacaccccctgagcagccccatccccacctccatctccaggagtgaaggagattgacatcgctgccaccctggagcatgtccgtgaccagcggcctggccttgtccgctctaaggtgaccatgccttcctgccccaaccccagctcccacccttccctagcacccacttcttggccaccccagggaaagcagcagctgccaacctttcccacctgcttctgcgcctcctccaggagggctcccttcctcccaggggacctgcccagggycctccccccaccaaaagccccccatcttgagggcagagcacaggtcagccctctccatgaccatcctaccactgcccttcctcaggaccagtttgaatttgccctgacagccgtggcggaggaagtgaatgccatcctcaaggccctgccccagtgagaccctggggccccttggcgggcagcccagcctctgtccctctttgcctgtgtgagcatctctgtgtacccactcctcactgccccaccagccacctcttgggcatgctcagcccttcctagaagagtcaggaagggaaagccagaaggggcacgcctgcccagcctcgcatgccagagcctggggcatcccagagcccagggcatcccatgggggtgctgcagccaggaggagaggaaaggacatgggtagcaattctacccagagccttctcctgcctacattccctggcctggctctcctgtagctctcctggggttctgggagttccctgaacatctgtgtgtgtccccctatgctccagtatggaagaatggggtggagggtcgccacacccggctccccctgcttytcagccccgggcctgcctytgactcacacttgggcgctctgccctccctggcctcacgcccagcctcctcccaccaccctcccmccatgcgctgctcaacctctctccttytggcgcaagagaacatttctagaaaaaactacttttgtaccagtgtgaataaagttagtgtgttgtctgtgcagctgcaacccagactcctacgcatttctgtccgctgtgcatctggactccagccccagcctcagcccggagccggtccctgctggtctctcaggaggtgcagagagcacagcaggagagcgccagctgccagtaaggcccttctaggtgggaacactacgttagaacgaggcttcctatgcagccagcagtctccaaggtgctttacatgatgagtcccattttacagatggaaagactgaggcacagaacttgcttgtggtaacacgtaacacaacttgtaagattgtaaggtgcaatggctcatgcctgtaatcccagctctttgggaggctgaggcaggcagatcacctgatgtcaggagttggagaccagcctggccaacatggagaaatcccgtctttactaaaaatacaaaattagccggccatggtggctcgcgcctgtaatcccagcactttgggtggctgaggcaggcatatcacctgaggtcaggagttcgagaccagcctggccaacatggcaaaaccctgtctctactaaaaatacaaaaaaattagccatgtgtagtggcgggtacctgtaatcccagctacttgggagtctgaggcaggagaatcacttgaacccggaaggtggagtttgcagtgagccgagagtgtgccgctgcactccagcctgggtgacagagtgagaccctgtnnnnnnnnnnnnnnnnnnnnnnnnnnnnnnnnnnnnnnnnnnnnnnnnnnnnnnnnnnnnnnnnnnnnnnnnnnnnnnnnnnnnnnnnnnnnnnnnnnnnnnnnnnnnnnnnnnnnnnnnnnnnnnnnnnnnnnnnnnnnnnnnnnnnnnnnnnnnnnnnnnnnnnnnnnnnnnnnnnnnnnagagtttgcacctggctgactaacctcctctctactacctctcctctcaattctttttttgtttttggggtttttttggagacagagtcttgctctgtcacccaggctggagtgcagtggcgcgatctcggctcactgcaacctctgcctcctgggctccagcgatttccctgcctcagccgcctgagtagctaggattacaggcacccaccaccaagcccggctaattttttatatttttagtagagacggagtttcgccatgttgcccaggctggtctggactcctgagcttcagacaatctgcccgccttggcctcccaaagtgctgggattacaggcgtgagccaccgcgcctagcctcctctcagttcttggcagctgctttgtgcccttctgctgccagattgaggtgaggcctgaacaaagtgatattagcaaagtgtctgccacaccttaggcaaaactatagcaaaactctgccagtgagtctaggctaggcctgtgagatgctaggacaggcgttcccctggggataaaggacactttctgtctcaccccagctcccagaaccctccaccctgtatagtcccagaaggcacactcacctgcatgtcaggaggtgtccttggacaaatggggtggacatgaaataaggcaaaaagagccttaggcctggggctacttggaagttagggctacttacctgtgctgagactcagtctccttaattaaaaaacagggcaagcaccatctgccctgagcaggagtgaagggacccgccagcagaccacaggccctcccgctgtctcacccacgctctgctgaggctcagtgtcagtgatagccatctcaagggctagacagacgtagaagaaacagccatttgcaaacttccacccgactcaggatggaggtttgaaattcctctttcagggtaggctgcttcttcactttgagaaaaatatagtagaggccctttggtgattgacggtgaagcaagagcctgtcctggaatagaagagaggcctggggagccacctggccctgcctgacaacggaaaggtgcttgtcccagcacagcggctagagatgaaagggaaggggtacctggctttttcttccgtgggccctgatgagtttggggcctgggccctgggtgggctggactcatgccacaccacatgccactggctcacacctcgggctgagccaatgaaacctacccaggggcttagtctgtgggcctcatgcaggtacagtttaaaggtttcactgtgtgttctcagctttctgtgctttcagtctttttttttttttctttctttctttgtgacagtctcactctgttgcccaggttagagtgcagtggcttgatcttggctcactgcagcctccgcctcccaggttcaagtgattctcctgccttagcgtcccgagtagctgggattataggcatgtagacatgcaccaccaccacatccagctttttgtgtttttgttgttttttggggggttttttttttggtatttttttaagtagagatggggttttgccacgttggccaggctggtctcaaacttctggcctcaagtgatctgcccgcctcagcctcccaaagtgctaagattataggcgtgagccaccgcgcccagcctcagttaagtcttaacttgagtatggtcctagctgtgctgtggagtactagggggtgaggccactcataaggggaacatcggctgctagggaaagccagttgtaggcccccaagaggtgaaagcaaagaatgaagcattgcttggggttccataacatacctggggagggcagcctggtcaaagagggcatttctgccttcaactggcaaggcctgcacctctagctgtaggggcataaagggaggtgtgaggcctgaggtgtcacccactgtcccttagaggccctcctgggccaccccggaaagtaggaacccaagaacacaacacaccaccaagctctcaaaactcagttttattgacttccagcatttccccctggatctgagctcagcccagctggttttggttcgtctctgaggctcagtgttacagcgactggctccaccactcccctccctggccactgggctccccaggcagggaggaggagaggcagttcatctgtgatgttggaaagaatgggcagcagggtcagaggccaaagaaagccatacaagcagcggcatgcctggagctgccatcacatgccaagccccaccacacacacgcccccgcgggtggccttgccctcgaagctctctgccagcccacactcctcagctttctggggccacaccctgctcaggcagacatgccactcgccctggcttgttcctgggaccccaggctgcccaagggaaaggtaccgctcccaggtgctgcgcggctctgccctgcccactctaaccctggggctagcaagacgtgtcaggggaaccaaggctcagatcattcccccttcatctacaaccctgccagccctacagggataaatcaaaagacaaaatctccccatctcacagcgagtgacaagccgacctgggctactacatgtcccaagatgcacagctccgtaaccatacaccacctcccccaagcgggatctatcagaaatgaggccgggcacaccgcactctgggatttgtagtccccaggagccagcaccaaacacccaaggaagagagtgcacaggctaagactactgccacctcccacccggcccccacccgccacccaggccccggctctacactcagcatgggtgagggggagaaatggagggtcccctcccagygcatgggggaaggcgctgtcctgttggaactgtgcagcgattctggaacccggcatccagctcagaacacatctggggagagagcaggggcggggtgacaggagagagcgtcagcggcaagctgtggaggatggggctcagcatgcagacctgggctggccgcatggcctctccctgagccctgatttgtggtagggaagcagtatgggtgcagtcccctcctaggcctccctctggggtcccccggtcctatcccacctcttcagggtgagccagcctcacctctgcctagtcctgagggtgagggcaggctgaggcaacgagagggaggaggagtgggctccagttctgaatctggacagctgagaggctcccgccccacccggctagcctccccagaagatctcacagccctaccggccccagcatcttcctcgccacattgaggccttctcggggaaggaaggaagaagggagtcctagccagacggcagtgaaagcaagcgatgcggcccgcagggagttgcagagagaatgggagggaggagaagcaacaccagaagagaagcaacagagacggtcagagcgcaacatggcacagaaaccagggttgggggtctgcagctggtccaggagagcaggaggctccactctgcctgcactgctctccagtggagctgccggctccggctcagacaaccctaggccaagtcctccttccttgacaccatcagcaacacaggtggcagagtaccagggcacaaaaggcccagcccaaaccactaatgccccttggagctccccatccaataaatgcaacctggctcctcgggcccctccactgccctgacaccccccaccctgggcttcaccagggacctatcagccctgggctgagcacagcaaatcccaagtccacactggggtgtggggggcctgggagggaaacttgtggagggagcttggagttggaaagcagttcctacaactcaggatactcccctcttctcttcccacagtgagtcagaccccccagtcaagatctggatcagatcaggttgggcccggtgttcagaggatgaggcagcgagaggccttctcctctggggatggactgcgtttggttgcttcacccctcgcaccctcctgggtcccccccaagcctggatcttggtgctgggccttgggccgcccctgccgtcggtgctgtgcctcccgcccacctgcgggtttcttccsagctgcctccatctctgacaggctgtaggccatggccagctgcaggtcctcatcctcagagaggtcgctgtccaaggggcatgaggcaggggtctgctggacctgagtgcccccagacctggaagtgactgacggctgctgctcgcgacggctcagctccaagcccagtgccaggtcatctgggacacctgcaagagtcacagccaccatgaggccccaacctgagccaggggtattactgccaggctgcctcacacagtaacaaccctgaccacttagagtctcttatttggaattggcacacatgcattttggcacctaggcttgtgattttgagcacaaggaagtattcagctctaccaggtagaagctcctacccttaggcaagtcactcaacatccctacccctccctttcctcatctagaaagtgggaatgatggccgggcacagtggctcatgcctgtaatcccaacactttgggaggccgaggtagaaggatcacttgagcctagaagttcgagactagcctaggcaacatagtgagaccccatctctacaaaatagtttaaaaattagctgggcatggtagcacacgcctgtagtcccagctacacagggggctgaagtgggaggactgcttgagccgaggaggtcgaggctgtagtgagccataatcgtgctgggctgagcacgaccctgtttcaaaaaaagaaaaaaaagaaaatgggaatgatgatagtgccttcatactcaaattgttccaatgattaaatatgtcagcccatgtaaagggcttggtacgcagtgctgggagtcagcaggcgtgaaaggttagctgtggtgacggccctgcacagcatggtgttgcaggggcagttctgctccgggaatcgtgcgtcctgagtttgactcctggctctactccttacttggaaggaaagagtcttgggcctgggctacttggaagttagggtcatttaactatgctgcagctcaggctccccaaattaaaactaagtggataccatctgccctgtgtactcccccagat

SEQ ID NO: 93256 - DNA, 45567 bp, Homo sapiens
gatgacattatataggctcaggcaatggattctatcttcttttttattttatatttatttatttatttatttatttatttttttgagatggagtctcactcttgtagcccaggctggagtgcaatggcgtgatcttggctgactgcaacctccgcytcctgggttcaggcaatttcttctgcctcagcctcctgagtagctgggattacaggtgtgcgccaccacacccagctaatttttgtatttttgatagagatggggtttcacccagttggtcaggctggtctcgaattcctgacctcaggtgatctacccacctcagcctcccaaagtgctgggattacaggcatgagccactgcacccagccgggttctaccttcttatgtaccatcagccagcctctggttatcagggtatgagtgagctcctctcaacttcccatttctgcaatagaattgttcacactgtctcttccttcccctctcacctcaaatctaacagaaagaacgttaaactcagttcctgaagacctgggttcaaaatctggctctgtcacttactgatctttacctctctaaacttcatgtttcttattgcaggagaagaataacagcctctaactctttagggagactgtagtattcaaatgtattcatataaggagcaaggctttttataaaggggcagtatttctaacaggatttccctggctcagaaacaggcagagaaaagtggaacatagaaagcatgaggtggaaactggcatacacaggttttgtttgagctaatttaatttttaaaaaaagattgtcggatgttttctcataaaaattcagatttttgacttctctgcaaaaatccaaaactatggcaacaccaggcctgcattcacttgggggcaacaatgggtggagctgggtggtagctgccctggggctttcccaccacttccctattctggtctctggcttggtttgcttcatataaagctatctgggtttttgacctctaggatggagagaagggaaatagatccaaatacctattagaattgaggaaaaggccaggtgtggtggctcatgcctttaatcccagcactttgggaggccaaggtgggcagatcacttgaggccaggagttggatcacttgaggccagcctggccaacatggtgaaacctcatctctactaaaaatataaaaatttggccaggcacggtggctcatgcctgtaatcccagcactctgggaggctgaggcaggtggatcatctatggtcaggagtttaagaccagcctggccaacatggtgaaaccctgtctctactaaaaatgcaaaaattagccagatgtggtgacgggcacctgtaatcccacctacgtgggagactgagacaggagaatagcttgaacccagtgttataaataaattttcagtggtgccaaagaaatagcactcaaacataaatttaattttctcagcaaggcaattttacttctatagaagggtgcgacttgtggatggagcaatggcaagagacacctgaataaaggaggggaaggggttcttattcctgatgcaggtagcccctactgctgtgtcattcccctattggctagggttggactgcacagtctaagctaattccgattggctactttaaagagagtagggacacaagtcagagtggcggggtgagtagtttggtgggaacaggtgactcaagatgactcaggtcagagtaggtgaccaggagtgactcaggacggagcaggtgatagaggctaggaggtggttgtttactggaactaggggcaaggagacgaaaactttaaaatgaagagctgaacataactgatacattgattctttggagaggatctcagaactcattgtacttaacaatttacaggctaaaacctttgaagaggaatttattatatcctacaccaggaagcagaagttgtagtgacccgagatcgtgccactgcactccacctgtcagggaaacatctcaagcatgaggtcatgaaagtcaaggcccccagctgctgcccttgggcaacatgggagaggtgaaatttaacgtttgcttctcctcgtagtgattcccctctgaaaatgtcctagctttttggtaaaggaacgtgcactgtctggtgtgtgggtcttgtgaaccctgaggaggtggagtggcaggagatgggggctttcttctttcccatttcctcctggtgtccagggaagatgcccgttcaccttgggaggactgagactcggagctccaggtaaaactggtgggctaggggaggtccccaaatgttggtgagaccttgaccctggccagtatccaggttcttgacaccactgcaagaaggaattcaaggatgagtcagaaaatagtgaaaatatggagatttattgcagtgaaaagtacacattaaagaaaggggagtgtgggccggctcaagagaggcagttgcaccaagagacagttgcaccatagggtttagagttaccatctttatgggtttctttaaccaaggggtgaatattcatgaagatttctggaaaaaggtaaagatttcttggaactatggtatcatccttttttttttttttttttttttttttttttttttttttttggggaaagagtctctctctgtagcccaaaaaaaaacccctgccccccagcccgggttaaagaaattctcctgcctcagcctcctgagtagctggaattacaggcacgtgccaccatgcccagctaatttttgtatttttagtagagatggggttttaccatgttggccaggctggtcttgaactcctgacctggtgatccgcccacctcggcctcccaaagtgctgggatcacaagtgtgagccactgtgcccagctggtgccactcatgtttgcaccaaatatgggtgctcctagaactgtcacagcgctggtgggtgtgtaatttaatatgttaatgagtgtataatgaggtcctaggtgaaacctaggtcaaatccagtgctgtgttggttcccatcagtcttagccagcttggcccacatcttgattttcggggtcttcttggcccttgcagctattttaacagtttccttttgctagttgtgtgaagctgctgcctggaattgtttatttccctgcaaccaccgtgtattattcctgcctaatttgactgcccgcagagatttttattctttatttttaagggttgatgagggagggaggaggtcagtgttttatatttactttttgttgattagggtcattggccatgtctagttagggcatggaaattcctagctgcctgttttaagggtcccaagggtgggttattaggagagtctgaatccgaggcagggattggttggaatttttgtatgaccattattttgacatggaactgccataatccagaagacacaaactttataaggaggttaaacaagcaaggaccaaagattagtagaaattagagttattaaaggttccaggaaaggtaggaactgtgtcacacttagtaggtatttttttgatgaggtcccagatggtttgagcagtgtgcttattgaaattatgtagccaggtagcatgttggtaaatctttttgtttgtttgtttgagacggagtcttgctctgtcacccaggctggagtgcagtggcgtgatctcggctcactgcaagttccgcctcccaggttcacgccattctcctgcctcagcctcccgagtagctgggaccacaggcgcccgccaccacgcccggctaattttttgtatttttaatagagacagggtttcaccgtgttagccaggatggtctcgatctcccgacctcgtgatccgccctcctcggcctcccaaagtgctgggattacaggcttgagccaccatgcccggccgcgtgttggtaaatcttttgagctggcagtctaattaatcctgagttgttaatataaagaacaggtgtggtttattactgtgtaaacccctttgtttagctagaagataaagccttctgctttttgatcatttgaatggcttatgttttggccctgttagggcctcatacaatggcttagcaattctgcaaaatcctgctatacccaggaaagttcttaggttttttttttgttgttgttgttgtttatagaggttttacttctaagtaaacttttgtttgatggacaaggtccagtttcctgagtttagaatatactacaggtatttcacttttggtagagaaatttgggcttggatggagagaactgattttttttaaggaagtttaggacttgaatggcatttttatttgagtcttctttagtggggctgtatacaaagatgttatttacatactggagtgtggctctcctttttagctctggctttcttaacttttgtgtcaaggcatttttgaacaagcaagggctatccctaaagtcatgaggcagtattgtcctggtgtaccattgggtaatagtagtttcaggattagtctacttgaaaggaaataagttctgagagtcgaagtgcaaaggaatacaaaagaaagcattcttatgatctaacactgtgaactaattggtgttttctggtatttggttaagtatagtataaggatttggcactataggatgtaagagaattatgacctcgttaatggctcctaagtcttgaactagatcatatatatatatatatatatataattttttttttttgagatggagtctcactctgttgtccaggttggagtgcatggcacaatctcagctcactgcaatctccgcctcccgggttcaagcgattctcctgcctcagtctccccaagtagctgggatcacgtgtgccaccacgtttttaaagcatggcctcctgtccttcctgtccaaaaaccaaatgaaaaatatggtctaggttgggtgctgtggctcacacctgtaattccagcactttgggaggccgaggtaggtagatcatctgaggtcaggagtttgagaccagcctggccaacatggcaaaaccctatctctactaaaaatacaaaaattagccrggcgtggtggcgggcacctctaattccagctactctggaggctgagaccggagaattgcttgaaccgggaggcggaggttgcagcgagccaggattgcaccactgcactccagcctggacgacagggtgagactctggggagtggggaggagagaattaacaaactatatgacacaaaggaacaaaaatacacaagacaggataagagagaggaaggatacagggagagctaacatacatatagcagtttgaagtcccgggaaaggagaaaaaaatggggaggagcaatatttgaacagataatatctgagaaactccccagactgatcaaagacatccagtcacagagtcaagaaactaggagtcctagaataaataagtagaaagccacacctagcaactcagctgtcagcctaattgaacttaatatgccctttcttctctggctgcctgtaaatcaccaatttttcaaatgctgttagaaccagctgtaccatcctgctgggtccttcattcctggcttgaatgtgatctttgaccctgtatttattttatacttgcgtgagttatgtttttaaactttttgacaactatactttgaatatacatgaaacataggattcataagacaatactttttttttcttcttgctgtacgttttccgtactatgttactctttccattttattaaaaataattctggccatcatctacgaaatctggtctcaacctgcagtttgaaatatcctgccttggcagacgcggcagggaggtgcgtggagggagaattgaattaaaaaaaaaaacaacaaaacacgaatatttagatttctttgttcagcggcccccctccagggatcagatgactggcccccctcgctccgaactgactccgggatcaatccggaaggccattgggagaagccgagggcagcttagccacggccggttcccgttccctccaggacgcgagggtcgccttgggtggggaacccgcgaccgggcgaggacctatcccggtgtggggcttcccgatttcgaaagaatctcgctgcacccccgcccagagttcagaccaagcgaaaagttatttgagaggcctcgggggcgcggggtgaggagtcgtggcggaggccttggtcggggcgccgtggatatccccgagtcaccgcgtccctctcctgcagctcccgcgtcgctgggaggagcgagggagcgagcgggaaggggtctagctggcctttgctcggccctccccagcgcccggctttgaacccgccctgcactgctgtctgggcgggtccggggactcagcactcgacccaaaggtgcaggcgcgcgagcacaacccatggctgcgctgggctgcgcgaggctgaggtgggcgctgcgaggggccggccgtggcctctgcccccacggggccagagccaaggccgcgatccctgccgccctcccctcggacaaggccaccggagctcccggagccgggcctggtgtccggcggcggcaacggagcttagaggagattccacgtctaggacagctgcgcttcttctttcagctgttcgttcaaggctatgccctgcaactgcaccagttacaggtaacccgcgggggcatcgcgtcctggggatgggagtgggcaccggaacagagaggctagaggtgagaagacgttggacagaaagtgaaggctgcaggaactcagctggggacccactgaggctatggtcataaactggaaatcagtagggagaatgggcaaagtgcagacagagccctttgagctgagataaacaggacgaggaagggcttaaatcaggacggcaccagtaagggggggatctggacgccggacttacagtgagcagaggttgaggagggagctgtcttgggaagagagtggcagaggcaaatgtgtaagctaacggatattatggaatcactaattctgggctgatattggctaccacagacttcttccaaacgaaataacttcaggaggattatagaaacctcttggttatttgcaaggtaaatttcctcttaggggaaaacacaatgctgcatctcagatcgtggaagcaaactcacagacagtaaggaaaaggtactttttgttattaagaaatcagtctgaggccgggtgcagtggctcacacctgtaatctcagcaccttgggaggctgaggtgggcagattacctgaagtcaggagtttgagaccagcctggccaacatggtgaaaccccatctctactaaaaatacaaacattagccgggcatggtggcacatgcctgtaatcccagctactagggaggctgaggtaggagaatcgcttgaaccagggaggtagaggttgtggtgagccaagattacgccattgcactccagtctgggcaacaagagcgaaactctgtctcaaaaaaaaaaaaaaaaaaagaaaaaaagaaaaaagaaatcagcctgtagtctgtgttcaggttagtggtgttgggggagaaaaccaatgtctaataagaaagttttatacagcagaacacagaaatgaggcagggatgaacagctcactgctcactgacagagaccggaaaacccaacactgaccaatgttggagaggatttagggaatgaaccaaaggggttcatacaggatctatcttcctaatgactatcaacaaatatgaatgcacctaccatgttctaggcatggttccaagtactgggattcagtgagatgaggcttctgccctcatggggcttaaatgctcctctgaagaagatggaggacaaagagataaagcaacaaaaagttaacttcacagagagaactctgggggagaagctgttctaaggttggggaagagggagggggcttcgattcggggtgcctccacaaggacacttggttgtcagggactgataggagtaggctggtcctgggctggggtagccaaccatctgctggtcatgtgtctgtgctgggaaggagtcaaaagtaaggaggagctgtggggactggggacaggactggcctttgaggacagccttgaagatcaagataagggccctggttcctctgaggggccatggtgagctcttgagcaagcatggggtgaagacggcctgcatggaacactgtccaggctgtggtgtgtgtagtaggagaggtgcagagggtctaaggtgatgaaggctcaggcgtggcaggatccaggatggagaggcagatctgagccacactccagagaaaactggaatggaggttgaggatgagggagaagatgactctgagggcaacgaagggcaaaactgactacaaccagggctgcatcctctgccctgtcctggtggctgctgtctctcctgcaatcttccctgttgggctcatgtttgtgagacttggggatgtgaaaataaataattcaaaacctaagctgttggaactttaaaatattttgagccttaagggaatgtgattatgtgattatggcactcaagtcacataagcaggctgctgtaacctttgtttctctgattttagattaactttctttacctctgttgttttgaaaatgttgtaaatgtctacaggaggccaaggaagatgccttccctcttcactgttgaacttcattatagattaacttccttttacctttctcacgcaaagatttcatgcctatcgcattgctttaagaagaaatgttaactatactattttaaattggaaaggaaatgaaaatgagacacatggaaaagaaaacaagtgataactaattaaattgtaacttataaaccagccttgtgtagaaaatgttataaccctatgaaactttgtttcctgtctatataagcaaggacttaacttttaactttggagcactgatcccatttttctggagtgtgtgcttcccaaatggctattcccagcttttcacttgaataaaatgtttaaaactggattctgattcttttgagtatttcaggttgacagggggcaggtcacaaaatactgagagatggttttgaaatcacttcttgtgaacccagatcctttaagccagtggtccccagtctttttggcaccagttttgtggaagacaatttttccatggactggggtggtggggatggttttgggatgattcaagtgcattacatttattgtgtattttatttctattattgttatattgtaatatataatgaaataattatgcaactcaccataatgtggaatcagtgggagccctgagcttgttttcctgcaaccagactgtcccatctgggggtgatgggagacagtgacagatcaggcattagattctcttaaggagtgtgcaacctagatccctcacatatgcagttcacaatagggtttgtgctcctatgagaatctaatgccagcactgatctgacaggaggcagagctcaggtggtcatgtgagtgatggggagtggctgtaaatacagatgaagctttgctcactcacctactgcttacctcctgctgggaggcctggttcctaacaggtcacagactagtactggtctgtggccccgttgttggggatccctgctttaagccaagaaaacagactcctgttaacttcttctgcttggtttaacctctagaaatgggagagacccagtaaatgcctcaagggtgagaactaaggatttctcaggggcagatttgcttaggatgatgtctagagcagtaactaaccaaagaaattctagatggctttaggatgaggaagaggaagcaggggaaagtcaggaagtatggctttttaaaggagagtctagggctgggatatagtagcagagccacctggtttcagtccttgtatcccaaagatcttggggcacacgaacctgggccatcccatgggaaatacattagtccttcccattacatgtggctagtgtgagttaatagaggagtgttgtacatctataaaactcagttaataaccttttaaaattagagaatgtgtttcagttactcactttgtatcagaatttgttaggttgccactcaaactggctyaaactataaagcagctttattggctcatagaactgaaaagaccaatagttgagtgtccttcaggtgtatttattctagagattcaggaagtcatcaaagctrcagctttggctgggtgtgatggcacaaacttacagtcccccagctacttgggaggctgaggcagaaggatcccttgagttcaggagtttgagaccagactgagaaacatagcaagaccccayctctaaatttaaaaaatggcagctctgtttttctgcagttcccttggctcagctgtcttgcaggagttggttgactggcttggcctgggttaattgcctatccatgagcccacgatagtggccaggtggagatagacataccctaattagcttacctctgtggaggttcaccctcaagctgggattagggtccctcccacccaaaccaggtgtctgccacacaaaggggaggacggcaatggatgtaggaacagccaaccacaatgtcccttgtgccctcagttgtcaaaaactgcattagcacacataaaagtaataaaaatcagctttgagaagcattgtagcacttaagggagtgtggtaggaattaggacatgtaaaagtcgtactacataaatgccaatgccagtgcctttctctttcctaataaaaattacattgaatgctggaaaaatggaatgtaaacatatgttgcatttatgccaaattaatatatttcaaacatattkatcctgagaattatgagatatctattctgtagctctttttgtgcactgcctggcttggtgacccttcctgtgccccccagtgcccaggagattaatgatttaatccctccaggtgccccaatgtcctaagtacatatgtgtcattttatgttatcatatttctctttcttttttttttctttttttgagacagtgtctcactctgtcacccaggctggagtgcagtggtgcgatcatggctcactgcagctttgacctcctgggctccagctgtcctctcacatcagcctcccaagtagttaggaccacaggcatgcaccaccactcctggccaatttttctatttttggtagaaagaggtttcgccatgcccaggctggtcttgaactcctgagctcaagcaattcacccactttggcctcccaaagtactgggattataggcataaattactgtacctggccatcatrtatcttgtttcttatcatcacttgtttatatggcttagagattgggctgtgaagctgtgagggctgggcctatgtctttcctacctctttcccccaagtgccaggcacggtcttaggcataggggaggtgccatgagtggtactgagcagtggatacatctgatggtaaacttatatgtgacactcttcttcccagctccctgatctgggttgtttgacataatatagagtgaagaaaagacaatgagggaggtgggcagattgaacaagcctgacccttcagttctcagtgtttgaggtttcagaaactaaatgttgtcatcacattcagcatgggcagattactggggactgacccacactggccaaatccagagaaacaaatgtgtggactggagtgcccaacatgattatataatgaggaggtgctatggtttgaatgtttcctaaagttcatgtgttggaaactcgatctccaatgcaacagtgttgacaggtgggacctttaagaggtgattggaatgattctgaatgattagttatcatgggagtggttactgataaaagattattttaacccctccctccccaccatacccacatgctctgctttctgccatccgatgacattgcaagaaggtcctaaccagatacagtcccctcaactttggaccttccagcctccagaaccgtaagaaacaaattgctgttctttataaattacccagcctcagatattctgtcatatcaatacaaaacgactaagacaggaagtcaagcctcccaggaatcataatactccattgcactagaaccctctgttctagttatctattgctgcataacaaactatcccaaaccgtggttgcttaaaacaacaaatattttgttatagtcataattttgtgtgtcaggaatgtgggcagggcacagtgtaaatgacttatctctgcttcatgatggagtgggccttcagctcaaatgggcaaaatggagaggattgctcaagtgaggccatatgtctgggccctgagtctggcttttagctgccatgtcacatcttctggggccggaatggccaagatgagttttctagttgcatgttttgtgcctggcctggtttggccagaacagctggttatctttctctcttcatatgactggcttgagcttccttacagcatggtggtcttagaacacttggacttcttgcatgtactggcttcccccagagtgaatgttccaagagacggaaagtagtagttgcagtttcttaaggcctgggcctgaaaaccagcacagtatcatttccactgtattccactcatcaaagcagttacagagcccactgagatcctggagacatggacttcacctcttaatgggaggcatgtcaaggaatctgtagctatctttaatccactacacccttttcctaggattcaggtacctagggagagaaattattaactacattactgaacagcttggaaggacccagaactaaaggagtagaatcgtatggaagaaaattccatctaggccttggagaaacccttttgaatatacttctctggtgactctccgttaggttaattatctctctcccttggactgtgagtgataaatgctgccaaattcttcctatttggcttccttcttctggattttgttaacaccactcccattctgttaacacattctttcttcagtttgacaaaaacctttgattagatagattttcttccttagcactcatgttaccatcaggccttccagagattattgtccagttaccttgactggacttaagtgtttttcagggccatctggtagacatctataaagttgtccttgaggatgtagcagaacagggaacatggcccaaaagcctcagagatgggaatatgaaactaagtattaaggtgaaatatgtgtgagttatgccaatttagcaattacattgccagaatgaatcatagcaatttagcatttgcccttacagataaactgctgtaggcaaagagacatgcaagaatattcaaggcagccttatttgtagtcaggaaaattagaatgatttaaatgtcccatagtagggggctaattaaattatggtacatccatatgatgaaatttcatgcagccattaaaaaggttagggacagatctattaatatttattgcttgctaagagatggaaagaacgtgttgaaaaagaaaaactttagctgaattaagtttaacagagtttaaatgagcaaagaacaattcacaaatcagacagcgtcccgagccagagtaggctcagagactccagtgcagccatgtggtggaagaagatgtatgaacagaaaaaggaaagtgacatacaaaaaatggaagtgaggtacagaaacagccggattgattacagcttggcattagcctaatttgaacayggtttgaacagttggccacctctgattggccaaaacttggtgattggcacaagagtaggctacagtctgtatacaactccatttacgttatagtttgtaatgtgctgagaaacctttaggccaaacttaatatataaggaggcagctttaggctaaacttgaacttgatttaacaattccccactttcggttatttcagttttagaggatgaccaagactttactcattgatgtcattatcaccattgtaaatgtatttatttggtmttggaacccactgggaaatagcagagcagtgggttttgtaaggtgggaacaaggacttcaggttatttttttgtgaaggttagagtagagggtacctccttatggtgggatgtcctgtttacagaagaaaaacaaaacttagtctgttctaggatctatttgtttccttawagtcttagtttgattatgtcacatttagcataaatgactctattttggtttggtgtggtctgttggaggctagtgcatgagcttagtcgaaaacaatggcctcccataatttgtttccaatttctcctcttttggtcagtttcttacttaggtaagagtatgagcaaaacttagggccttagcactgctctcagttacctcattttgtgtttctggtctcagcacatcattcataggttatggtgcctctcatggtcacatatatcttttagctcttttcattccagttgaagagagaccatttgacattctagagatggctgcatgcaaacatttaaaacttttgagagaatacagtgcaccacggagactactgttatgactatcaagaggataatacctagagtttggactatgctccttagccaggttccccataaaacaaaccaactaaaatcaaatagatcaaagaatcagctaaagactctacttgctttaactaagcagtctctttgttaatcccctacaactgaatctctaaaataccagatgtgatggaagtgccaacagctgcatagatacttccctgtttagccagcaggtaatctagagcaattctattatttagcataactttcagaagagaattttaagtctgttgtgtaaccatatcctttacagtagaatctgctagagagcctatcatgagggataaatttctttctttcttttttttttttgagatggagtctcgctctgttgcccaggctggagtgtagtggcacgacctcggctcactgcaagctccacctcccgggttcacgccattctcctgcctcagcctcccgagtagctgggactacaggggtccgccaccactcccggctatatttttttttgtatttttagtagagacggggtttcactgtgttagccaggatggtctcgatctcctgacctcgtgatctgcctgcctcagcctcccaaagtgctgggattacaggtgtgagcccctgtgcccagccaagttttgtatttttaatagagacggggcttcaccatgttggccaggctggtcttgaacacctgacttcaagtgatccaaccgcctcggcctcccaaagtactgggatgacaggcatgagccactgtacccagctgagggataaatttccaatcattgcctcatttactccaaaccatggaaaaaaggacctaatacatgatgccctttgagaagagttaagacctcctggcaatgatctttttaaaccatgatgtaggttaacaggagtggaccagtgctctgtttctgacagactatgaggcaatgtatgtgtcattaaaatttcccacctacattggccctttgtcttccatctatcaaggcataaggttatccatgtaataaggctggctgcaaaatctttcacaaataaaagtacaccccatgagtgcacacaacagacccccttttcacttctattattcgtaggggcataaacaaagaaaaaattgaaagataagagtctcgtgatagtaaagaagtcttgatctgtgatcttgggaaaaagtctacatcaaggataccgtcttcttctggggagaaacttccctggttagctttaccttaaggtttctaatgggtgtacagttccaagtatgtggagggacccttctgagttatgaaattatgaacccaaggttcaaggtctcaaagtcttgatgcagtatggatggcaagtgcagtctttctgtgacattctcagaagacctactctttgggctctagattgtgaagggcttcatgtcctcagtcagtgaaccatgaaaagctttcttttcctggtgaaaatacacggtggcatgatgagctactgttacaacatcagtcctcttgtgtgggaaagcttttatacaaccagacgacctgcattgaaaaatgacaatagaatgaaatccctctataaatgtttaaatgtcccatcagctagcgaaatgtacctgaaatttttattgtcttcccaggaatatgggtttgacaaaccaaatattggtcataaactattttagcaatgtagaagtcactmcacacacacacacacacacatttaatttggatcattttatgtttttcatgatgagttatggaatgcagaacttttaataaaaaaaagctttaaggactcaggaaggacaaggtggctgtcctggttctctgtgagtccatgcttaacattggacttacatcctcttggataccagttgtttctccaatttaggtgcatagcactaataattgataagttatcataggtaatttgacttagaacatggagttcattcaaactgtatatctaaacaatttcagtactggatgatttagcatgaacatctggcaaggtgttttttttggtatttaattaatttttgttctgcttgggttagcagttttataaaccagtcagtttcttcactgaagtttcaagaattcttacccagtccaaatatatgattttaaagttattataaccttttaaaataattcaagagtgcttctcagggttctttctgtcctttcatgaacctccttaaagacatcatattctaggattttgcgtgtttgtgaaattttcataaactgcatcagaattaagcaattaattggggaaatgacttcaaatagtcatagttaatgacacaactgacaaggaaatttggttatttctgtggcctacaataatataaatatacattagaattttagaaatcccatacaattttggaacatatattaataacattcattaaaatgtaacctgaggaaggttaaacattgtttctaatttgacaatgcttcccatgtaacttagcatgtcaaataattctgtttacctctcttttggatgcttcagggaacctctgtagcatcccaaagttaaaggtcaaaaaagacttaattttgaagctgaaatctgatttttgggaagcctgacaaatatgtcaaaggtttaaaacacttgaccaaaatagaatcacaggtcaccataaaacaatagtcattcatttaaccaaagtgataattaaaagattctttttatttgtttgtttgttttttgagacaaagtctcactctgtcrcccaggctggagtgtgatggcaccatctcggctcactgcaacctccgcttcctgggttcaagtgattctcctggctcagcctcccgagtagctgggactacaggcatgcaccaccatgcccagctaatttttgtatttttagtagagatggggtttcatcatgttggccaggctggtcttaaactcctgacctcaggtgatccacccaccttggcctcccaaagtgctgggattagaggcatgaaccatcccacctggcctaaaagatacttaaaaacaaaaaacctgtactctttgataaaggagactcagttttccgaacaatcaaaagacataagacagcatgagacagaatctcttctttcctctctcttttttcttgttgcagtttatgtaaaaagtgaacaaaaatattttactgtcttattaacactacagaaaattttatccaaaagagaaatatttcacttttgtattagtatattatcatattaaaactaattttaataaaacttcataaatacatttatcaaatttgtcatcttttaaaccacacatttccataaaccttttgtttcacattttccccaagtttctctttctttttttttttttttgagacatattctcactttttcacccaggctggagtgcagttgcaccatctcggcccactgcaacctccgcccccaggttcaagcaattctcatgcctcagactcccaagtagctgggattataggtatgcgccaccatgcttggctaatttttygtattttagtagagacagagttttgccatgttggccaggctgttgtaggactttcttcttagttcaattaaaaatggggtccttgtcacacaaccaggaaagattaggctcgcggacacatagaagggtgagaaaaatggaatttattgggtgaaaaggaaaaaaattcagtaaagctagagaggtgcctgttaacaggcccccatctcacagattgaatccccaggttaccaccctggtacgggagaggacaagctcctccctctgcaaacgggtaaacctcccgaggctccaccccagtgcgcggaccagtcggagtttctccagggacctctttttacttggctgtctcattccccactctaaagaagtacttctaactgccattagaataaggattgggataaggatgaagattgatcttaactgcttcctgctgacagcgggcatagttttgggaaaatggcagtcatatctccctcagaggcctaagggtccccggcaaaacgggccattgtcagaggctctggttgcatgaccatttggagtttgatggcctgaaggtgagaagagacaaaccaggttattagaaaacatgtatcaaaaggagaaaagggcgggtaagatcagctcaaaaatcccaaggccttttaccagtttgcccagggagagggaggccaaaatcctgactggttaaaaaaaactttacccttttgccggcgtgttgggcttctgggttcccttcccttgagcccaatcctgaaccagccagtttaaggtttgggaaattaacttttcccagtttggaggatgcatctgaggggagtgtcctgtagtacagagccacaattacctatcagtgaagagaggacagaggaggagaaaagaaaaaagaaggctccttttcaaaggggtcctaggggttcaggatgcatttgaaagggtacagactgaagaagaatggctactcatctagaaaagagaggagcagacatctctggttcccttctcttcctagcaaatatctggggtacatgaagaagagaaggaagagtattctctttccctcttccatccttgcatccctgaatcctgacaactgcgacagggtgccacccatgggtgtcaaagcggcctgaacccatgaagcagggagggcctagagaataggaattatscactctcacctrtgtctctattcccactagtgtcagtagccttggagttccctagacctcatttatgccatggatactagcatgactttatccatgaaatgagaggcttggcttaatcagcagraattagccatgctcacctgtgctgtgccttttaacctctgttatcatctgcctctggatcctgtagatccagttttctttcctagggctttgacccgaagcttggaattgagtttgggacaaaattgtgtctcagggggtgttgcatggactycttatcataagccaaatgctaaggtgaaactgtggaatcgagtcctcctgcaacaagggagagaaagggatgtcttgtgacacacccagataactggtggctatggttatgcttgctaagacttgggtgcatggtgcttggttttggttagctcccttggtcttcctttcccaaaaaggaaacctccaagtgatgggcatcctacttattcctgtcacctgacaggatttgcaggataattgctcagaaccagaatattgacccagatttttacattatccrtctgagctgcagccaaagattgctggtyggttcacaggagcaggcagkgttagtctaaaatgtaggcaaaaacttaagaacaatgaatgagtttagaatttaattacaaatgtataagttttgaaacataatttctctctctccagtcctcatttttgttaaaaaaaatcataataggactgagttgtttgcaaagtagactttagtcttatacttggcctgattatttgcataaagtacagcaagaataattatttctacataggccttttagattggctttgatggaactctgttccaaaaggaagctcagataagaccttttaaagctgagcccagccatgggtttgtatccttaaatacctgtgagttgggtgatcctctcctttaaggtcccaagataaactcggagctcctgggcctgttagaaagtgacattctttactgaccacgggtcaggaaccctgtacagggactgtgtagtcgagggtataaggccagtttcttttccaaaaggggcttttattggcttggcaagtcgagcttgactccttaaagggaagcatacctttctagtcaaagccttggtaaaacaacagtttctccaattgcatcctgttgcaaaagaaaaatggattcttattgcactgatgcaaacaactatattgccataaattaagaatactctgctgggtgcagtggctcacgmctgtaatcccagcactttggggggctgaggcggatggatcacctgaggttaggagttcgagactagcctggccaacatggtgaaacccccgtctctactaaaaatacaaaaattagccaggcgtggtggtacacacctatagttccagctacttgggaagctgaggcaggagaatcacttgaacccgggaggcagaggttgtagtgagccgagatcacaccactgcactccagcctgggcaacagagcaagactctgtctcaaaaacaaacaaacaaacaaaaaaacacaactcacagatagtttccaaattctagaggaacctggcagagagaaacaaacatgctccaagttttgttcacgggcatatagcttactcaattattaaggctgtaaataattcaaaataagtttctttgactctgaaaaacaaaacaaggatcagcagtattacaagcaaaagtcaaaaagacatgcttcagtttcctgagttctttcagttagctcttgttttgcttgatatttgtgaatatttcagctcttcctttattccaatgtcgcaatatccaaagttatcagaaacctgcatttgagaacacctgtcaaagtcctatagcttactataaaccgtctttcgaaaaggagtaaaacaagaaaacaattgtctgtgaaaaacaaaattcccagggtagttacagttagaaacacagttgacaaagaagtctggttatctctggtttacaataacttaacataacaacctgaattataatttttttttgagayggagttttgctcttgttgcccaggctggagtgcaatggcatgatcttggctcactgcaatctccctctgcctcccagtttcaagcaattctcctgcctcagcctcctgagtagctgggattacaggygcccaccaccacacctggctaatgttttgtattgttagtagagatggggtttcaccatgttggccaggcaggttttgaactcctgatctcaggtgacccacctaccttgcctcccaaagtgcaaggattacaggcacgagccgttgcgcctggccttaattatgattgatagcatatactcagacatcagaatttccgagatcccatacaattttggaacatatatcagcattattcaccaaggtataacctaaagaagatcgaacaccattttggcaatctctaaacatgacaaattatcctgtttaccttttccagagaccctctgaaccatccaaaaagccatgcatcaggaaagacaattttgaaactgaagtttgatattgggaaggctgttaaatatgttagaggtttagaacacctgatgttatgaaatagaattccagattatcataaattatttattttgccaaaatgatgactcagaaacttaaaagcaaaaagccttttataacccttcacaagttttgctaaagagcagattagtgccttaagagtatccttgtgcttttatttcaatgctcaatttacagaaaaagcatataataccctttggaatttagtcaatatgttcacacacagaattttgcaagattaatttttataatcctttcactacttgtttgaatttttagcttttcttatctaatttaaaacaatcttttaaccctaggcaagaatttacattttcatgccttcttataatctttttttttgagacagagtctcgccctgtcacccaggctggagtgcagtggtgtgatctcggctcactgtaacctctgcctcctggattcaagcaattctcatgcctcagcctcccgagtagctgggattacaggcatgcaccaccacacttggmtaatttttttgtatttctagtagagatggggtttcaccatgttggccaggctagtctcaagctcctgacctcaggtgatccacctgccttggcctcccaaagttctgggattacaggcatgggttaccatgcccagccttcttataatcttttattaaaaatacattttgttgttcttacacaccttgcatataaatctattttcagttgtttcaattacatgttataatggtaactcctggcamttttaactttaatgtaaarcctggtaaattgttttttgtgctaggtgtagccaaggtttgaatccttccagcataattaagggtgtggttaattccatatgtcccacttaccaattgtgaagtaggcaagtcaaatagttctcaaaacccaaaaggcagtttagaaccttaaaacatttagaaagcctaggccgggtgcagtggctcatgcctgtaatcccagcactttgggaggctgaggcggatggatcacttgagtctaggaattcgagaccagcctgggcaacatggcgaaaccctgtctctactaaaaacacaaaaattagctggacgtggtggcatatgcctgtaatcccaggtatttgggaggctgagagatgagaattgcttgaacccgggaggcggaaattgtagtgagctgagattgtgccactgcagtccagcctgggtgacagagcgagactygatctcaaaaaamaaacaaacaaacaaacaaacccatgaaattggtagactttgagtaaagcagattaccctccgtaatgtaggtgggccttgttcaagcagtggaaggccttgtgcaaaaagactgaagtccctagaaggggaatgaatctgcctccaggccaccttcagattcaagattggattattgacctctgttggaatttccagcctgccagcctgtgctgcagattttatacttgccaactgttagggacaaactgccccaaaaagtttcttggtgctgcccacccctccccctaatgctctgcaactcttctccatgctgcccacccttcccccaagcctctttatgtttctaagcccttatctagacgccgcggtgaagccagcagacttcacttatcagaccttgctgtgataaggaaaccccaaytacaaaccatccagacggcacagggggaggtcatgggaagcataaacaaactttacctacaccctcctgtaagttcctgttcatctagctgctaccataaacgtcacacggtgatatgtggcaaaattaaccagcaaacaacctcgggatgcggccataccaaagaactgcctcaaactcccctccccaatataaacccctccttctgtaagtttggggctgcttcctctctgactgttaagggggcagccggcaggttaacaaaaacttgcttgcctgactttgagtctatttttcctttctctcgggtaacctcacaccaacctccataatcmtgtgagccaattctgtaaaataaatctttccctatatacatacatcctattgtttcttttttttttctggagaatccttattaatatatccacaaaattacatcagtccactgtccaatctgagagtttcttccaaatccagttraagtaattttttgaccataaccatgggtatttctcggtgccccaatgacttgtgcccagtgtcggaaaaggctgaacaggttcgacaactgtggttgccatcaagtccccagcacaccttgatcagtgcataaagcctctgatyctccttagagaaggagggacttgggtttctgccctagtcctgttcatcttgacgggggtaagatcttgccaaaacacaaggagacagatgactgcaatgcaagttgtggggtacctccattgctgagaaactcctgctagaccgcagccaaggggttttatgttctgcgactcttttctgagggagaataaggcagaaagtccatatctcagaacctgagaggtgatgagaagctgtcttgggacacctctgaggaagatggggaggccagtgaagagtgggaggggcctcccattcttcggtgttccaggagkatcacagggcaatcagtcttcaaggctcagggaaggctgagtccaagcctttgtttatatggaaggtcttaacggtgctatggcaaagtaacgcagcctggtagaagaaataaagataagacactccaagtcagccagtgttattttgtgtggtggctcacaaaaaaataaaaataaataaacaaataaataaaaacacatgaccatgagacaagcactttcttttcctataaaaattacctttaaaaaaatcacataaatatgagttacgattacatgctaattttgtggctatataccacatttaatagaaaatgccatttagaattgaaataacttgcagaagtagtgtatgcayattttagagaaatgagaaaatataaagaaacaaaaagaagaaaatctaaatcttccataatcccaacacccatcacatagcacaatgccttatacccataggttcttaataagcgcttgtgaaatgaatacataaatacacccatatgttgttataagcatatggggaaagcattatctgttttccccatatgtcatctacatatatatgttttttaaaataaaagcataccatatgctctcttttgtaacttgccattttacagaaaagtaaatatgaatatctttttcaataaacacacttatataacaatttttaatggctgaaaagcatttcattggatggctacatcagaatttactggaccctgttggtatacwtttagattttttatgtataaagctttgattaacattaatctatctagcactaaatgtttgtgtacattctcaattattttcttagaataaaactcctaaaatggaaccattgtgataaaggattttgttcggatctttgatatgtagcacctgccaaattgtcttccagaaaagttacaaagaaaatagttttgcatgacaaagggcagtccaaaaaacaaaaacagggccacatgtggtggctcacgttgtttgtaatatcagcactttgggaggccgaggtgagtggatcacgtgaggtcaggagttcgagaccagcctggccaacatggtgaaaccctgtctctattaaaatacaaaaaaattagccaggcatgatggtgcacacctgtaatcccagctactcaggaggctgaggcaggagaatcgcttcaacctgggaagtggaggttgcagtgagctgacayggtgccactgcactccagcctgagcaacagagtgagactccatctcaaaaaaaaacccaaaaaacaaaaacaattattttttgcaaataagtacatgcagaatatatatcacaaagacataccattttcaactatgatatttgcaaaaacagtctctgcaaatatcatagttgaaagtggtatatcttcatgatayatattctgcatgttcttatttgtaagattggacctattttctgcatagatatactatttatatttctttttttgtaaattccctatttctgtttttatgtctatttttctaacgagtttttgaattgtgtaktcatacatattttcttcttgtatttttgtagtttcttttaaaatctttatcccacctgggattagtttctgtgtatggtgtgaggtgcacaaggcaggtgcctgaccaaggggtcacatgaggagcaggaatggagcctgcatttgacttgccaggccctgggctttggctggggctgcagctgctagcaggcttttttttttttttttttttaattcctatttaaggcactctttaggccagcaatgaccacggatgtgggttctaactatactttctccccaaataatcaactagttgctttaatgacatttgttcacttatttgtttcctcttatttaagactaggctaagaacaatcggaattagtttagcccgtgcggcctagccctagccaataggggaacgacacagcagcaggggccacgtgcgtcacggataagaaccccttcccctcccttgtccaagtgtgcgctcaccattgctccatctgtaagggtgcaccctccatagaagtaacttgccttgctgagaattaaaaagaaaattaaaaaaaaaaaagactaggttaagatgtgaagaaacagaactacttgcgttgttactccatgctttttccatctgctaattatttatttacttcctataaggtctttactatttcttgctcattcaaagagctttgattmtcaggatgcatgagtttgtgctgctttttggarcgttgttctagcagcttgtcaaaagtgaggaagcactcacatttctgtttactcttccagaaggctgcttactacgagtttgttgctggaagaaaaatagtactccatttcctgtagaaaagagagacagccgatgttttcttcggagggcaaataaataagaataaacccagcctctgctccctyatctaggatctaggaactgatactgttattttctttttttctctctttttaagccattctagtggttaacagtggctttggtttgcatttccttaawgacaaatgatgttgaacatcttttcttgtggttaacagtggctttggtttgcatttccttaatgacaaatgatgttgaacatcttttcttgtgattataggccatttgcatatcttcattggagaaatgtctattcaagttctttgcttatttaattaattaatttatttattttgaggcagagtctcattctgtcactcaggctggagtgcagtggtttgatctcggctcaccgcaacctctgcctcttgggttaaagtgattctcatgcctcagcctcccaagtagctgggactacaagtgtgcgccatcacgcctggctaatttttgtatttttagtagagacagggttttgccatattggccaggctggtcttgaattgctggtctcaaactcctggactcgagtgatctgcctgccttggcctcccaaagtgctggtataatgggcgtgaaccaccacgcccagccattctttgcttatttttaaactgaatttgtctttttgttgttgggttgtaacagttctttgtatactctggatattaaacccttatcagatatatgatttacaaatattttctctcgttctataagctgtcttttcacattcttgataatgtccttcgaggcacaaaagttttaaatttcttttttgagaccgagtctcgttctattgccaggctggagtgcagtagtgcgatcttggcactgcaacctctgcctcccaggttcaagcaattcttctgcttcagcctcccaggtagctgggactacaggcacacgccaccacacccagctaatttttgtatttttaatagagaagaggttttgccatgttggccaggatggtctcgatctcttgacatcgtgatctgtccacttcggcctctcaaagtgctgggattacaggtgtgagccaccgtgcccccgtcttttttttttttttttttttttttttttagatgggagttttactctgttgctcaggctggagcgtattggtgcaatctcagctcactgcagcctccacctcccgggttcaagtgattctcctgcctcagcctcccgagtagctgggactacaagcatgcgccaccacacctgcctaatttttgtatttttagtagagatggggtttcaccatgttggccaggctagtcttgaattcctgacctcaggtaatctgcccacctcggcctcccaaagtgctgggattacaggtgtgagccaccatgcctrgccaaaagtttttaatttttatgaagaactatttatctatttaaaaaaaattcctcatgcrtttgttatcaaatctaagaattcattgacatatccagggtcatgaagacttacccttatattttattcagagttttatagttttagctcttctttttagattgttgatccattttgaattaatttttgtatatggagtgaggtaggggtccagcttcattcttttgcatttagttatccagtggtcccrgtaccatttgttgaagagactttctttccccattgaatggtctgtgcacccttgtcaaaaatcagttgactgtagatgttctagtgtatttctgaattctcagttgtattccattggtctatatgtctacacttacacyagtaacwtactgttttgattactgtagctttgcagtaagttttgaaatcagaaaatgggaatgttccaacattgttttcttttttaatattgttttggctatttagggccccttgcagttccatattaattttaggatcaggttttccatttctgcaaaaaggctatggaattttgaaagggaatgcattgaatttgtagtttgccttggggagtactgctgttttaacaataktaagtctcctaatccatgaacatggatgactttccacttatttaggtctttaatttccttcagcagtgtctagtagttttcagtgttcaaatgtttcacctccttggttaaawgtattcctaggtattttatcttttggatactatcattagtctgtttgggctgccataacaaaataccacagactggatggcttaaacaacaaatttattttctcacagttctgtaggctagaagtgagagatcagggtgccagtggttggtttctgatgagggctgtcttcctggcttgtagttggctgccttcttcctgtgccctagagggcaagmtctctggtgtctcctattatgaagacactaattctatcagatcagggccccacccttatgaccccatttaaccttagttacttccttagaggccccatcaacaaatgcagcaacacggggtttagggtttcaacataagaatttgaggggagtgcagacattcagtccawaacagaggttattgtaaatggaattattttcttaatttcctttcagattgttcttccaggttcttaaaactctagacgagctactgttaacaagtttcctacgtatcctcttccccaccccctttctatgtctgtctctgtctctctcatgttctttgcattgtctgcaacatgtttctttctgctggattcattgacaactgttaagtatgtactgagtgtcttattaatgtgcttagcagtgtgcccaacaatttgggatgtcataaagaagtatgacatggttttcacccatgaggattttcaatttagttgaagagacaagacatccgcaaaataattagaaaactgtttaggaacatatgtaatcaaattctcaactgtctggcccatgcactaggataagaactccttaagaatggtcttttatgctgtgcttactgctgtatccctagccccttgaacagtataggaggaacaggacatgagattcataaatgaatgttgaatgaattcaacattctcctgctttggagttttgtcaggtgggggctaaccctcccattcatcctgaaagatgatctttgttctgcaaagtggctcttagacaggacccatccgagaatgctgggactttccaactggctcaggttacgatctaatggtaggatcacagacacagcacgcatctctcagcaagtatcctgctgtctttctaaaataacttcttacataagtagatccttgttaagttccactaagtaaactaactgaggagcatgaaggaagaaggcatggcttagctaaaaggagaaatgtcccagaaacctccatactgacagccaggaagtagtctcagaggctttggattccaggaaagaagctggtattgtttttctactttaaaaatataactttttttctgctgattccaagaacgtggcaaaaaatttttgaaaaataaatcacagtatagagaagaaagtaagttaatttgtaaagcactgtttaccaccattgagataactgctgttcagatttttattaaaatgttatacataagtttacttcaacttaacagaaggataagaaaccaaactttagaaaaatatttcttcaaaatggtatatatttgttttaaacaggtcttctaaaattaaagaattaggagacatattaagaggctggacttattgcagtagttctcaatctatggtgatttcatcccccaggggacattttggaaatgtctagagacatctgtggtagccacaactcagagggggtgcggtacttgtggggagaggccaggaatgctgctaggcacccggcaacgcacaccactgtcggctacaacatagaattatccactccgagtattaacagtgccacagttgagtaatcctgggttgttattgcataatattgtggttttaaaatagtacacgcttttcaagggcctacgtttgtttccagttagaaggacatagttgttttctcagggatccgtggagtaagtggttcagagcatggcctccagccaggtgtttggagtttgaatcctgactctgctacttaatgataaagtgaccttgagcaacttctttgggcctcagtttcctcatcggcaaaattgtggtaatattaaacctaccccaaacagctgtagtgaggrttgaatgagctaatataagtaaaattcttggaacagtgtctggttcatggtcagctctatggaarcacgtgcaattattattgttaatgtcttaaactggaaacaaattaagcctacttttaggacaggtctcctagggaatttttttttttttttttttttttttgagatggagtctcacattgccacccaggctggagtgcagtggcatgatcttggctcactgtaacctcctcctcctcccgggttcaagcgattctcctgcctcagcctcccaagtagctgggattacaggcgcccaccaacatgcccagctaattttttgtatttttagtagagacggcgtttcaccatgttggccaggttggtctcgaactcytgaccttgtgatttgcccacctcagcctcccaaagtgctgggattacaggcgtgagccactgtgcccggccctcctagggaatttaatagaggaaaatagatgtgtatgtaaagtattttttaaaaagcaacctttaaggaaaaaaacaaaactcactcacaggaaaatgatatggctggggcacttataaatctaaggagtatttacaggaattcagaggctcagcaaggattccctgccttctagaactatctggtcaatgtcaggtgacttactgtttcagaaaacatttctttttgtacctttagactttaaaaatttgaataggtaatacattatcatagttcaagactcaaacaatagaacatgatacacactaagcagtctgaccccctccgctgctcccctgaccctcccatagtaatcactttatatttatttatttagagacagagtctcactctgtcatctaggctggagtgcagtgggtacagtcatggctcaatgcagctttgacttcaagcaattctcccacctcagcctccgagtagctggaatcacaggcgcacactgccatgcccagcgaatttttttttttttttgtagaggcagggttttgccatgttgccaaggctgatctcaaactccttagctcaagtgatcctccagccttggcctcccaaagtgctgggattataggggtgagtcaccatgcccggtccagtaatcactttcactagtttcttatgtatccatccagtatttttctatgaaagcaaatacaaatactatatattcttattttagacctcctttcttaggcaaaagatatactttttcacataatctatcttggatatctttctgtattagtacacaaggaatttcttcatccctttttaaggtgacatagtatttcattatgkggatatctcatgctttgtttataaatttgctcgtacttttgtaaatattaacaaatcgtcctccaagtagggatgtgttattttggagtcctaccagcagtatattttccttccaggaaaataggcatattcactgcagtttgcagacgatcagctgttcaaaattagaacacactggcaggtgttcctgggaggtagaaatgggaaacaggtctaaatggatgttaggggtttgtcaagactgtccttccaggaactggcagaatcagccatttgttcaaggtgatgtctgggtatatgggtgatatattggaggcaattatgttggattggtcctaggagaatccagtttttaacaccaaaactaagatccagtaaagttggagtttttctggactatgggttgggtgaygtttccttctgtaatttgaatgatagatttcatctccacaattggtaatgtctcttttatagaaggtctttggcctaatttctatactggaaccgattctgatcctctcaaaatctcttcagtaactgattaggaaagatgaagtgcccaggaaaccactgtgtttcattttctttcagtttgtaggtgtaacttacctaggaaatatagtcttaggatttgtgggttattttaaatttttaccccccaaaacgtgtttcttttccttctcattttcagcaactataagactatcatagcaatgtcaatttcatagaggccgtggatatctatcgtcaagtgctttagaaattctaagataaaatatttgagaattatattacataacatggccagtacttttttttatttctttttttgtcatgttcttagatttcaaagacaaaatcatatggaagctcaggaaactcatgggaaataaataaataaataaatatcataccgcatggcttacttacttatttttggaccctgactttctcatccagcttattgttttttctgttttctcatcagtcttcttttttcttgttgattacataaggcattcatcatttcattgacagcaagctgcagtagatttaaatacaaaaaaaggagctataggctttctatctcacctcactaaagggctcagtttccctcaaatgctggcctccaacatacacctcaacgtacctcagtttgccatatakcccatttttccaaactttcactcctccaaggacctcaatgcctccagttccaccagacacgcattgctctaatattctagctccttgtgtgcccattttttaaatttgctcttcctctggaacaacaggccatcctggtgcctacmtcatacayaatgcccttttttttttttttttttttttgcccagctcatttgctcttgtgtagccatcaracccttcctcacctcatctcctgtcctgggagcacctgcccagcttggcccagttattcagttttgattgaactccacaggtgctttacaaggccaagtacggtccaatgtggatgtcctacttagggcctcagatgcacgtgaacctggccagtgccccgctcttggagcaagtgatgcggcaagagggmaagtacccagtayrgaacgacatggagctatggaaggagcaccgggaccagcacgacctgacctatgrgccrttcaccacgtgagctggggcctgaagggactggaacagggccccagagggccagggcgaaagacagtgggcacagggcaggcaggtggataaccggcagaatagtaccctctgcatcctctgagcctgatggtctagagagcagttgttgggaggtgctgaagcccagggaccattcattggctctccactaataaatattaggttggtgcaaaagtcattgtggttttcaccatttaaaattatggcaaaaaccacacctgtaatcccagcactttgggaggctgaggtgggcggatcacttgagttcaggggttcgagatcagcttggccaacacggtgaaaccccgtctctactaaaaacacaaaaattagccaggtgtggtggtgggcacctgtaatcccagctacttgggaggctgaggcaggaggatcgtttgaacccaggaggtggaggttgcagtgagccgagatcatgccactgcactccagcctgggcaacagagtgagactccatctcaaaaaagaaaaaaaaaaaaactttttaacttgacatctgccactgagggtaagatttaggttgcakgttttcactgggccaggccacctatgacatgacagctcagatttagaatcggagctaaacattatgtagagccctttgtaatctatttacatttttttctctaaagccagtttcctgaatagatgatatcatatgcatgcatttaaaagctcttttgtgaatctttgagtcagatgaytggggaaaaaaagctattctgctaactcatgataagtttggggttctcaaatttttgttttaacatatatatttttaaaatatcattttatgaagcattgtttcctccaagtgattttttaacaaccacrtttaagttctgtatatccgattcctactgttgagagagttttacttttggaacaacgtgaagtcccaacaaataggtctattctggttttcatttctttttcagcaacactttcagtttatctttttgcaattttcccttaacataataaaggcagctcctggggtggggtgttgaaggtcattaaakaaaaaatatatattaaaaaaaatttgactgggtgcggtggctcacgcctgtaatcccagcactttgggaggccaaggtgggyggatcatgaggtcaggagatcaagaccatcctggctaacacggtgaaaccccgactctactaaaaaaaaatacaaaaaattagctgggtgtggtggcatgcacctgtagtcccagctactcaggaggctgaggcaggagaatcgcttgaacctgggaggtggaggttgcagtgagctgagtgggtgacagagcgagactctgtctcaaacaaaacaaaacaaaacaaacaaaaatacaactttattggttttaaaaattcaaaagtaatactcaccgtggaaattccaataataaaatatgaagtctcttgcccttccacccctattgcatcctccttagcaaccagtactgacagtttgttgtgtattctcccctctttatccaggagcatgcaaatatacatgtggataggtaggattttgtctcctcttaaaattggaccatattgtacttattgctctacagctagccttttaaaaaaatggactcatacccagcttgcttaggaaaggaaataggtttgaggaacagctgggagtgggggcagtccctggacattaatcttgcttatggaaagtatgtttccacccacgtkagcacccttgcctaaccaaggaggaggcctgaccacctaccttgcctaaccagggagggggcctgaccatctaccgcatgactgaggcaagagcctacagcatcagcctcgtgggcctccctgtccctctgacccactgagccaagcagagcatgaaggcttagagcctgagcactccgggaaccctaacttggtcctcctttattcctcagcctctgcagctcccccttatttgacatatggaagattccagagctgtataattccaagataatcagtcaatattcactaagcattcattatgtaccaggcactgagctaagcacttgaatgatgtgaacgagcctactcagataggcactcttattatccccattttatagaaagggaaactgaggcacacaggagttacccacctagggtccctctgccaggagtggtcagacctgtgatttgaccctagacagtctggttctagatgcccgccatacccacttccactctgctatagcgagattctggtttggggattctaagattctgtcacttgagattttggtgaktctataattctaaattctaggagtatgggatttcccttgactctggatggagggggtggtggacttcagggtgagaagatctcccttaattgaacccccatagaggcttatctttgtgctgttcctctgcgtccctgcagggaaggacaccactggtaccagctgcgccaggctctgaaccagyggttgctgaagccagyggaagcagcgctctatacggatgctttcaatgaggtgattgatgactttatgactcgactggaccagctgcgggcakagagtgcttcggggaaccaggtgtcggacatggctcaactcttctactactttgccttggaaggtacccttgctgggagaggggctggggaagggaatgggtcagggagaggttgtgctccctctcctcaagggctcctggattccatatgtcctggttctgcctcctgtgatggcctctgtgcactactcagctatttgctacatcctgttcgagaaacgcattggctgcctgcagygatccatccccgaggacaccgtgaccttcgtcagatccatcgggttaatgttcyagaactcactctatgccaccttcctccccargtrgactcgccccgtgctgcctttctggaagcgatacctggatggttggaatgccatcttttcctttggtgaggactcccagatggggcccagggaagagagatgggggtgactccaggtctgtgcatcagcggtctctcccaggccttttccctcatgctaccagttgtcggagtggctcttggtccttggagatcatgacttttggctttgtcctttcctcttctctgttgctttcacagggaagwagctgattgatgagaagctcgaagatatggargcccarctgcaggcagcagggccagatggcatccaggtgtctggctacctgcacttcttactggccagtggacagctcagtcctcgggaggccatgggcagcctgcctgagctgctcatggctggagtggacayggtgcgtgaagggggagggtgagaccaggggcccccagctcccaacctgaaccagttccctattatccctcacctgatcccgaccttcatccctccaaggacctgcttctttttctgtaacatggatacagccctagaaggaaaatagagggcttgctcagcttagccgaggtgggaggacaggggatggtccttttgtaagaaggatgccatcacctcctggagcctcctcactctctctgacagctgggaagtacatctcccatctatccaactctcttgctgcaatttgaatggagagttggaagagctcattcacaagcactttctttcttttttgttttttttaagatggagtctcactctgttgcccaggcttgagtgcagtggcttgatctcagctgactgcaacctctgcctcctgggtgcaagcaattctcctgcctcagcctcccaggtagctgggattacagttgtgcaccaccatgcccagctttttttttctttaaattttagtagagacgggggtttcaccatgttggtcaggctagtctcgaactcctgacctcaaatgatctgcctgcctcggcctctcaaagtacygggattataggcatgagccattgtgtccagccagcaccttctttctttatggttcctatttccagtgctttcatcctgttgggtttctctgtgttgccgtcccctcctccactgaaggtgcgattcttcatcatatcggccctcatcccactgtggattcatgtttagcatggagactgccatgaacctgcatgttttttcctgctaggctagtggcaaattcatttctcccacattttgcatacacccactcatacaccctcccattactggcctctttcctagaaatcgccctcacctgatctcccactctatcttctagacatccaacacgctgacatgggccctgtaccacctctcaaaggrccctgagatccaggaggccttgcacgaggaagtggtgggtgtggtgccagccgggcaagtgccccagcacaaggactttgcccacatgcygttgctcaaagctgtgcttaaggagactctgyrgtaggacagaatgctgttctggggggcacaggatctctttgtggggagggaatcmgaggaggaaatctgaagtgaagacaggtgggctggggctagtgacaaggatgagatgggagaggtaggggagaaggagtggggcactttgtacccccatgaatccagagcagactccagacattcttttccctgcagtctctaccctgtggtccscacaaactcccggatcatagaaaaggaaattgaagttgatggcttcctcttccccaagaacgtgagtggggctagagagcccgattgcccaggagtgccctatgcccccgaagagaggcattcatgctgcccaatcttcctttatagacccagtttgtgttctgccactatgtggtgtcccgggaccccactgccttctctgagcctgaaagcttccagccccaccgctggctgagaaacagccagcctgctacccccaggatccagcacccatttggctctgtgccctttggctatggggtcyrggcctgcctgggcygcaggattgcagagctggagatgcagctactcctcgcaagggtgagmtgggagaggctagtagggtgtgtgggcagggaggggtggaggagtcctgggaggagaggaagggargcacagggtaggagtgtgcagagcggggagtggatggcaaacacacaatccacccaaccacatgtgctctttaccccccagctgatccagaagtacaaggtggtcctggccccggagacgggggagttgaagagtgtggcccgcattgtcctggttcccaataagaaagtgggcctgcagttcctgcagagacagtgctgagctgagtctccgccttgctggggcttgtcctagaggctccagctctggcacagtggttcctggctgctgccatgtctcagatgaggagggagagaaggaggccgccagactcgagaggtgggaggaactccttgcacacaccctgagcttttgccacttctatcatttttgagcaactccctctcagctaaaaggccacccctttatcgcattgctgtccttgggtagaatataaaataaagggacttttatttcttattggagacctttgtcattctttttgactacccagcatctgagggaattcctctcctccagtgagtcacggtgagaggcacagccgcccctgtccttggaaactgagaacaccttttgctttcccagacctcacagagaggccttggtttcacgaggcactggttgaggccacaccaagcaggaactgcagtgactcccaagcactgtgtcagtcaagctgcggttgtagagaatataaaccaccctctttgaacagaaaaagcagatacaggcaatggggtgctacaaaaattattggaggtgctcgagaccaggctagagttgacctccagcaggcactgagcagcttggggagcaccatgttggccacaatcaggaggatgagagtctagaagctattgctacaactattggctctagagctactccatgtcaatgaagttcaagtaggtctgtgccggcaaaacaaaacaaaacaggtcacgcaggatgacccccatcctgtctctcaatacccatgaagccagcagtaactggacttggacctctgcaaatgcctcgcgactgctcctgacagcagaaagggcaggagcttctacctctcttccacctttcacatctctcacatacagctgagaggaggaacctaagtcctgcctggagcactagctgtaagggagcctagggattatagcttttaactgtccagcctccttgcaacaagaagcccacttgaaggaaagtgggttgccattgagagccgccagtgcatcacagcactagcctggaaattcagagtccaagccccagcagtaaattttggtggagtcatagaaaaaaatgaagttcactttcttttttaaaaattaatttgattttttgagacagcgtttcattctgtcacccagactggagtgcagtggcaccatcttggctcactgcctccttaacccaggctcaagcgattctcccactttagcctcccgagtagctggaactacaggcacgcaccacctcgcctggctaatttttgtattttttttgtagagatggggttttgccatgttggccaggctggtctcgaactccggagctcaagggatctgcctgccttggtctcctgaagtgctgggattacaggcgtgagccactgcgacaacctaaagttcactttctcaggcctgtgggaatgatagggtttgaactcatttaaaaaattgtgtcattgcccggattaaaatactccacaactgccctcagccctcaggtcaagttcaaagttgttactgtggctcataagacctaccgtgccctggcaccctgcaccctgaccgtggtcaccctttcacagctgagcctgaattctttgcatgtctctgaacacattatgttctttccagcctcaatactttgtacctcctgtccccactcttggaacaccctcttccctaactgtcatgtcatcacagagagcttgctctttcttaggattcagctcaaatgtcactgcctctgcagggccctccctgacctctctgagcaatcctgtgccccaccttcccctcctctgcttacagagctgagctgtcrgcatgctcaccttgttagagatccagctctctccccaaccaactgtgaatcccctgaaggccacaagtcaggcttctttaatgttggatcccagtgtctaactgtgtctagcacctaggaggtgcttagtaaatgtttcctgaaaaagagatcagaataaggggaagggaagagaagggaaggggagaggaggacacagagttttctacattgagaaggggaacccagcttgtaatcccagcactttgggaggccaaggcgagcagaccacttgagatcagcctggccaacatggtgaaaccctgtatctactaaaaaaaaaaaaatacaaaaattagctgggtgtggtggcatgcacttgtaatctcagctactagggaggctgaggcaggagaatcgcttgaacccaggaggcagaggttgcagtgagctgaaactgcgcaactgcactccaacctgggtgacagagcaagactccatctcaaaaagaaaataaaggaaaaaaagaaggagaatctagagggaattgggaggaattactggttatacagatatggctctcaacccctcctgtgtagtagatctacctgtgagagctccttgcaaatgctggggctgggctccaaggctgccaggatctgtgtcataaagtcaaccagagtggaattctgctttccccagtgtgctgctccttcaaaccagcagggctgagctgccaaaataacatgggtcccttagttactttggaggtgcttaggtgaggggaagtctgtgatgagacttggattggggttttgtagcagttgtgcaagatgatgtcagtgttcatggtcttgcagctcagttaatgaactgatctcacatggaagtccaggaagactttgtatatccacacaatgaaatattattcacccataagaaaggaatgaagtgctgcttcatgctacactatggatgaaccttgaaaatcttaggcagatggaaagaagccaacaaaaagtccacatattgtgtgattccatgcatacaaaatgtccagaataggcaaatctatagagacagaaagtagattattggttgccaagggtggaggtacgggagaatggggagtgactgttaatgggtttgttttgggggtgatgagatgttctggaattagatagtggtcatcactaactttgcttaacttttttaatatactaaatatcaccgaattgtatattttggtttttgtttgtttgtttttttgaggtggcgcctcaattggtcgcccagggtggagcgcagtggtgcaatctcggctcactgcaacctccacctcctgggttcaagtaaaatctcccacatcagtctcctgagtagctgagattacaggtatgtgccactgctgctggttaatttttttatttttagtagagacgaagtttcaccatgctggccaaactggtcttgaacacctgacctcaagtgatccaccagccttggcctcccaaagtgcgggattacaggtatgagtcaccacactggcctgaattgtatattttggaagggtgaattgtatggcatattagttatatctcaagtgaaagaaatctgtgaagatcagtttgataagattattgtagaaatagatgtcaatgtaatcaatacttgcagaagattcttgggggtcaccaatgtcctagaggcaccacaggaatttctaaggcaacactgctctgtcatgtatctacagggcctaaaatccaacctcaaattggaaactggaaatgcagaggagaaaggagctaagctgatgggcgaagtcacgaagtccttgtgaggctgtttccttaccctttgatgaggtgtagtcacagcttcagaggctccccgcaaagtttttgtcatcagtgatggaacacaagatgtaagagctgaagagttatgaacacaaatgtgaaaccttgcctactggagctgccactagaaagcccgccaacatggcattgggacgaatataatcaaagtctcccacccctaaacagagaaaaacaaaatatagcatatggccaaagtgatttatctttatactttttttaatctttaaaagatatttattgccctataatatacctacagaaaaatgcactgaccctcagtgtacatgagattctttcataaatttcatgtgtacatgcgtacttcaagtgtacgtgaaatgacctctgtttatattccatcacaatgcctggacaagacttacttaatataagtgaaaaaatcactttctttgacagtgattcattcagatacgtatgtagtatctctacgatgaatgtggtcatagtctcagttcctttcccagcagttttttctctggagggagaaacacatcagccctggtttgagggttggcacagaattcatcagtggccagtgatggggcacagttccaggccccgagactctcaggagctcagggcccccaagcatcaccatgaacagatgccacagtgaggctccccgagagccaaccccaaccttcctctataaagaaagaacaacagcggattaaggattgttggttccgcacagcagatagacatttggctgaaaaggccatgcacatcgtgttactcctaccccagctaatttgaaattgttggccaaattcagatccatattttccggtaagactttaagaaaacaacttgtcttcttaaacaaggcggcactcttttttttttttttgagacagagtctcacagtttcgcccaggctggagtgcagtggcacgatctcggctcactgcaacctccgcctcctgggttcataccattctcctgcctcagcctcccgagtagctgggactacaggcctccgccaccatgcctggctaattgtttctatttttagtagagacagggtttcaccgtgttagccaggatggtctcgatctcctgacctcgtgatctgcccacctcgccctcccaaagtgctgggattacaggagcgagccactgcacctggtcttttttttttttttagatggagtttcactcttgtcgcccaggctggagtgcaatggcgcgatctcggctcactgcaacctccgactcctaggttcaagcaatgctcctgcctcagcctcccgagtagttgggattgtaggcgcccgctacaacacccggctaattttttgtatttttagtggagacggggtttcaccatgctgcccaggctgagcctcgaactcctgacctcaggtgatccacccgcctcggcctcccaaagtgctgggattacaggcatgagccaccacgcctggccaaggcggcactcttgtaaataaaaatagacagggtacccagtgttgcctggctatctacatgcccaggttctataaaagttttagctctgagtgcattttggcttggtaataggagtttgtttccaggtcattatttatgactccagttttaatatgcatatcaaataaaaacttgggcaattgtcatgaaaggaacatgcaggatattttaatgaacacttctgcatttaaggaggtctgggagaagggtggtgagaatggtaatgagtcatacatctatgttgcgccactacccttagccattgcttttcggagaccctaggcctaattaaataatagctagactccatcatatgacaaatgattgactagctatgagcatggggcatcctcatttctcagcccagtctcatgttcatcatgtgctattagtcataagtctctagcatttatagaaaataaacacagttgctcagttcccacccccaaatgaggaaattagtatggaatggagccctggaatctgcattttgtaaggcttctttggtgatcctgatgcacatccatggtggagagctctgaaggggttgtgagaagagagacgggaaagcgaaggaagctacagaaacccagagaggcccgcagaggtctgaggaggggctgggggcacggaggcagcagtgcctggaaaaccagtcccgccccaagttcacatgcaggaacagagtgggcggcacagcgggctgcacacagggcacgtcttcgattcagagctggagtggaagaagcagccgccgcagccccggtggaaactccgtgactcttttctagcagccatcatggctgcaagggccgggctgtgaccaaaggaggggtctgaggcagggagggtggcatgtgcccttacagagaaggtcccacagagcagagccacccagaggcacagcctcaaaggactgacctgttacaagatcccagagccctaggctccccaggaacactgtcactggagagatcctctctgggcccagacccaaccatcacccaactccaatcctctcccttgagcccaagaccctggaccttccctgggcgggaccac

SEQ ID NO: 93257 - DNA, 20857 bp, Homo sapiens
gaggtcatctctaactatacatggtctcgagtgtggtgctgctatggcatcctcagtatttgccctgactgctgatgtatcttacgctttatggagccaggtgatagagtccctcaggcccctcccctacctaaactgttctttctcgttcttgcctttcagtctgaccagtgcacaggacttcagggcttcctggtgttccacagctttggtgggggcactggctctggcttcacctcactcctgatggagcggctctctgttgactatggcaagaaatccaagctggaattctccatctacccagccccccaggtgtctacagccgtggtcgagccctacaactctatcctgaccacccacaccaccctggagcactcagactgtgccttcatggtggacaacgaagcaatctatgacatctgccgccgcaacctagacatcgagcgcccaacctacaccaacctcaatcgcctcattagccaaattgtctcctccatcacagcttctctgcgctttgacggggccctcaatgtggacctgacagagttccagaccaacctggtgccctaccctcgcatccacttccccctggccacctatgcaccagtcatctctgcagaaaaggcataccacgagcagctgtcggtggcagagatcaccaatgcctgctttgagcctgccaaccagatggtaaagtgtgatccccggcacggcaagtacatggcctgctgcctgctgtaccgtggagatgtggtgcccaaggatgtcaacgctgccattgccgccatcaagaccaagcgcagcattcagtttgtggactggtgccccacaggcttcaaggttggtatcaactaccagcctcccactgtggtgcctgggggtgacctggccaaggtgcagcgtgccgtgtgcatgctgagcaacacgaccgccatcgccgaggcctgggcccgcctggaccacaagttcgacctgatgtatgccaagagggcgtttgtgcactggtatgtgggtgagggcatggaggagggtgagttctccgaggcccgtgaggatatggctgccctggagaaggattatgaggaggtgggcatcgactcctatgaggacgaggatgagggagaagaataaagcagctgcctggagcctattcactatgtttattgcaaaatcctttcgaaataaacagtttccttgcacggtttcttgttccctctgagtgcttgagcttctgctgccttccccttcatgctgctgctgctctgtttgctgttcatgacccttatcccttccatcgctgaaggtgagacctgcaaaggggttcttgccaggcccaggaagcataaccccagggactttaaattgaagtcctagggttactcagtatagggaggaaatgaggaccaaaatccaggcacaaactgttgaaggatgagtcttcagctcctttccaagtaggagtataatccagtggtttctgtctttgaaagttagactgctaccctgttcttcctgctgcctctacatttaccaactctggaagcaaggcttggcccaggctcctctgtgcattatgagggtttgggagtggggctgggctggcccagagttcctgggcatggagccacgtcataagcttgggggatgggagggaacacaggcgatctcctagagttgtttgtgccactgcacctctgagcagctttgcatagcttcctgtcttgctgctttgctggagctggggctgtgccattaaaagtcaggtcatctcccctctgtttgtgatttctttctggcctcagcctctgtgctagctagtgggagactcctgctagggccctggggaaagcttcaactttgctaacaggagccccaggccccatgctgatgtcatactgtggggtagacatggttcgggggaggaggcttggatcacaaaagagcaggagatgccaaccctgcccttgcctttcctccctggtgattcagggaacagagcccttccctagggaacaggtttgaagcccagctaagacagggcccctgtttactcagcagagtaggcaggaagtggcagctggatactgccacaccacactgcctcattaatcattaaccatgtatgagcttgaacgatcagggagacacaggccaaaacagctgccgctgccacctccactcccctcgcccctaggctgaggatgggagacctgtaatctacctgtctcaaagcttcctcaggtgtctccacccagaggcccttgcctagcaaaccggctaggcagctttgactaagctactcaccccaggagtgaaggaaggaaagaactagttgagtgtttttagggggccctagttcttgacacaggcagatgccagcttgagcccaagcagctttaagttttgatctaagacaagctagaactgtccactgctaaccaacctcctgtagaatgaagtcacaccattgccgactctgcaccattcctccttcccaggcagttcgcctgaaatggcaacctgactttgggccccttgcacctcttctctcactccaggaacactgagactaagatctacaccaacctgcttccactttattcttgtttacacattctcctgctcccagatttggagtcagaacactatgtgagctcaacagtcctgctcagagccatgttccatatcccaccagtttcccttttcccaacccccacccacccccactcagtaagtccccttgcccaggttttgctcttggagggaagaaagcagaagaaaagatgcaggactgagatgattgtcctgaccccgctacccccaagtgtaagagaagtcctggatggaatgggtggtgattccaatgagggatgggaacctctttccaaggcacaaggggccatcttctcaacatgctgctttttcagatttgggtagtatgttggccaggagctgggggctgcagcgcctccagctgactgaggaggagaggaatgtgaggacgctgatgcgggtccacggtcatcatcgagttcaggagctgccgcaatgctgaagaatgcctgtggagggaggagcccagggtgaccggatgacacctatctgtcaactcagctaataccaggggggagtctgaaacacttgatgccctattcgttgctcactcacctggggctttgtgggatgctgagttggttctgcacagcaagggccacactgtcacccttttggaacaccatgtcataagggccttccccaaacatcatggcatatagcacgcagcctagggactgagcataacttgattagtccctagaaggggaccagtggaggtgacatctctccctttacttctgtggtaaaaggagactccataagctaaaaagaatacgctgacctcagccacatggcaccaccagggtccagagaaactgccagtcagctggaggcctccgcagcccctgtttagcttagcccctgcttagccagtgccttcactactgacactgagctgtactcaccttgttcaggggcacagattataccacatccggtacaactgggtacagtatcagtgacatttcccaggaaggaagttgaagtggatggggacatattgtggttcctggcgccccatgcaacagaaaccaacaacctactctactccacggtgggtacagagccacagccctccctacccagatacccacccacatgctcctcacccagacatcagtccgctcatcgatgacacagtgactctgcacagagaagagctctggggctcggtaggagatggtgcaccgctgggctgcccagtcctggaacagtgatcccagagctcaaaagtggggcacaggtcatggtcatgtgaccaaactgggacatgcaccagaaggggtgggaatggggaacaggtgagaaaaggaacctggagactcttttacctgcagggtcagagcctggcgggagccctccacatggatgcatgcttgattcatggaacccaagtccattaaaactggctgcccctcatctccaagcaatatattggtgggcttcaagtctctgtagagaagtagaagtgacctatgagcatctctggacaggaaggctggaatcccagcaagcaaaagaatcatacaggctgtttcttgggagaacagagacctcccatgtctcctggtgaggctcttcctctgggccccagcaagcacacagggtcctcccactgacctgtgggcataacccttggcatgaatggcctcaaggcctctgcagatccccagcagcagccaaaggatttgatcctcggtcaggaagttgcctttgtccttcagcctttctatctcattccacagcgtacctctctgcaacacaagtttccctacagttggagatgtttttggagcctctgctccttaggcctgatcccttccctatgtcaaagcctatcagccctttcatgatacacacctcaaactcaaaatctaaagtggccaaacccaggacatggtccctgcttcctaacatgctggactgctcacacagcccttgagtaggtggctctgctgcaaccccctccataaccaggagtctttctgaccttgaagaatggtagcagcagccaggcctcatgcttagcaccccgttccctcagacagtaagccacgaggcgaaggatgttggggtgattgaagaggcgatgcatgtcggcttctcgctgggcctcctcccggtcctgctgctcgtgacacaggattcgcttcagggcgtagaagtgtccatcatgtaacccttccactaggtccacatagctgaacccactgtgggccaaaggggtcaataaagggccatggtcatctcccacatggcttggacctagagaaatttcctggtggggagtggggtgtccttcccatttagcagaaaccttcccaagatgtggctctaagagaaatctgaagaatattacaccgtgagctcctcaggagcagagatatagaaatctttgaggtcctatggtcgtaatagagacctctgcacttgacagatgctaaataaataatagccaacacttatcaagtacttgtcaaccccgcattgggtgagacattttatacacattatctcatttaatcctcacaactccatcagtgagggataataatcatctccattaagctgatgaaaaaaacatggtttatcaaggtcacacgaggtggatttagcaggcctggctccagaatccaccttcttgatactgtgtagctaggttctgtcaggtgagagaggacagggatagggataaaacccttgtgccccaagcatatgcacaccgctgtccttcaatgatcataaacttgaggactagttaactgacttccaaacactcacccctcccccagtttctggatgaagaggtagcgcttattgtcaatgatgacagttccccgagagcagacacacagcgcgtggcccataatgtctcagtcatcctcttcaaggacggtctgaggctaccgaagagctcgtccagggtgagtgggctcttccaggagatgcgctgggggcccagcggatcatgctggaaagaaaacaacggcagggtcacaggtccggcacaatccagacgacccatgaagtaccaatgcggagagctcaggcccaggtctctggaacctacactatagtgtagagaaaacaggccctgctccgtcgccagcttcaggggtggggtcaggcgccttacggcctcaggacacacagcggctaccgggccacttcctccaaccccagcccatctttgggcagcccccgctcccacgcccatcgcgccgcaaaagcagagcatagcgtagtttcagaggacgtgcgaggctcaggcccactcctggcagggcccaccccggtctaggagcccagagcccgggatgggccatctgcactgccggactgacctggctcgggccagagagaagcgccaccgaccggaagcagtgctgacatcatcagtccgcgccggcgtaacggcccgcggtatctcagcaaccgctgggcatccggaggatgtggggacgcggagctgagaggctccgggctagctaggtgtaggggtggacgggtcccaggaccctggtgagggttctctacttggccttcggtgggggtcaagacgcaggcacctacgccaaaggggagcaaagccgggctcggcccgaggcccccaggacctccatctcccaatgttggaggtaggaggcttcatacctctggcgctctggggcagaaagcggccaactacactgcagcctggagggggatccagtgaggggcgggtctggtggcctggtctcctgatcccgtacaaccttctgggctctggcctgtatcccactacccctagtctcagtggttaagagctcaggcttgtgaaccagacttccagtttctaaattgagtgttaatagcatgctagctgtgtaacctcgggcaagttacttaacctctcggatccttacttttggtagctgtaaaataggtataatagtacataaggttaagtagcttaactgtgaggccagactgactagttcaaatgacagctccgttaacgtagttgtgtgaccttggacaggctacttaatgtttctgtcctttcctctcctcctctgtaaaatggaaataattatctacctcatggagttgaagattaaatgagatgtacagtgtttaatacaatatctgacacatagccttcagtacgtgtcaataaaccgtaattattattaccctgatcttcacatcccattcttgagactgtaaaggcaaaaggaacggaaattcacagattttcgagctttggcacaaagcagttgtccttaatatctgttgcggaggcaggcaggggtaagctggagaggggtgcacttccaaagaaggtggaatggccaggagggaatggctgttttgctgaaacaggactctccaggaaagaggtccttcttgtgacctggttcctcccttccacaccccggatcaccctgaagattttccaatggtttcccctggttctgaacctgttttagccttttggttatgacattgattcatccagatttaacctactatatacccggccctgtgctagaggctgaggatttgagatgaacagggcactccctgtcctcagggagcccagtcaagtaaagccatgcttctcaattttgaaggtgcctaggatcacctgggaatcttgttaaaatacaaattctgattctataggtctgaggtaggatctgagattttacatttcttttgtttgtttgtttgtgttttttgagacagagtctcgctctgttgcccaggctggagtgcagtggcaggatctcggttcactgcaacctccgccttccgggttcaagcaattctcctgcctcagcccctacccccacccccacccccacccccacccccaccctcggagtagcttggaatacaggcgcgtgccaccaggcccggctaatttttgtatttttagtagagacagggttttgccctgttggccaagctggtcttgaactcctgacctcaagtgatccacccgcctcggcctcccaaagtgttgggattacaggcgtgagccatcgtgcccagccagattctccatttctaacaagttcccaggtgacgtcgatgaagctggttcgtgaactgcactttaacatgatgtagaaattttacaaactagtagagtaagggggtggctgcaggctggagagraagtccaggctaaacgcctggcaacttgaggtggtttccgcccccttgctcgctgaggttccctcccaggaatccgacacgtgacggtctgtccgccgtctcagactagaggagcgctgtaarcgccatggctcccaagaagctgtcctgccttcgttccctgctgctgccgctcagcctgacgctactgctgccccaggtaagaygagacggtgaaccagcctgccgggtgcggtgagcgggatcagatccagcggatgagagaaagtccaaagtaacaaccaaacaacccgcagggctagttccatctcttccgctcttggcaggcgctgaccctcgacgctccctccaggcgtctgctgagcagcgtctctttctctttataggcagacactcggtcgttcgtagtggataggggtcatgaccggtttctcctagacggggccccgttccgctatgtgtctggcagcctgcactactttcgggtaccgcgggtgctttgggccgaccggcttttgaagatgcgatggagcggcctcaacgccatacagttgtaagaagtgctcgcaagagccgcggagggatgggatctactttttctaccgcccccttataaagaaggtcgggacaggaagactgccaggactcctaggccaagggtgggaaagggcaggccaggacctccttccaaccgcttcctggagattccctgcaaggcctgagcygttaggcctccctggcgtctcttcaccttggkycctattaacctcttcctttctcagttatgtgccctggaactaccacgagccacagcctggggtctataactttaatggcagccgggacctcattgcctttctgaatgaggcagctctagcgaacctgttggtcatactgagaccaggaccttacatctgtgcagagtgggagatggtgagttagctggagaagggatagaaccagttatccttgtgcagttcctagactwctcccatctgcccacactctagggccatctccagcactatattcaattccttcccttccttccttcccttcctagcttccccaccacaccccaaaacaaaacctacatgcttctttgttctctttatgtttgtctcaggggggtctcccatcctggttgcttcgaaaacctgaaattcatctaagaacctcagatccaggtgagttgagacaaaggatttaacacagaagcaagtaagtaaaatgggctatttgggtgccaaaagcagaagagaccattcccaaattggaggtcatcattcatttaccaagtgtttccttcatgcccagcaggatgctagaaactgggggaccagacagacccccatccttgtgccgtaaagcttataatatagtggaagaaactgattaaaaaaaaaaaaacagctgggcgcggtggctcatgcctgtgatcccagcactttcagaggcccaggcgggtgcatgacctgaggtcaggagtttgagacccacctggccaacatggcaaaatcccatctctactaaaaatacaaaaaattggctgggcgaggtggtgggcacctgtaatcccagctacttgggaggctgatgcaggagaatcacttgggcccgggggtcagaggttgcagtgagccgagattgaacaactacactccagcctgggtgacagattgaagagactttgtctcaaaaaagagaaaatcctatcagctgtatcttgacaaacattaaatttaagtgctttttatcacccccattgcccccaccctggtccaaaccatctctctcagctggcttattttatagcttcctaactggtttcccttgtttgccctctcccccatacaatctgttctcagtagagtagccagtgtgatcctgttcaagtataagtttaaagatacatctcagatcttgtcatttctctgcttaaacctctctagtaggttctcatctcattcagaatatgaaccataaattccttaaagtggtaggtcctacacaattggccccagtcacctcctcgacattattgctcttctcccccatgttcactctgctccagccacagtggcctcattgctgttcttcagacccaccaggccttgggctttgaggcctttgcatgtggtgctccttcatcacaagcctcctgcagaagtcaccttggtgaggccttcctggtctctctctcgctctctctatacatacatatatatgtatgtatatatatatatatatatatatacacacacacacacacacacacacacacacatatatatatattatttttattttgttttatttttgagatggagtctcgctctatcacccaggctggagtgcagtggcgcaatctcggctcactgcaagctccacctcccaggttcacgccattctcctgcctcagcctcctgagtagctgggactacaggtgcccaccaacacacccggctattttttgtatttttagtagagatggggtttcactgtgttagccaggatggtctcgatctcctgacctcgtgatctgccagccttggcctcccaaagtgctgggattacaggtgtgagccgccgcacccggcataattgttatttttttttgagacggagtcttgctctgttgcccaggctggagtgcagtcacgtgaccttggctcactgcaacctccgattgggttcaagtgattctcctgcctcagcctcccgagtaattgggattgcaggcacctaccaccttgcccggctaattttttgtatttttagtagagacaggtttttgccatgttggccatgagggtctcaaactcctgacctcaggtcatccacccctgccttggcctcagaaagtgctgggattacaggcgtgagccaccacacccggccatcccctctatattttagtctccccatataccaccatttttgtttgtttgttttgagatggagttttgctcttgttgcccaggctggagtgcagtggtgcagtctcggctcactgcaacctctgcctcccgggttcaagcgattctcctgtctcagcctcctgagtagctgggattacaggcaccygccaccatgcccagctaatttttttgtatttttagtagagacagtgtttcaccatgttggccaggatggtctcaatctcttgacctcgtgatctgcctgcctccgcctcccaaagtgctgggattacaggcgtgagccgccacgcccggcccatttgtttttaagaaacactattttaaggtttcctatgttcaaatttcattggcgtgcaaatatacaaggtgcttagggttgggaatttcttgacaagagtcattgcttcccatatttagtggtgagcaagtgtgatggtagcacctaacacagaagctctgctccttcctttagacttccttgccgcagtggactcctggttcaaggtcttgctgcccaagatatatccatggctttatcacaatgggggcaacatcattagcattcaggtacaagggggaagtgactggagcaggggaagaaggtacaaggggtccttgacctccatcccatagctgggttccactttccctcccctctggcaggtggagaatgaatatggtagctacagagcctgtgacttcagctacatgaggcacttggctgggctcttccgtgcactgctaggagaaaagatcttgctcttcaccacagatgggcctgaaggactcaagtgtggctccctccggggactctataccactgtagattttggcccaggtctcaagcaagggctgggagtggagtctggggaaaggacaccwcttccacgacatttatctttttcttttgcctcctttccgcagctgacaacatgaccaaaatctttaccctgcttcggaagtatgaaccccatgggccattggtgaggggccagagaggagtcagggaatcagggataggaatgggtccagctcagttccatctcactcacactcctttcatttcacactctaggtaaactctgagtactacacaggctggctggattactggggccagaatcactccacacggtctgtgtcagctgtaaccaaaggactagagaacatgctcaagttgggagccagtgtgaacatgtaagtaaagacactgggggcaatatgaatctgtagctgggagctggggatgaaagttaagattcagtgagtcagcttttacctgttcccccaccctctctcacttcaggtacatgttccatggaggtaccaactttggatattggaatggtgagtccagatggtccctgggatagaagcagggaggtaacaaggaattagaatctaagggccaggtggattaggatgtctagaagctgaatatggccacctctgccccctctgatggcaaaattctctgcatgaagcatgcttagtagtgcctgtcatctgaaatacatgttgaattaattaaattggctcaacttcaggtgccgataagaagggacgcttccttccgattactaccagctatgactatgatgcacctatatctgaagcaggggaccccacacctaagctttttgctcttcgagatgtcatcagcaaggtaccctaccatttcattaagctccaaaggcttttattaatttggaggaagggagtgcccacattgtaaaggtatcccataaattggtggttattgtctgggccacagagccttctgagcatcccactgaggcatttcccattcaaccaaatgggactatgtgtgaagacacacaggtgtgcaaaattattgagcctccatgatccctgaagcccttccctgggccccaggttaggaactctgccctagagtcttggaataggtattgttttctgtggttttcctatggatcctgagagaatctgggctcagttccaggaagttcctttgggacctttacctcccccgagccccaagatgatgcttggacctgtgactctgcacctggtaagttcctccacatcttttctcttataccacaccttttttttctaaatagcctattctttcttgtcctctatccagaaacttccctgatattctaattcttctcccttattctaataggttgggcatttactggctttcctagacttgctttgcccccgtgggcccattcattcaatcttgccaatgacctttgaggctgtcaagcaggtaaggcataaacccacatctggtggagatgacaacctcccttaacagctatacgcaaaagttccttggctatagtcacagtgtcctcttttatttctgtttgtctgaagtactcattcttccatacccaggaccatggcttcatgttgtaccgaacctatatgacccataccatttttgagccaacaccattctgggtgccaaataatggagtccatgaccgtgcctatgtgatggtggatggggtgagaacctaattccagrctgtgagccccaaactcctcccttccccaggaagcgttagccttaagttccccatatttacactttcccacctgcctgttcacgtttgcagagggttccagggataagctgggatgaggaagagtttgattaaggatagaattctagaatagatgggtgatagatggctacattctctctgccctccaaataagtatcctaatgtgtggtttcctatgcagtggctaagagctagatgctgagccttgctcctatcctatctcctatccacaggtgttccagggtgttgtggagcgaaatatgagagacaaactatttttgacggggaaactggggtccaaactggatatcttggtggagaacatggggaggctcagctttgggtctaacagcagtgacttcaaggtgagctagctttgcctagttatatcccagggcttgattaaggataacttagcttcaaagcttagtgaatgatgacttttcattttccttccctatagggcctgttgaagccaccaattctggggcaaacaatccttacccagtggatgatgttccctctgaaaattgataaccttgtgaagtggtggtttcccctccagttgccaaaatggccatatcctcaagctccttctggccccacattctactccaaaacatttccaattttaggctcagttggggacacatttctatatctacctggatggaccaaggtattggtaatggtggtggtttgggtagcggggaggtaaaagagaaaaatcacagaaggaggggagcagaaagtatcctctgattagaaacccaaaagggtatgattctacccctggagagctgaccctttcttttcccctctttcctgctccctattccccagggccaagtctggatcaatgggtttaacttgggccggtactggacaaagcaggggccacaacagaccctctacgtgccaagattcctgctgtttccyaggggagccctcaacaaaattacattgctggaactagaagatgtacctctccagccccaagtccaatttttggataagcctatcctcaatagcactagtactttgcacaggacacatatcaattccctttcagctgatacactgagtgcctctgaaccaatggagttaagtgggcactgaaaggtaggccrggcatggtggctcatgcctgtaatcccagcactttgggaggctgagacgggtggattacctgaggtcaggacttcaagaccagcctggccaacatggtgaaaccccgtctccactaaaaatacaaaaattagccgggcgtgatggtgggcacctctaatcccagctacttgggaggctgagggcaggagaattgcttgaatccaggaggcagaggttgcagtgagtggaggttgtaccactgcactccagcctggctgacagtgagacactccatctcaaaaaaaaaaaaaaaaaaaaaaagtaacccttggacctgggacatggagtgggcaggatcccttggtgctggccacggtgaccctaaggaactaaaggccacagtgcctctgaatgtaagtacaagtacacattccttgccaaactttattgkgattaaaattccagagacagtaccagctccacatacctctagccctgtctttgccctagttcccgagtgtccttcacccccatcttccaaatcatctctggtttcacggggaagaaaaaacctagggctgctgtgaatgtgccctctcaggtccctgagttggccccaggtagagctgtaagagatcaggaagagggcctccctgcctgacggcgatgatcctggaggcaacgtgtggagcagaaagagaagtcgaggtagtgaaagggagtcaggccttggagggatgccccacaactccagcagcgtctgaacaagaggaagaaaaatggctggacaggtaccccagaaactttccaatccacgctctccccgtccctcctcctgccatttctgttttcactgcagcatctgccagaacatcccaaattccctcaaccacccttctgaatactgtgcaggtactcatttctcttgcccccaatggtccctgcaacattacagtccacccactccctcatcccgcaccccataccgagtattgacgattgcagagtcagggattggagaggtaggggctcccaactgggcagcgagtcggcgctctgcagccagagctctctgagggagacaagttgtgttaaggacaaggccccagtggcgagtagggcacccaagaggtgacagctgcacgctggggaaggggttagacctctaggaagccttgccatggacaagagaacctccagcctcaccttctctcggtcactgagggcggcaaatcgccgctgctcttctcgttcacgctcctcctgctcctgctgcctctgctgctgttcctcccgttgccgccgggctgccttctgctcccttttccgtgtagcctgccgtgcctccatttctggtgtcaatggtcctggcacctggaggatttcaaatataagaccctataagttatctttggtaaaactgcaagaagtagaaaggatctagccaggatctgtgatgccttcccactctgcttgtccttcctattccagatgacctgagccttgttgtaatcgtaggcatctggattcttctccatgaaccttcggaactcattacgtgttgatttgtcagccgcaacagtataaggtggccgggcccgagagtccctaggtgcaaaaactccaaaaatgggtttaacttgcctcctgcctttcccaacatcacccaaccagaccaagggaatattgccaagtagccaatgccaactttaacctccaaattatcctctctatacccaaaatgactcaggatggggacctttactcactgcacagtggggtcagcacctgcttccagcagcagacgaaccactgagcctcttccagctgcagctgctgcatgcaggagagtaaagccaccggagcccaagggggcactgagcagagacagaactctagggtctgcagggctgggagctagctgcagctttagcactccaacatctccagctcggcaagcagcaagcagtgcattccagagctctggctgaccaggggctttggcctcatccagcaaagggcccaagggggcagcaactgcctgggatgactgtgtggaaggctcctcttcttgagtttgctggagaagagtccgatgtgccccagcctcctggtctcggcttttctccttcttattcctttttctcctcctccgcttgggcaatacttcagactcacaaagatccagagtccccacagtcaactccactagctccaactctacctgaaagccatcttctccctccgaccctgaacctagggaaaaacctgacatgtgaaatccatctagggagtactcagagggtagaagcagatgcataagaatgaaagcctgaaatgaaattgtttttattttgtcacccagataaaagtagcacatcaagagctgagtccattatatcacatgcagaaatgaggctctcagcccagacaagaacaagtccctggactctccgtatgagtagccttagggtgccgcacaatagaggaaagcatggaagcagccctcagcctcaaaccacagcatccaatcaaagataaactatgtgagatccatgcaacacatccacgcatctgctccacacaaagattttcttagctctggggaaacatccataacaaaagagataatagatttggaaaggtcactaaacatgtctcagtaattgctaagatagacactgtgggtgtgtgtttaaataaggaaatgggtcagttatgagagtagggaatttgccagtgcatttttaggacagaaactcagatctgacagttgccagatagtaatcaaaccctgtttgggagattcctcattctgccccagcgcttccttttcatccctgcagatctttcttatttcttcctcagtaggcttctttctctcctctcttactgttttccagtgtgtctgaggtgagtgcagtctgactgcttcccgagggtcttcttctgccataaaagaaaagatctttctcaaccttagctgaggagaagctagcgcaggtttctctcaatgcagatgtagctgggctgcagtccaaggcttagaaaatcctctggatataccaatgagaatggaggcttaggttggagagaacaggaaggtctagggaattgggatctggagcaaaggctcaccatagacatgcaaagtggtcagcttatggagcacacgctgtagctcttggaaggtgggtctgcgggtggcgagggggatatcccaaagtcggggatcccccctttgcaggggtgctcccttgcctccaaagaacaaagaccggccagagcggggagcacgcaacagtattgtaccagcctcctccagcgccttagcccagcttggccctgccagcaggtcacgaacatcctagagaagagagtaactcagtcctgcataccttcacttgctatttataaatctccaactaaaaaaaatggcccacagaagtgcaaggggtggaaagtagaggataacacggagaaagaatagaggactaaggctcctggggaatccctcatctacctttgtctacctataatgaaaattggaaggatatgagtcaaaaacctccctacttaacagtgagttgaacagagatgcaaaaaaagtatggatcagtaccaccagatctaaaaggcttaactcaccttatatagtgtggcttcattgtagcgcctcaggttggctccagcagagtgtgatggcccacctcgggcatcccgaagcccctgggctgtgccccgcttggcccgaaccgtatagcggtgaaaagttttgtgtgtcaccacttctcttctgtagacagcacagactcagtactggagaccagctggtgctccctggctaacaggatccactccatccttacccccatgcagcaccctctcacccttgaaatatagcaccagcaaagtgcccagctgcagccatgagcaccacgcagtctctgggacctctactttgcaggttctgtagcagcagttctgcctcttctgggggatccttgatgacagagaagcatcagaaacatatctgttgcattcactgagagcaagaaactaagggccaattttcacaaacattatctcatttaatattaccaccctgaggcttgtttccatttgacaaacaaggaaatttgaggcttggcgaggcagtcaagatgaagtggtagaatcacaattcaaacctaaattggtttgtttccaaacttaattccattacacttaacccttccacaattcaggccagtttcaattcaagactatgttgtcaagcgtgatacccacaaccaacaggaaggaagagaagcagggagaaatgcactaggctaagggaaatctaggctgggtgtacaaaaggctggggttagccatgcaacctgtactgtcacttgcctgatgagggcctaggacacagcggtaggcataaagaaactggccctgggcattctggaaaagaactcgatgagggtaaaagcctgggggtcggctcaacttctcaaatgtagccctctcccgatccagtgtctgcaagtcctcctcactggctgagtctgagtcttctgatcccgagatgctggaaagatctcctgaagacagacaatatgagatacacaagtttggtaccccatttttgttctttcctcaaactctaaactagtgctttcttatacctccatgtcctactcctacataggtccccctaccactcatcacctgtggagctctgcttttcaaagtccagggcagacaggagaggcttgtccttgagacgttgctttaggttaaaccgatgccagtcaagcttataatgttccctctagtacaaagacaaagagtgagataaaggtggaaatatgccccagcctggccttgtactggccaagaccagttatagtattctaggaagtacaaccaggtaacaccaactgcctcagtcaaagcatggacctttattaagacaaatcaaatgtctacctctccccacccaccattacacttttgcttctaacatctagctctgcacctgacctattacctgttcttggtggttctggaaggtctggtcacaagttgaacaaaataacttctctgaaatatccataggaccctggagtagctttctttctgggctttctctctcccctgagcctaaataagggaagaggaattggacatagaaagggagcccaaatccacagtgacaagaattatattcagagtgtgatatacaaagcagaggaggatacaaaagagatggcatgatactgccttcaaggaatttacactctaatagtcatgaaataaacagtacagcaatcacttaatgcaataaacatgcttctgaaaacatgtacgtaaaatgaatgtaaataaaataaaattggccaggtgcagcggctcacgcttgtaatcccagcactttgggaggccaaggcagacggatcatgaagtcaggagatcaagaccatcctggctaacacggtgaaaccccgtctctactaaaaatacaaaaaattaaccgggtgtggtggcggatgcctgtagtcccagctacttgggaggctgaggcaggagaacggcatgaaccggggaggcggagcttgcagtgagccgagatcacaccactgcactccagcctgggcaacagaacgagactctgtctcaaaaaagatgaagaaaaataaaataaataaaacgaatgtaaataaaaactggccctgggcattctggaaaagaatccgatgagggtaaaagccttggggtcggttaaacttctccaacgtagccctctcccgagatccagcgtctgcaagtcctccccactggctgagtttgagtcttgtctaatttaaattagccaaacagattgtttaggtgaatcctaaagaaaataatttctgttcagtttaaaattatttttcactgcacaaaaactacttcccaaatgctttttaaagtttacatttccaattagtgtacagtttgtctaaggagaggtgcaagaaaagatgtagccaaactaaagttacacaaaacaggaccgacacggtggctcatgcctgtaatctcagcactttgggaggctgacccaggcggatcacttgaggccaggagtttgagaccagcctggccaacatggtgaaaccccgtctctactaaaaatacaataattagccgggcatggtggtgcgggcctgtagtcccagctactcgggaggctgaggcaggagaatcacttgaacccgggagacggagattgcagtgggtggagatcgtgccactgcactttagcctgggcgacagagcgagactctcaaaaaataaagctatacgaaacaaataataaattgtttcatattcagcaaaaaggaataatttgagtggggcctggttaaatgtggaatacatctgagaattttatctctacaaagtttaaagtgtttttga

SEQ ID NO: 93258 - DNA, 20108 bp, Homo sapiens
cggttaccaccagcagcaacatctggctgggctcttacctcatagaccttcaaggacagagaccccagggcctggacctgatgccaccccaggccaaagccagagtgggagacccattggtcaggctcagcagggtgggaacaggcagagggacaagaggggaatggagaagtggagaggaaaaggaatcgagggacaggaagggggaggctctaggaaggttctgggttgggggtcagtgcatctcagggagaaccaaggaaggtgggcatggctggagaggaggaaaaggaaggagccccaggtgtcagggcagtaggctgggagtcagtgtggcaaagcgggggcaggacacagatacagtggcaggggcccagggctgggacatgagagaaggcagcgaggcggcagagggagaagagaggactcaggtggaggtggggtgggtcagctgtcagcatccctcagaggagaaatgtggagagctggaggccagcagtcactcacactcgctctgtcctcctgtccagtggatacagccctgggcgctctgctggcccaaggatgtccccactgcccctccatggcctytggccttcttcccattcatatttatttatttattgacttttatgaagtttccccttccatccgatccctactgcccatgttgtcctgaccatccctcccagccatccagctgtctgtctgtctgccacaaggaaataaaaatggcaagcagcataacctgtgtgtctattgggagggatggctggaggggaagatggctggtgaggggtgagtccgggacaggggcatttagccctctctgggtattccccaacacacacattcaggaatataccagctagcactttgggtccttccaaccccctcccgtgaccctcctggcccctcacctctccttattcctggagggaggggagactgtggtctgcttctccccttgcagtttccggaatgttggcagatccactgaacccctgcaaccaggctctagtagcccccacctcttgtcacgtgttccctcatcacaatgtgggggatgctgggctctgaaataggccagccctcaccccaatcctggctcagccttgttcactctccccagaagacaggcaggagctctggtcctgacccctggagcagagtgggtttcatcctgatggttggtgagagtaggtagtgtgaggagctgcagaagaaaccaggacagggaggctaaggtggctggatcacctgaggtcaggagttcaagaccagcctagccaacatgatgaaaccccgtctctactaaaaatacaaaaattagccaggcgtggtggtgcacacctgtgatctcagctactcaggaggctgaggcaggagaatcgcttaaacctgggaggtgaaggttgcaatgagccaagattgcaccactgcgctccagcctggatgacagagtgagactccatctcaaaaagaaacactaggacaggctcacaccccttgccctccatgtcacagcacatatcagagcacatggagagcaccagctgggagtgctctagtctgctgtgtccagcattttcctagggctgagggacacaccagcctggaccttcttgtccacatggcaagttaggaggtctgctgggtgctaaagcacctcaattctagccacacccgtgccatagaatggtcactgggacctaggactgagctgctctgccctgaggttggggacgagggattggggggttggcagggacccagacctccttgtctccagaggaaatgtttccctcatccccaccttcaaaattctgttcttggcaaagtaaaaggaacaaagcctctgaccagggtagacagagttgtcactgctgtgttgctgatggaggttgagggccccttggctccagcccagacaacccttttgcccagcccagcccagcctctctagcttctcaggaccccagggaagaggcaagccccatcatcataaaataacaggatgttaaagccagctggaagggaccagaacgacaccttgcctacctgtcattttagcgatgaagatatacagtttgcctgtaagaatctccaatcccctacacactgcaagtgttttgtataaaaatgaggtgcctgaactcatatcttgataaatggtaaaattcctctcccgtccccgctctgatcttgagctcccttcccatctccattggaaatggcatgtgaactgcttgttccaaacccggaggagcaaaggtaatttatgtcagcagagctatgtcaaaattgctctgatcaaaacgtgacagtgcccccacactagggcgggtagttccaatgaatggaagcaatgcttctgcccggtgcccggcctgggcagactggcctccaggcaatccccagaggggttaactgaaccccttcaccccaggtggtctgatgcccctatgcaccaatttatgcccccaaaaaggaattgggcagacctagggttggggccagtagtggtgctaatctccaaggacagtgcagtctaaacagcccccaccatgtgacatcgaggggagtgagtggggatggggaaggcatggaggggctgctattctcaaaaatctttcccgtcccctcccggtttatctcagtttaccgccagggggcacagtgtggaagtgacaaccctggactcctggggttgggggtaggggaagagtaaggagcttctggattggtcttgacagccacgtggccctgttgccgttagctgtaggggccctgaggaccaagtccgatgctactctggctgtattcagggaaaccccagaaacactcaaaccccttaaccaacagggtgtgttgtctgactatccagagcccaacctgattgaaaagctgccccagcaggaagctggatctcttgtcagctaggggctgaatctggtcctcctgggagtgggatggataccccctgccctgggaggggacagggcagcatccagctgtccagctgtccaggtgctgacgcaaggtgcacctcagagctgctcgggtttctccccacgggcctagcccagcggctgagccagcatcccaggcatccacaggctaaataaagagcctgcctgagtcagagggaggcggatggggccccggggggcttggggcaaccacgccaaacaaggcaaggaggggagcgatgtataaaaccgggcccagggctgagcacctgcctgcacccctactgtgccatccagaagggctctgtgctgcctgcaatccagccagtcgactcaagtccctaggtcaacccctccacggtgagtctgatcctcagagaagccgcagacacccccattcctccatctccctgaatgttctgaccagggaggaaaagggctgaaggtgggagcctctgtctcaacctggacccccatatttgtcgcccactccccagatgtctaaagcagctcctgccaaaaagccagtggctgtggccccagctcctggatgtaccctggacatcaatgacccacaggtccagagtgcggccattcgtatccaggcctcttaccggggccacaggtgagagggaaccccggagccctgtggaggaagggagctgcagagagcgcactcttgagtggggtttgagtaagcgctgagcagcgtcaggagcctttagaatgagtggtctcaggggagggtcgttactgaggtatggaggagtggccgggaggaatgcatcatcctatcagggcagcagttcaggagcagtcctcttccctaccaagccacacgtttaggggtctggcgggtccagggggcaggtaggagatggtgcgctcgcggtaagggctgtggccgggcctgtcttaggaactctgggccctgactckgcccgcgggtaggtcccggaaggagctgcgcgagaaggggccgccgcgggtgctggagccgctgaaggacgtggtgctgatcgaaggcagcgcggccaagctcacttgccgcatttcggctttcccggacccattcatccgctggagtaaggacggcaaggagctacgtgacggtcccaagtaccgctacgtcttcgaggaccctgacgtggtggcactggtggtgcgcgacggcgagctggcagacctgggccagtacagcatcaacgtcaccaaccccttcggccagtgctccgactcggcgcgcatcctcgtggaaggtacgcgcgccccgggcrcagcgccagggcgcagaccagcaccactcagccagagcccgcagcccggtccagctgcgcgtgtttacctctgggcctagctacagggtccccgccagcccagctctgggcacggcctggggcgcatcgccgcgccagccaagtgcgtccttccctacctcgggatccagctccacccgggctgagcagtcagctgtggacttccatcacgcggctccgggtccccaaggtcacacagcaagccagaggcagagccagggttggacccgggtcttctggctcccaactctggcaatttccactacccggagcggtctctgaggcaccgcgagatgtgtgaacattcaggggctttcgcccgccttatctctcttgatcctmtattcgaccccgagaagtaggagaggcagggataagtccctttaasagccaaggagatgaaaccagagaggctaatgatttgctcaacgtcacactgcgagtttaaatgcatctgtatttagtgccgggtattagccggtgaggtgatgccctgcctcatctccgggtccttcacggggtttcgctcccctttccttccgctagtcccgacgaagattcaaaagggacccgacaacactaaggcgcgcaaaggcaccaccgtgacgctgactgcggagatcctgggagagcctgcgcccgacgtaggctggaccaaggacggggaggacatcgaggaggatgacaggcgagggccgggacctgcggcacggccagggcctggggctggaacctgggtgggactgagcccagaaatctggctggagtgacgggggcggggactgggcagcgaggaacagagctggctaaggagccccgcccagtgcgcccgtgtactgaccacggctccgccctcctccccgccgcccttccgcagggtgttcttcgagatcggcagcaccaccacgacgctgaccattcgccgggccacgcctcaggacagcggcaagtacgaggtgtacgtggagaacagcctgggcatggaccagagcttcgctcgcgtsgacgtggcctgaacggcacccccggaccttccgccctggcgccgagcccgggggtggtgggacccacagccctccaccagcttgcttaataaagctgctctctgaccctccgcgtctgtcctgctcttccgcgtcgccattccctctcccccgcaccagcgcccacacgtattccagacccccacgccaaggtcacagcctgttggagtcacagggaggtctggagagcgcctagcgccgtgctgcatttcagacagtcaaactgataagagttgccctcgccgtccaaggcgccctcacttcccagcggtaccgccggctgggcctgggactccgccttctccgcttttgagcgcctccagccccagccccttgtggctgtttgcccctggccccgccccttccagggctggccacacacccctgctgtccttagtcccgttttcctgtgggacccagttcctcacttcggctgctgccccgaggccgattccccaacagctcgggtcccagtcttaagttccaggctgggcttctcaggccccacccttcttcgcatttaaccccgccccgcgatcccttggtcacacccctggacttcagcacctctttcctctcccataaagttagaaagcgggtaaagggtcagactacaattcccggcagaccctgcgaatgagttctcgcgacttgcgagaagacacgtgcgcggaaggagcttgcagtagcgggcggcagagctggagtgaagggagctagtggtaaagggagctggtggaggggtggcggcaggggtaaggggcaggggacaccctctagacggagagcgggctccgaggtcctggctggccctcggtgcgcccgcccctgtgttggtcccacaatccctggcaatgagaggccagggtttattggacagagtcagttgtggggttcagagggtcagcaatcaatcaatcctccgaatccagagatttagacccagtcgtccgtattaggactggaggggggtcaatargttcagtgtttgagatgccaagggaacctgtcttttgatttggggttcaacatacagaggttagttttaggattcatgtttagcatatagaggatttttgctgggattaggggttcttcaaattcagatcagtgttagttcagtacttggggattacgttcaggatttaagttaaatatctgaggctcactcagggtttgctgtccaatattcagggttcactattggggttcagggcttaatatctagaatgaagacgcaacactttgggaatttgaggcttcagtattttgaggtttgggtctgagaagggagtctctgccaggtttctgaatttgcagaatttgttcatggccagagggaagtcttttagagatcaaattgtggggtgtgaatttcagaatttgggaggaatcactgtgaggtttgaaggccgactggaatctgggttgggatttgagatgtgtgggatttgtgaggttctgtccaggcagggactatattgagctttgggttkacatcttgggggagggctaagtgctgctatttggggtttggggtttggttggggtgtgagatctgagcttgatttctctgctgggatttgagatgtgtgggatttgtgaggtgttgggtccaggcagagactatattgagctttgggtttacatcttgggagagggctaagtgttgctatttgggttttggggcttggttggggtaggagatctgagcttgatttctctgttggaatttgaagtttaggtagcagtcaccattatgctcaaagcggtgatcctgattggaggccctcaaaagggtgaggtgccaggggaatggggggaggaggttgggctggagtggtaggcgggatgggggcagaggaaggcaggaggccgaaatgttctcctctctcctctcccaggaactcgcttcagacctttgtyttttgaggtgcccaaaccattgtttcctgtggcaggggtccctatgatccaacaccatattgaagcctgtgcccaggtaacctcaggggctcccctctctcacctcacttcctgcttatcttcatgctgtttccccctttcccaaccatgaactcttcccaccaggcataactccaaggaccatcattcacagatgacaatgtgaatggcgccccctcaagttatgctgtgcagctgccctgctgtcttcccctaatctagtttctcatctggcctcttcctgctcagatttcactcctatttttaaagtgtggaatgtgagatcaggcaaggatcttggagacaatgtaaagccgtagcatggagactcttaatgataaccaagcacaaattcatatccttgatcacattgwtgctcatttctttattgcttttcgtattgagccaggcaaggttttggtttgaattcagtctctgcctgctgtgaggtctgcaacaaataacacaccctctctgacactcagtttccttatgtgtaaaatgggggtgattagacctaccttgttgggtggtgaagcttagaaatgatatttgtaaaatgcctagtacaacgcagacccttgataaatggtacccttacctcatgctgatctcaagcttaggctgacagataataaaaatggccgggggggagggggcggggtggaaatggattaatgcagcttggtaggcaaagtctttcttagagtgagtcccagttcaggttggtgggggtaataattgattgaaagatcaggcctggcatggtagctcatgtctgtaatcccaacgctttttgaggccgagtcaggaggatcgcttgaggccaggagttctagcctagctttggcaacatcaagagaccccttctctacaaaaagtttaaaaattagctagatgtgatggcctggctgtagtcctagctgctctagaggctgaggcaggtggtgacatggctgtagtcttcaatactcaggaggctgaggtgggaggatcgcttgagcccaggacgtggaggctgcagtgagccaaaatcatgccactgcactccagcctgggcaacagagcgagaccctttttcacaaaaataaaacaaaacgaaaaaagatcaggcctccgacttcctccaaattcctcattgtccagaggagaaaatagcccagagtggtgagtgccctggggccccacagctgagactgaaactggtttctggactttgggccagcaccaaggatttccccaacatcccctcctattagatattcttcatcccagcctcttcccttgtcctcaggtccctggaatgcaggagattctgctcattggcttctaccaacctgatgagyccctcacccagttcctagaagccgcccagcaggagtttaaccttccagtcaggtgtttgtgcacacactcgtatatsggggggtggggatgccctaggcctctgagttcttggaagtgggttgagtcagcatttgctggagttcatcctcgcctactagaaggattcttgtttggacatcaatgaatctctgagtatatagagtttctctgtgggccttgggcaggagtagtcctgggagcaagcggtggcggtcaggtgccctggctcatggtatctgtttcctaagatccactgagctggctctcgggtccctggggacaggtacctgcaggaatttgcccccctaggcacagggggtggtctttaccattttcgagaccagatcctggctgggagccccgaggcattcttcgtgctcaatgctgatgtctgctccgacttccccttgagtgctatgttggaagcccaccgacgccagcgtcaccctttcttactccttggcactacggtgagggggtcaggagggctggagggtgtagaggaggtgatcccaagagcttcccggaattcagggtgttggggaggcaggggcgccccgggagttggtgtgggagctggcgtcaggagggagatgcgctgctctggcagcatggaggtgttagtggagaccccgagccctctggctgttcagaagtagggagsgggagggcagctgtcagtttccacccttgctgaaggcctgtcagtggcagagctgcatgccaggtgctgtagcggagggaaagaaagaaaaaacagacgtggctgccctggagcaggcgggtcactgtctcgggtgtgtctgtctttcaggctaacaggacgcaatccctcaactacggctgcatcgttgagaatccacagacacasgaggtgagagcagagtgggggctgggtgggtgcctactctgtgtcatcatcccctctacctcaggcctctagagaatgctggcacagtatggggtgggctctagtcttgtcagacaggtgagacactcccgattaatcatcttatatccctttaagagagattgaccagggggagggggggaatggttaatttccctgggggtggtgctgtaataaatgtatgcacagkgcatgatgggaacaccaagggggccccaacccagccttgctggggtgggagtagagagggcttcctggaggaagcaaggtctgagcagagtcccatttgtctagatgacaaaggagacaggaaggtactacaggcagagggaatggcaggtataaaggcctggaggcaggaagtaacataccagaagcaggagcatgataggcagggcagcagggctctgtcctgttttgtgaaactcccttctcctaagccccttgactttcacataaccctccctcctttatttatttatgtatgtatgtgtttatttatttatyttgagacagagtctcactttgtcttccaggctggagtgcagtggcatgatcttgggtcactgcatcctcgacctcccaggtttaagccatcctcccacttcagcccctcaagtagctgggactataggcatgagccaccatgcccagctgatttttttttttttttgagacagagtctcactctgttgcccaggctggagtgcagtggtgcgatctyggctcactgcagcctctgcctcctgggttcatgccgttctcctgcctcagcctcctgagtagctgggattacaggcaggtgccaggctaatttttgtatttttagtagagacaggctttcgtcatactgcccaggctggtctcgaactccggagctcaagtgatccacctacttcagccttccaaagtgctaggattataggcatgagccaccaccatacctggcgtcacatactccttttatttgttcgtgctttaatataaaacatacatataaacacgcacacacacatgcatgtacacacctacacacatatagttttgtgctcagcaccaggtagctgtgagagaaacagagccaaatgggtgcagtccctgcctcttggttactgtgagtctaataggagtgacagaatcaaaaggcaacctttgcaaatgatacaatgccatgggtgaggcgtggccagagttcaggagtgcccaggcatgaacagctaactcgggccagcaagagaggacgcacagagagagtgacagtgtcaactgggtttggaaaggtgggctttccagatgaagagatgagaaaggccattccaggcacaggcatgcagtcgggtggaaatgcgtctgagaggtaggtggtggggaggatcaggcagggaaagccatggactttggatttatctgaagctgaatcaggtgaagggcagtcatctcagggtttaaagccaggcagcagtaggatgcggatgcgcactgcattttagccaggccaccctggcagcagggaggagaggcaagaagggcctagaaatcagagggtcttaggggactgtggcggtagtcccttcttctactgaacccagcctgctctgtcctcaggtattgcactatgtggagaaacccagcacatttatcagtgacatcatcaactgcggcatctacctcttttctcctgaagccttgaagcctcttcgggatgtcttccagcgtaatcagcaggatgggcaattgtgaggcaggccccatagccctgtgaccccaagtacccccagtcacggaccccaacacataccartctctgcaggctccatctcaacttgctcaccttcctcctcccctctcccttctccacttgccatctccagcagagcctcctgagtccctccccttctaacctcattctgtccctcttccttatccatcccagttcctcctctgtcactgcctgcccactccccttctggtccatttctcctaagccctgagtgtcccagagacgtctttcagaacagacggcaacacacagttgggcgcacacatgctcgggtgcagacgtgtgcacgtgcacacacagacagacatgcatactctcaggctgaggctccccttggaacatagcaccagagccctgctcaccagtcccagggtcttccctcctggggctagaagctgttcccttctagggatccttgccttaaccccccaccgccccatctaaggcctcctctgctcatagccatttctcactcccacccgtgtctctgcttccctctccatctctcctggcctctctgtctctgtctctgctgagctggcatctctaccatctctctctccctttctttctgtgactgtctctgccctcaccagctgccttgctctggggtgagtctgtctgtgtttcattccatccaatgagggggagggtaacttggagggggtaaagggctgaatggggatgagaatgtgaaaatggggggaactccttatggaaatggggcagggatgggaagcaggcctctgcctggggctcccttgtgatagcaccyacccaagtgggggctgggtgggagaggttcctgggatgtgagcagccacatcccagagagggccgaaccagacctggagagaggggcttagagaggtggtgggaatcctcctactcctgtccctgggagactgtgttagccccacagtcggggctyagctgggggactaatgtcagcattcttcctctctgccagggaggactcaccaggcttgtggccaggggcaggtacyatccgcctagagcaggatgtgttttcagccctggcagggcagggccagatatacgtgcatctcactgatggtatctggagtcagatcaagtccgcagggtatggaaggctgggtcccctggggattgaaattttggggtggtgggcacaggccctgctgacccctgagcccctgtcccccttgcggtccccagttcagccctctacgcctcccgcctctacctgagccgataccaggacactcacccagaacggctggccaagcacaccccagggggcccatggatccgaggtacccagcctgccccaattcctaacctttggcttccaccccagccctctgaaccaggattcttgacctcgagtccagagttaaagcctcaatccctgccccttcctgatcaaattcggtttgggatatttgcccccagggcctctcttctgcttctagggaatgtgtacatccacccgaccgccaaggtggccccctcggctgtggtgagcactggtcccagccccagggagggaagggtggtggtcggatggatggagggtgcccacgctgcctgagttctgggtgccggtttcttcactttgtcacagcctattgtgtgtcctcgagcaggtcacttatgccttatctgttctagaagggagttgggtttggggatcctccaagtccctccagggcttatggtgtgtgcttctctccacagctgggccccaacgtctccatcgggaagggggtgaccgtgggtgagggtgtgcggctccgggagagcatcgtcctccatggagccactttgcaggtaggtaccagcatacacagcagcatgtgacaccccaagaggctgcggggagggcccaggcatccccccaagaacagagaagggtgaacgccgtgggctctgcatctggccacacctcacaccctccggttcctgctgcctcctgcctcttccccttacctttcactgtcctctttggcaggagcacacgtgtgttctgcatagcatcgtgggctgggggagcacygtgggacgctgggcscgcgtggagggtacccccagtgaccctaaccccaacgatccccgagcccgcatggacagtgagagcctcttcaaggacgggaagctgctgcctgctatcaccatcctgggtatggcttcctgggggycagggctgggggaaccccwcagctgatggccagtggccccggggagcattcgttcctctgtgtgcacgcgtgtttcttcttttagcaaacagttaccaagggcctgctgtgtgccaggccctgtgtgagtcaccgggggcatgagaccaggggcacagatgggcaggagggctccctccctgctggcagtggcccccagctccctgcccctgtctcccctcccatgacctcccctggtgccctcatccatgctgcaggctgccgagtccggatccctgccgaggtgctcatcctgaactcgattgttctgccacacaaggagctgagccgaagcttcaccaaycagatcatcctytgagtagggctgccagaaggcccccagctcctacccactccccttgaggctgctgcctgcttggccagcctctgtccagaaaggaccagagaaagccaggctggatcgtcacatgccggggagcaatgtggatggcctggggactcctgggttttctccctcccgactccctaataaaccccgtgaaccttggagccagcacagactgtacttatgtctgggctgggggtgggggcggaagcggggcagctgagtcaggcccccccacattagcatttaaattggagtcgttgctgtgggctcatgaataatgaatctggagccctggtaaatctccccctcccactgcctcagcctcgtgctgctcgggaggaaggccctctaggctcccctgccagcctggtcccccccttcacccctgcctccctgcctccctgttcctcctcaccgggcctggctcaggcccccatgtgcaaggattccgaagggaagggtgaaggattttggttgggcagcaggcagaggaactggggccacaggcctagaggctgatccccacagcccgctctgctcggttcccgctgagcccagccctggccggttttccgctttgccagctccatctgctcccagcttggcttttggcagggtgggggttttgcctctgcccgaggcctcatgtctctgtcttctactcccctggcaggctgggtgggcctgagctggtgccattctcttcggaagcacagtgggaggtaccctgttctgggaaggccctcaccacctcctgtccccctggccctgccctttggtaggtctcagccctcctctcccagccatctctcatgtttgcccatgacccccatgtgcccctcttggtgccccccttccccagctgtgggtgtggagctgtgttgccagatgagctggtaatgatcgtaatctgctaattgagaggaatctaattacccgaagagaatggggggtgcagggcatgggtgggagaaaggagggggtcctggcagcaggcaggggtggcaggcagcagggtgctggggccttgttatcagcaccaggctctgggacagagcccagggtttcatagcttcatagcctggcagttaggaagctgcgccttctcaggagctggactgaggttgacttggggattgggccaaatgtgacctcccaggcccctcaggtcccgtgggctgtgtgccagcatgtagggaacgatctacacagtgtggggtttagcagtcctgacctataagctgtccctagttcctcagttcctcctgtcctggcctccagcccagaccttcattatctctcttcatgggagtgggagggggctgcaggtccccactctgggctggggtcatcaccccaaggaaggggctgggagagggtgggccataggaccaggggmtaggtcccttccctctcctcccccctagtcctgacccttctgttccgagtggttggcagaggccatggcagctccatcataaatatgataatttaattattttctcagcaaaacaccgtgaaatccaataagtctgtgtcaggccctggcccccgggatccccctcctagacccagtgggggtggggacatggtggggagaggcagtggaaggggaaagggtcagtgtttgaaggggggtgccgctagcaaagctgaggtctttgtaacatgccccccagaggtctttgtaacatgcccccgagattgaaggagtcaccattgttggggggggtctaagaaggacatgccccccccactcctccccaacccacttctgtgctgggagggacctaaagtcccatccatctctgagagacccaagatggagcacctgcccctggacggggtgcagggggcccctttgtccaccgctgctgggaccctgtgcccaaccatcattggctgtttaggggtaggagggcgccagcccggggagggtctgggaagggagaaacaagagggaactggggtgggaagtgggggatgagcgggggagggatgcgggggaggggtgcgctcctgccattagtgcttttttcagtttccataaaaagattattctgtaaaatcagcgagggggagcaagctgggggccggggaggggggtgggtccctggcaccaagctggatagggcgacaggggaggagagccggggacagggaccgagtgtggagagaaatttggatgggcttcaggagccagccgagggggaaaggctgagccaagaacacagacttgggggaggctggccaggacagggtggggtgggggcagagccctcatctccctccagtcccctaggccaggctgccagggggcccagtcccacctccatctcaatcccctccccctggcacttagcagccattatcgggggagcagattgcagccccctccccctctctgggaagcaggcacagctggggccccaccacatctgctgcatccgcacggagcacagctgggtgtgcccagagctgcactccccaaaacacaaagggggtggaaaggggtgggtgggggccaaggagagcccagacccctgagacagacacactgacacctctgccaacagacacatactctttgaggcgaagctacacccactgacacacgctccctcgtgtgcagagacgggagaactggcaaacatgcaattacccggccccgcctgccacccccgctccccttccccagcccctcctgctccccttccttccctgaggctcccctctgccgccatggccacctctgaactgccctgggctctggtgtggagggagtgggggacctcacacaccccaagtacatcctgggaggctcagagagcaggagggcagggggtggtgaggggtgtctgagttcaaggggtgatctctgggaagccatctgccctccttccaagcccacacccctccccatgaagaagccccctctgaaattgatctttgccacagcctgggcactacaaggtctcggtgccagcgctgatcgctgcggcacccttgtgctccactggccacctcaagggggtgctgtgtgttctcagtctagccttcagctcagctgctagggttggcccctgccactgcccccacccccaaatccgcccgttctcgatcctcggtagtgcgtccctctgctgcccctgacatgcatggggtgtggggggcgggggctctgtcaatggcagaaaagtccccctctcctaggacagaggagagaaggatcaggaattccttctctcctctccccgtcgatgaccacctcttggcccctgatgaaaccctgccgtcttcacagccctcacttttcccacttatctccttggccctagtgtcttgccctcaaccttctcctccctgccccaccccccaattcccacaccgctccccacakgcccctcggagctctaatccctcctgctgctgtgccgccttatctgctcccagcagctttcgctgctgcaaagccctctccccctccttcctcagctctctccgctctctgaccagcaccccctcccggccagcctgtctctgccactcaggcccccgctgtggctactggctgacaccgcctctgtaccccatgccctttgccctctgcagcctcagctccgaggttgtcggctgcacacccactcccacgatggctgcgtccatcccagccctcccccgcaggccccacagactttgttagtttctggccagccaggatttttcatcttcctgccctccctttcctggtgtcttccccacttcctcctgatgcccccatcccatcttggacctggtgtccttatagtcccagggacccgttgccttggcttgggagtacccgaaaggagatgggaagtgttggtatgaaactcgggagaaggtgctgggctgggttggccctagaaagatggggtgggggtgcaaggagtactggcggacagtgggggcagggcctggcggtgggacgctaaccctcttcagtcgcctcagatcacgttcgggactccccaccccccttctctgggactctcattaaccgcttctcctgcctcgtccgcggcataaataacccagataaatcagccgccgtccgccccccgcccctcggcccctgcacagcccgtttgtcaccgctgtgtgctcaccagccaggcctggaccagcccagccccagcccccccatccttgtcccttaccgcccacatctgtcccacactggctcatcacttggtccgcaccagggccaggtgtctgggctggggagggtgtcctctgggtgcagggggagggaggctgggcatcttttggagaatgctgtctaggagttcagggggtcacagcatttttgaatggggccagccaggcaaggaatctgggcatcagcttgggggttcctgtgctttgagaaagcacccttggaaccccccaggttggatcctgggaggtctctgggtctgcctttggggcactttgcccaaacaaaatctccatgcctcctcccaggaaccttgagccagaaacccactgctctccctgtctctccccccgactgcatgcactgccccccccccacattctgccctgttaccaaacctcatcccagtccatctaccactcattctcactgtcaggaagctcatcccctggggggcggaggcaggtgaattggactgggaataaatctgaggaatggggacaaccagagagcaaaggaacctgggatgaggcttcacattctgaccccgcaacacccagctccccggcactcccagtccagggtccctaacagccctgccccctttgctcacacccagctcagggcctggccagccacacttgtccctgatgcctcactgcaaggggcagctggtcccccgggagtgggtgggggaagcagggaggggtgggggagcttgggcgcagggccggggtgggggtggggaagaagctgggccgggccccagggaccagctgggcaatgagccggggaagcagccgggaggctaaatgagggagattatcacccaactgcagccgggcagagagggaggcaggcagggaagcggggagagggaggagagaggggacggggccagaggcaaagggggtatagagagacagggagggggccagagggcctggtgagaagcggagggaaaggtcaagagatgagctggaagtatgggggcactccctcagaacatcaccagattcctggagatctgggagactggaggctgggggcttggggacaattggagacagctggctgtggggcagtggtgggggtgtgcatgcagctaattgctgctccacttcctggcagcctggagctcccctcacagcaccccccgcatgccccttatacccagttaccacccgatttctttccttatagaggttgaaggcatcctgcctaccctcaggaggaaagaggatgtgatttgtctcatgatggaggccagtatgttgtcggggaagtgtgaccccaagatctcaatagatggtgggtgaatttagagatatgtatgcactccagggtagcaacgagtgctgcggagagtttggggggcagtttcccgctttcttggcaaagccccagactaaagtaaccttaaaaagcaattaaatcaccttttaaaaaaaacagtaaagaaaaatcaatattaggagaaaggagaagagagagaaggatggggaggaacagtggggggagttctggaaaggtttggaagtctaccagggaggggagagcataggaggcggctgcctgggcatgggacagagagagggggctgtctgtggtcacttggccactttcagtgctaactcagcggctttgtccaatgccaatcccactttcccttctgggacactatgtcccagccagatgcatcaccctgccccaggggtcttatcttcccagcttggggaaccagctgacccagactcattggaggcttgtggggaagcccagctgtggggtccctggggaagccactttgcctaaaggctagggacaacctaagcagggcaccacgcatggtcagggctgggtgtgtgggcaggctccatgctggggtgaccctgatggggcctgacctggccttgcagccagggtgggcaaagtggcttccagctgctaagggagccatccctagg

SEQ ID NO: 93259 - DNA, 27115 bp, Homo sapiens
gccaagggtgcgaattagggctgaaatccagcccaggctcccaagcagtgtgcccctggtataggactgcctttgtgtgactcaggagaggtgtctttttgcggttttcccraagacactgtatgttccagcatcatcccaggccacctggctccctcctctcccagtacctggggatgaccatgctggcgaacatccatctgagcaaaggagcaggtatctcccacaccaacgacctccacggtgaagtttcggaagaagtctataatctccagggcccgtgggcgcaggcagaagatgaggatgaggggtgtgacaatggggctcagcaactcttccaaaatgaacacctaaaagggcgggaccaaggtmacaagcgagcaggagggagcccagccctcaccaccgagctaccagccagtctctagcaggccctaactccaactccactcactgccttgtactggaagagctgggcaaactcgtcccgggtctgcgagcggtgggcattaccctgccagtggtcaggcatgtagtggatgtgagcgaggatcacgcggagcagctgctcagggcagaacaccatgtgctggtccgggataaaggacctagtgggatcaggatcatggtgagatgtatgcctttcccaggaatgctagccggcttgctcccgcctgtggccctggcccacctgcacacggtcacggtgacccccaggagtgtgacggtggtcagcacatgttccacagccaacacatcttcgtcataaatggtgagggcaataagcacagccaggatggagccagcgaagaaggctccattcttggccagcagtgtcaaaagaggtgacaagaagcaattcatgtacttggaggcgggcttgtagccacggttgaggcgggactgcagctcgtgctccagctcgttgaagtggcggaggtagcagcggccatagagtgaccagcagcgtgctcccagggcccccggctcccgcttcagcacctcagcatagctgaagaaggcatagaggatttgccatatgaggatgagggggcacagcaggaagttagcgatgccaatccacaggatgcggttgctgaggcsctgggccagctctagccgttgccccccacgtttgtactcggccttgaggctccattcattgagaaacagagagccaggtccccagaagaggatcagctcaaagttgtacttgagaccacgggtgaagaagacagcttccccgaggccaggcaggcggaagcgcagaggcaggagggatttgttaaccagtgccaccatgtagttctggaaacggaggatgcggtggtagatgtccagttctgtcagctcacgtttgtggatgcagatctggtgctccttctgcgtctgcacgatccgggcctgcacttcttgccacgtgcaatacggaagggcagactgcggggtggggtggggaagagacaaggtacggaaggtggggttgttgcctcgacccctttgccctatattagaagtgagattcaggggttgtgagcttaagagacagttcctgatttgtcaatgacagataaggataactgatgcccaggaatacacccacacctcccaatacgtcttagactatgggctaactgcccaacttcccagtcttaccatagggatgcgcagagcgtgcaggtagaaggagtggatctcccagtagcagcaaatgttatagatgaacttgataagccggtggatccagaagacaccagcaatgaccaggatggtgataagggagccattttcctgaatcctggtggggaaaaagaaggggaggagaggtggccctcgaggaaggagtcttggcagagacgctgctatcctgaagtatttttgctagaccaagcctgagtcagttctggagtatgagttgctgcctcagactccactctattacccacctgctagcagaactcaaggctatggtgtcctcttgacttgcagcccttacctggcactacagacytgagcaggcaaaaaggcgtctggcagagtgaccttgacgggttcagtagggtgaagactgtggttcaccatcttgttggcaaataggatgtcatagtccacgcagctgaccaggaaggtagtgaaggcaaccacaaagaggaactgcctggggagttgggaagaaggggtgcagtctgagagccagagaggctccagtgaaacccagtgggaagaggagagtctggaggtggcagaacaagactgggaactggaagggcctggagaactcccagtgggccctctctgctcctcagccccacaggactgtctcaggcccactctttgctcttagcctcagctgccacagctgcagcctactttcctcacctcatggtaacctcagccaccactactggactctcgaaggtttcatcctgtgggtctctgatctccagtctctgatttccttttgaggttgtagttaaaagcccttgggggagttttctgattgagggagggcttcctaaccccttcccccttcggcaatgctatatggcttctctctcccaggaggctctctgcctaggagcaggccatggaacaggcaaggcagaacagaggcttttctctgtggctggcatctctgagacctcctgactgaacaatgtacgttccattggagcgttgagatgatcaaggtcaaggcctgcattctttttttttttgagagagtctcactctgtcagccaggctggagtgcagcggcacaatctcggctcactgcaacctccacctcccaggttgaagcgattcttgtgcctcagcctcccaagtagctgggattacaggcgtgtgccaccacacccagctaatttttgtatttttagagcctcctaaagtgctgggattacaggtgtgagctgccgtgcccaaccaaggcttgggttcttttcatggaagagataaggcttggaaagcttttcttgtaagaaagcttggccgggcgtggtggctcatgcctataatcccggcacttcgggaggttgaggcgggcagataacccgaggtcaggagttcgagaccagcctggccaacttggtgaaatcccatctctactaaaaatacaaaaaaaattagccgggcatggtggcacatgcctgtagtcccagctactaaggaggctgaggcaggagaatcacttgaacctgggaggcagaggttgcaccgagccaagaccactgcactcctgcctgggcgacagagtgagactcactccatctcaaaaaaaaagaaaggtgaagctgtaagttttggtgccacacccagtccctgaactacaaaggtttacggagttttagcctaggactgagttgtactggcaggttgggccaagtgtgagtgcaaggagaggaaagactaagatgtattctttcaccacatcatctgtcccttcttatacttacatgagctcaaagatctccccgatgagcatacatgtgaagccattcttctggtgcagattataaacgtgtaattgttaagaaaaagtagtcagtaaagaaagcaggtaagagcacagactttggtgtcaacacactcaagcttaagtcctggctctgtgactttctagctgtgtgactttaccaagttacttaacctgtctaaacttttgtctgtccatggtggtacattaggaataaataacacttgtctcataggagtattaggtctaagataatgcatgtaaagcatttaacacagagctgacacagaatgagtcaaaagacgttacttattacgattatttacatcccatcaaaaaggaggctcggctgggtgtggtggctcacgcctgtaatcctaacactttgggagggcaaggcaggtggatcacttgaggtcaggagttcgagaccagccttgccacatggtgaaaccctgtctctatgaaaaatacaaaaaatagctgggcatcgtggcaggtgcctgtaatcccagctacgtgggagactgaggcaggagaatctcttgaacccaggaggtggaggttgcagtgtgttgagatcgcccctggactctagcagcaacagagacagactccatctcaaacaaaaaaaaaggaggctcacccttagaaaggcttctacaaattaacaccacaaagtggacacaggcacacagatcttggtaaatgtgggctatcattacttaacgatgatttcaccagcctctttcagcctcaggatgagctccattcccgtttccaggtattagagtcaaacctacccccacctcccaccagagccccggcttagagagacattaaaggtcccagagctccaactcagaaacacaaaggatattcgagagaagaagaggtcaaggttttcaatatggtgccaaggtgctgtgggataggaacagagatgtcagagccctgggagaacacaagccccttgctctctccatgttcttccatcaactctccctatggctgtcatatccaagaactcacacttgctcccctcggcgacgtgcaccaacaggtcctcctcccctgggggtgaatcactataggaggcctctaggcgctggtattcagtgtcaaactgcgccatcaccaccgccccctgtccaccttgaccacctgccaataaggaggaagaagagaccctgattcagttccagctgctgcccatgggctgccctgcctactgccaaaaggagaaagtacccttgggctttgtccactaccagcctccttggctcagaggcagaggagtagtgacacaagaaaggcagtaagctcagggctgggggagccttaactctggccagtctgggtgtctactgctgctttcctggcccaaagccagaatctgtccctttgttgggggctgtttcatcttctatttaacggacagaagagtccctcccccgcccatcctgggaaccctggtctcccaagagactaacagtttggaagcacttcacaaacaaatgtttgagaaaagcacatggccctaccagctccatggacagtatgtgctcctctccagccctcgatgctctgcagctgctggaggagaagatgtcaggccccagagagtgggcagtggggataaaaaggaacccaaccctcccagccatccacaccccaccaagaggaggccaagcatggggcaggaaggctgcagtggggaagaagcacccttccagcccaggactacgagcacttcctctggctgtgctaaaccgggccactcttccaactccagggtctcaagaagtaacgtagggaccccatggagaatgagtgggtacagacctgaggccaggggcgcctctggactatttctccattgccctaccttagcctcagaaatgacatacttctcagggtccacaaaacctcaagagtctttcctgaagaggacctttctggtcaaccccttctcttacttccctagcaccaaagatccagccggtgagcaaaccttctggatgggaaaccttgactgggtcagtgtagacccccgatcctaggtgaatttgtgggttccctaggtcctgtaagccaggcatggtcgaggtggtactcacctgtccgtgcagcccctgggggccgtggatcttggcccagcctggccccggtgggattccctgggctagtgagagccctgcccctcagggaagtcaccactcacagggtcagtgtggaccagggcccgtggagccccggccggctgggcctgggctcaggggttcctgcggatgttgcagggatcgagtcagccttacagctgatagcccgggtgggttggcttgcctccccacacccagccgcggcgaccgtggaccggagtccacctcgccccagggtcgcccggccccaggccaagggctggcagctcccaacagcggacaacctcgcgcgcggccccggcgcccgcgcgcgcccccgtctgcgcgcgccagcaatcaaaacattccggctgcgcgcccccgccccgccggcggcgccccttcctccgttacccgccgcgagctcacttagggctccgcaggcacccctgggcaaggccagacacggggcctgggattccaataaccggtctcacgtcttacctcaggaacagcgacccgggtgattccagaggctccgccggctccgctcgrctcggctcggctcggcgcgacccgcggcgctaggccgggtgtctgccactcactgtcacccgcagccaggctggccaataagcacggggggcggagacacaacggccaattctcggcttcagggacgggactaaagtctcgaggcgggtcttggacagtcagcggcccaatagtgtgctctacgtggggcggggctcaggtgcggacgccgccggttgtcctcttcgctgctccgtagtgacgrggattgttgtgttgcagaaatccggcaatcgacctgaggacttgcgagccgctcagctcccgggacgtttggtgcgtcttctaagggcgtgggcgagtttacgcgggccagttgttgctggtcgcatgggtaacgaagaaagttcggctaggcaagctcagtgatttttaactctgttggactcgatttgggagccgaatgcctatttcattcttttgtgggctgagactgggggtttgagaaagtggacgggggccaaggtattcatctcacagttggtagcaggatgagagacgagaagtcttgcggtgcaggagaaaccaagtcaggcaggcaggagacgcagcagtaggatctcgtttgcaggagccctgtttcttacacgctttctactccaggagctgctgctaaataatttctgctcagccatgtcgccggctccagatgcagccccggctcctgcgtcgatctccctgtttgacctcagcgcggatgctccggtctttcagggcctgagcctggtgagccacgcgcctggggaggctctggcccgggctccgcgtacttcctgttcaggtatcctggaaggtttcgtgtgaaacgtgacagggctccttacagcgtattgcccgttcagggaacacattcttattggtattcccgagcttaggaggccaattgatttatctttctgcttgattaaattcacttaatctctgggtaatgtccagcacagcccttgttttcaaacaagtctttttgccattgcatgtatctcctcacgttaacaccattcccttcaaaaacactttaaactttgtagagataaaattctcagatgtattccacatttaaccaggccccactcaaattattcctttttgctgaatatgaaacaatttattatttgtttcgtatagctttattttttgagagtctcgctctgtcgcccaggctaaagtgcagtggcacgatctccacccactgcaatctccgtctcccgggttcaagtgattctcctgcctcagcctcccgagtagctgggactacaggcccgcaccaccatgcccggctaattattgtatttttagtagagacggggtttcaccatgttggccaggctggtctcaaactcctggcctcaagtgatccgcctgggtcagcctcccaaagtgctgagattacaggcatgagccaccgtgtcggtcctgttttgtgtaactttagtttggctacatcttttcttgcacctctccttagacaaactgtacactaattggaaatgtaaactttaaaaagcatttgggaagtagtttttgtgcagtgaaaaataattttaaactgaacagaaattattttctttaggattcacctaaacaatctgtttggctaatttaaattagacaagactcaaactcagccagtggggaggacttgcagacgctggatctcgggagagggctacgttggagaagtttaaccgaccccaaggcttttaccctcatcggattcttttccagaatgcccagggccagtttttatttacattcgttttatttattttatttttcttcatcttttttgagacagagtctcgttctgttgcccaggctggagtgcagtggtgtgatctcggctcactgcaagctccgcctccccggttcatgccgttctcctgcctcagcctcccaagtagctgggactacaggcatccgccaccacacccggttaattttttgtatttttagtagagacggggtttcaccgtgttagccaggatggtcttgatctcctgacttcatgatccgtctgccttggcctcccaaagtgctgggattacaagcgtgagccgctgcacctggccaattttattttatttacattcattttacgtacatgttttcagaagcatgtttattgcattaagtgattgctgtactgtttatttcatgactattagagtgtaaattccttgaaggcagtatcatgccatctcttttgtatcctcctctgctttgtatatcacactctgaatataattcttgtcactgtggatttgggctscctttctatgtccaattcctcttcccttatttaggctcaggggagagagaaagcccagaaagaaagctactccagggtcctatggatatttcagagaagttattttgttcaacttgtgaccagaccttccagaaccaccaagaacaggtaataggtcaggtgcagagctagatgttagaagcaaaagtgtaatggtgggtggggagaggtagacatttgatttgtcttaataaaggtccatgctttgactgaggcagttggtgttacctggttgtacttcctagaatwctataactggtcttggccagtacaaggccaggctggggcatatttccacctttatctcactctttgtctttgtactagagggaacattataagcttgactggcatcggtttaacctaaagcaacgtctcaaggacaagcctctcctgtctgccctggactttgaaaagcagagctccacaggtgatgagtggtagggggacctatgtaggagtaggacatggaggtataagaaagcactagtttagagtttgaggaaagaacaaaaatggggtaccaaacttgtgtatctcatattgtctgtcttcaggagatctttccagcatctcgggatcagaagactcagactcagccastgaggaggacttgcagacactggatcgggagagggytacatttgagaagttgagccgacccccaggcttttaccctcatcgagttcttttccagaatgcccagggccagtttctttatgcctaccgctgtgtcctaggccctcatcaggcaagtgacagtacaggttgcatggctaaccccagccttttgtacacccagcctagatttcccttagcctagtgcatttctccctgcttctcttccttcctgttggttgtgggtatcacgcttgacaacatagtcttgaattgaaactggcctgaattgtggaagggttaagtgtaatggaattaagtttggaaacaaaccaatttaggtttgaattgtgattctaccacttcatcttgactgcctcgccaagcctcaaatttccttgtttgtcaaatggaaacaagcctcagggtggtaatattaaatgagataatgtttgtgaaaattggcccttagtttcttgctctcagtgaatgcaacagatatgtttctgatgcttctctgtcatcaaggatcccccagaagaggcagaactgctgctacagaacctgcaaagtagaggtcccagagactgcgtggtgctcatggctgcagctgggcactttgctggtgctatatttcaagggtgagagggtgctgcatgggggtaaggatggagtggatcctgttagccagggagcaccagctggtctccagtactgagtctgtgctgtctacagaagagaagtggtgacacacaaaacttttcaccgctatacggttcgggccaagcggggcacagcccaggggcttcgggatgcccgaggtgggccatcacactctgctggagccaacctgaggcgctacaatgaagccacactatrtaaggtgagttaagccttttagatctggtggtactgatccatactttttttgcatctctgttcaactcactgttaagtagggaggtttttgactcatatccttccaattttcattatagrtagacaaaggtagatragggattccccaggagccttagtcctctattctttctccgtgttatcctctactttccaccccttgcacttctgtgggccattttttttagttggagayttataaatagcaagtgaaggtatgcaggactgagttactctcttctctaggatgttcgtgacctgctggcagggccaagctgggctaaggcgctggaggaggctggtacaatactgttgcgtgctccccgctctggccggtctttgttctttggaggcaagggagcacccctgcaaaggggggatccccgactttgggatatccccctcgccacccgcagacccaccttccaagagctacagcgtgtgctccataagctgaccactttgcatgtctatggtgagcctttgctccagatcccaattccctagaccttcctgttctctccaacctaagcctccattctcattggtatatccagaggattttctragccttggactgcagcccagctacatctgcattgagagaaacctgcgctagcttctcctcagctaaggttgagaaagatcttttcttttatggcagaagaagaccctcgggaagcagtcagactgcactcacctcagacacactggaaaacagtaagagaggagagaaagaagcctactgaggaagaaataagaaagatctgcagggatgaaaaggaagcgctggggcagaatgaggaatctcccaaacagggtttgattactatctggcaactgtcagatctgagtttctgtcctaaaaatgcactggcaaattccctactctcataactgacccatttccttatttaaacayacacccacagtgtctatcttagcaattactgagacatgtttagtgacctttccaaatctattatctcttttgttatggatgtttccccagagctaagaaaatctttgtgtggagcagatgcgtggatgtgttgcatggatctcacatagtttatctttgattggatgctgtggtttgaggctgagggctgcttccatgctttcctctattgtgcrgcaccctaaggctactcatacggagagtccagggacttgttcttgtctgggctgagagcctcatttctgcatgtgatataatggactcagctcttgatgtgctacttttatctgggtgacaaaataaaaacaatttcatttcaggctttcattcttatgcatctgcttctaccctctgagtactccctagatggatttcacatgtcaggtttttccctaggttcagggtcggagggagaagatggctttcaggtagagttggagctagtggagttgactgtggggactctggatctttgtgagtctgaagtattgcccaagcggaggaggagaaaaaggaataagaaggagaaaagccgagaccaggaggctggggcacatcggactcttctccagcaaactcaagaagaggagccttccacacagtcatcccaggcagttgctgcccccttgggccctttgctggatgaggccaaagcccctggtcagccagagctctggaatgcactgcttgctgcttgccgagctggagatgttggagtgctaaagctgcagctarctcccagccctgcagaccctagagttctgtctctgctcagtgcccccttgggctccggtggctttactctcctgcatgcagcagctgcagctggaagaggctcagtggttcgtctgctgctggaagcaggtgctgaccccactgtgcagtgagtaaaggtccccatcctgagtcattttgggtatagagaggataatttggaggttaaagttggcattggctacttggcaatattcccttggtctgrttgggtgatgttgggaaaggcaggaggcaagttaaacccatttttggagtttttgcacctagggactstcgggccyggccaccttatactgttgcrgctgacaaatcaacacgtaatgagttccgaaggttcatggagaagaatccagatgcctacgattacaacaaggctcaggtcatctggaataggaaggacaagcagagtgggaaggcatcacagatcctggctagatcctttctacttcttgcagttttaccaaagataacttatagggtcttayatttgaaatcctccaggtgccaggaccattgacaccagaaatggaggcacggcaggctacacggaaaagggagcagaaggcagcccggcggcaacgggaggaacagcagcagaggcagcaggagcaggaggagcgtgaacgagaagagcagcggcgatttgccgccctcagtgaccgagagaaggtgaggctggaggttctcttgtccatggcaaggcttcctagaggtctaaccccttccccagcgtgcagctgtcacctcttgggtgscctactcgccactggggccttgtccttaacacaacttgtctccctcagagagctctggctgcagagcgccgactcgctgcccagttgggagcccctacctctcyaatccctgactctgcaatcgtcaatactcggtatggggtgcgggatgagggagtgggtggactgtaatgttgcagggaccattgggggcaagagaaatgagtacctgcacagtattcagaagggtggttgagggratttgggatgttctggcagatgctgcagtgaaaacagaaatggcaggaggagggacggggagagcgtggattggaaagtttctggggtacctgtccagccatttttcttcctcttgttcagacgctgctggagttgtggggcatccctccaaggcctgactccctttcactacctcgacttctctttytgctccacacgttgcctccaggatcatcgccgtcaggcagggaggccctcttcctgatctcttacagctctacctggggccaactcagggacctgagagggcacattcacagcagccctaggttttttyttccccgtgaaaccagagatgatttggaaratgggggtgaaggacactcgggaactagggcaaagacagggctaraggtatgtggagctggtactgtctctggaattttaatcmcaataaagtttggcaaggaatgtgtacttgtacttacattcagaggcactgtggcctttagttccttagggtcaccgtggccagcaccaagggatcctgcccactccatgtcccaggtccaagggttactttttttttttttttttttttttgagatggagtgtctcactgtcagccaggctggagtgcagtggtacaacctccactcactgcaacctctgcctcctggattcaagcaattctcctgccctcagcctcccaagtagctgggattagaggtgcccaccatcacgcccggctaatttttgtatttttagtggagacggggtttcaccatgttggccaggctggtcttgaagtcctgacctcaggtaatccacccgtctcagcctcccaaagtgctgggattacaggcatgagccaccatgccyggcctacctttcagtgcccacttaactccattggttcagaggcactcagtgtatcagctgaaagggaattgatatgtgtcctgtgcaaagtactagtgctattgaggataggcttatccaaaaattggacttggggctggagaggtacatcttctagttccagcaatgtaattttgttgagggctcccctrggaaacagcaggaatcttggcacgtagagggtctgttgtggcccctgctttgtccagtaccggcccaagttaaacccattgatccagacttggccctggggaatagggagcaggaaagaggggaaaagaaagggtcagctctccaggggtagaatcatacccttttgggtttctaatcagaggatactttctgctcccctccttctgtgatttttctcttttacctccccgctacccaaaccaccaccattaccaataccttggtccatccaggtagatatagaaatgtgtccccaactgagcctaaaattggaaatgttttggagtagaatgtggggccagaaggagcttgaggatatggccattttggcaactggaggggaaaccaccacttcacaaggttatcaattttcagagggaacatcatccactgggtaaggattgtttgccccagaattggtggcttcaacaggccctatagggaaggaaaatgaaaagtcatcattcactaagctttgaagctaagttatccttaatcaagccctgggatataactaggcaaagctagctcaccttgaagtcactgctgttagacccaaagctgagcctccccatgttctccaccaagatatccagtttggaccccagtttccccgtcaaaaatagtttgtctctcatatttcgctccacaacaccctggaacacctgtggataggagataggataggagcaaggctcagcatctagctcttagccactgcataggaaaccacacattaggatacttatttggagggcagagagaatgtagccatctatcacccatctattctagaattctatccttaatcaaactcttcctcatcccagcttatccctggaaccctctgcaaacgtgaacaggcaggtgggaaagtgtaaatatggggaacttaaggctaacgcttcctggggaagggaggagtttggggctcacagyctggaattaggttctcaccccatccaccatcacataggcacggtcatggactccattatttggcacccagaatggtgttggctcaaaaatggtatgggtcatataggttcggtacaacatgaagccatggtcctgggtatggaagaatgagtacttcagacaaacagaaataaaagaggacactgtgactatagccaaggaacttttgcgtatagctgttaagggaggttgtcatctccaccagatgtgggtttatgccttacctgcttgacagcctcaaaggtcattggcaagattgaatgaatgggcccacgggggcaaagcaagtctaggaaagccagtaaatgcccaacctattagaataagggagaagaattagaatatcagggaagtttctggatagaggacaagaaagaataggctatttagaaaaaaaaggtgtggtataagagaaaagatgtggaggaacttaccaggtgcagagtcacaggtccaagcatcatcttggggctcgggggaggtaaaggtcccaaaggaacttcctggaactgagcccagattctctcaggatccataggaaaaccacagaaaacaatacctattccaagactctagggcagagttcctaacctggggcccagggaagggcttcagggatcatggaggctcaataattttgcacacctgtgtgtcttcacacatagtcccatttggttgaatgggaaatgcctcagtgggatgctcagaaggctctgtggcccagacaataaccaccaatttatgggatacctttacaatgtgggcactcccttcctccaaattaataaaagcctttggagcttaatgaaatggtagggtaccttgctgatgacatctcgaagagcaaaaagcttaggtgtggggtcccctgcttcagatataggtgcatcatagtcatagctggtagtaatcggaaggaagcgtcccttcttatcggcacctgaagttgagccaatttaattaattcaacatgtatttcagatgacaggcactactaagcatgcttcatgcagagaattttgccatcagagggggcagaggtggccatattcagcttctagacatcctaatccacctggcccttagattctaattccttgttacctccctgcttctatcccagggaccatctggactcaccattccaatatccaaagttggtacctccatggaacatgtacctgaagtgagagagggtgggggaacaggtaaaagctgactcactgaatcttaactttcatccccagctcccagctacagattcatattgcccccagtgtctttacttacatgttcacactggctcccaacttgagcatgttctctagtcctttggttacagctgacacagaccgtgtggagtgattctggccccagtaatccagccagcctgtgtagtactcagagtttacctagagtgtgaaatgaaaggagtgtgagtgagatggaactgagctggacccattcctatccctgattccctgactcctctctggcccctcaccaatggcccatggggttcatacttccgaagcagggtaaagattttggtcatgttgtcagctgcggaaaggaggcaaaagaaaaagataaatgtcgtggaagwggtgtcctttccccagactccactcccagcccttgcttgagacctgggccaaaatctacagtggtatagagtccccggagggagccacacttgagtccttcaggcccatctgtggtgaagagcaagatcttttctcctagcagtgcacggaagagcccagccaagtgcctcatgtagctgaagtcacaggctctgtagctaccatattcattctccacctgccagaggggagggaaagtggaacccagctatgggatggaggtcaaggaccccttgtaccttcttcccctgctccagtcacttcccccttgtacctgaatgctaatgatgttgcccccattgtgataaagccatggatatatcttgggcagcaagaccttgaaccaggagtccactgcggcaaggaagtctaaaggaaggagcagagcttctgtgttaggtgctaccatcacacttgctcaccactaaatatgggaagcaatgactcttgtcaagaaattcccaaccctaagcaccttgtatatttgcacgccaatgaaatttgaacataggaaaccttaaaatagtgtttcttaaaaacaaatgggccgggcgtggcggctcacgcctgtaatcccagcactttgggaggcggaggcaggcagatcacgaggtcaagagattgagaccatcctggccaacatggtgaaacactgtctctactaaaaatacaaaaaaattagctgggcatggtggcrggtgcctgtaatcccagctactcaggaggctgagacaggagaatcgcttgaacccgggaggcagaggttgcagtgagccgagactgcaccactgcactccagcctgggcaacaagagcaaaactccatctcaaaacaaacaaacaaaaatggtggtatatggggagactaaaatatagaggggatggccgggtgtggtggctcacgcctgtaatcccagcactttctgaggccaaggcaggggtggatgacctgaggtcaggagtttgagaccctcatggccaacatggcaaaaacctgtctctactaaaaatacaaaaaattagccgggcaaggtggtaggtgcctgcaatcccaattactcgggaggctgaggcaggagaatcacttgaacccaatcggaggttgcagtgagccaaggtcacgtgactgcactccagcctgggcaacagagcaagactccgtctcaaaaaaaaataacaattatgccgggtgcggcggctcacacctgtaatcccagcactttgggaggccaaggctggcagatcacgaggtcaggagatcgagaccatcctggctaacacagtgaaaccccatctctactaaaaatacaaaaaatagccgggtgtgttggtgggcacctgtagtcccagctactcaggaggctgaggcaggagaatggcgtgaacctgggaggtggagcttgcagtgagccgagattgcgccactgcactccagcctgggtgatagagcgagactccatctcaaaaataaaacaaaataaaaataatatatatatatgtgtgtgtgtgtgtgtgtgtgtgtgtgtgtatatatatatatatatatatatacatacatatatatgtatgtatagagagagcgagagagagaccaggaaggcctcaccaaggtgacttctgcaggaggcttgtgatgaaggagcaccacatgcaaaggcctcaaagcccaaggcctggtgggtctgaagaacagcaatgaggccactgtggctggagcagagtgaacatgggggagaagagcaataatgtcgaggaggtgactggggccaattgtgtaggacctaccactttaaggaatttatggttcatattctgaatgagatgagaacctactagagaggtttaagcagagaaatgacaagatctgagatgtatctttaaacttatacttgaacaggatcacactggctactctactgagaacagattgtatgggggagagggcaaacaagggaaaccagttaggaagctataaaataagccagctgagagagatggtttggaccagggtgggggcaatgggggtgataaaaagcacttaaatttaatgtttgtcaagatacagctgataggattttctcttttttgagacaaagtctcttcaatctgtcacccaggctggagtgtagttgttcaatctcggctcactgcaacctctgacccccgggcccaagtgattctcctgcatcagcctcccaagtagctgggattacaggtgcccaccacctcgcccagccaattttttgtatttttagtagagatgggattttgccatgttggccaggtgggtctcaaactcctgacctcaggtcatgcacccgcctgggcctctgaaagtgctgggatcacaggcatgagccaccgcgcccagctgtttttttttttttaatcagtttcttccactatattataagctttacggcacaaggatgggggtctgtctggtcccccagtttctagcatcctgctgggcatgaaggaaacacttggtaaatgaatgatgacctccaatttgggaatggtctcttctgcttttggcacccaaatagcccattttacttacttgcttctgtgttaaatcctttgtctcaactcacctggatctgaggttcttagatgaatttcaggttttcgaagcaaccaggatgggagacccccctgagacaaacataaagagaacaaagaagcatgtaggttttgttttggggtgtggtggggaagctaggaagggaaggaaggaagggaaggaattgaatatagtgctggagatggccctagagtgtgggcagatgggagwagtctaggaactgcacaaggataactggttctatcccttctccagctaactcaccatctcccactctgcacagatgtaaggtcctggtctcagtatgaccaacaggttcgctagagctgcctcattcagaaaggcaatgaggtcccggctgccattaaagttatagaccccaggctgtggctcgtggtagttccagggcacataactgagaaaggaagaggttaataggrmccaaggtgaagagacgccagggaggcctaacrgctcaggccttgcagggaatctccaggaagcggttggaaggaggtcctggcctgccctttcccacccttggcctaggagtcctggcagtcttcctgtcccgaccttctttataagggggcggtagaaaaagtagatcccatccctccgcggctcttgcgagcacttcttacaactgtatggcgttgaggccgctccatcgcatcttcaaaagccggtcggcccaaagcacccgcggtacccgaaagtagtgcaggctgccagacacatagcggaacggggccccgtctaggagaaaccggtcatgacccctatccactacgaacgaccgagtgtctgcctataaagagaaagagacgctgctcagcagacgcctggagggagcgtcgagggtcagcgcctgccaagagcggaagagatggaactagccctgcgggttgtttggttgttactttggactttctctcatccgctggatctgatcccgctcaccgcacccggcaggctggttcaccgtctcrtcttacctggggcagcagtagcgtcaggctgagcggcagcagcagggaacgaaggcaggacagcttcttgggagccatggcgyttacagcgctcctctagtctgagacggcggacagaccgtcacgtgtcggattcctgggagggaacctcagcgagcaagggggcggaaaccacctcaagttgccaggcgtttagcctggacttyctctccagcctgcagccacccccttactctactagtttgtaaaatttctacatcatgttaaagtgcagttcacgaaccagcttcatcgacgtcacctgggaacttgttagaaatggagaatctggctgggcacgatggctcacgcctgtaatcccaacactttgggaggccgaggcgggtggatcacttgaggtcaggagttcaagaccagcttggccaacagggcaaaaccctgtctctactaaaaatacaaaaattagccgggcctggtggcacgcgcctgtattccaagctactccgagggtgggggtgggggtgggggtgggggtgggggtaggggctgaggcaggagaattgcttgaacccggaaggcggaggttgcagtgaaccgagatcctgccactgcactccagcctgggcaacagagcgagactctgtctcaaaaaacacaaacaaacaaacaaaagaaatgtaaaatctcagatcctacctcagacctatagaatcagaatttgtattttaacaagattcccaggtgatcctaggcaccttcaaaattgagaagcatggctttacttgactgggctccctgaggacagggagtgccctgttcatctcaaatcctcagcctctagcacagggccgggtatatagtaggttaaatctggatgaatcaatgtcataaccaaaaggctaaaacaggttcagaaccaggggaaaccattggaaaatcttcagggtgatccggggtgtggaagggaggaaccaggtcacaagaaggacctctttcctggagagtcctgtttcagcaaaacagccattccctcctggccattccaccttctttggaagtgcacccctctccagcttacccctgcctgcctccgcaacagatattaaggacaactgctttgtgccaaagctcgaaaatctgtgaatttccgttccttttgcctttacagtctcaagaatgggatgtgaagatcagggtaataataattacggtttattgacacgtactgaaggctatgtgtcagatattgtattaaacactgtacatctcatttaatcttcaactccatgaggtagataattatttccattttacagaggaggagaggaaaggacagaaacattaagtagcctgtccaaggtcacacaactacgttaacggagctgtcatttgaactagtcagtctggcctcacagttaagctacttaaccttatgtactattatacctattttacagctaccaaaagtaaggatccgagaggttaagtaacttgcccgaggttacacagctagcatgctattaacactcaatttagaaactggaagtctggttcacaagcctgagctcttaaccactgagactaggggtagtgggatacaggccagagcccagaaggttgtacgggatcaggagaccaggccaccagacccgcccctcactggatccccctccaggctgcagtgtagttggccgctttctgccccagagcgccagaggtatgaagcctcctacctccaacattgggagatggaggtcctgggggcctcgggccgagcccggctttgctcccctttggcgtaggtgcctgcgtcttgacccccaccgaaggccaagtagagaaccctcaccagggtcctgggacccgtccacccctacacctagctagcccggagcctctcagctccgcgtccccacatcctccggatgcccagcggttgctgagataccgcgggccgttacgccggcgcggactgatgatgtcagcactgcttccggtcggtggcgcttctctctggcccgagccaggtcagtccggcagtgcagatggcccatcccgggctctgggctcctagaccggggtgggccctgccaggagtgggcctgagcctcgcacgtcctctgaaactacgctatgctctgcttttgcggcgcgatgggcgtgggagcgggggctgcccaaagatgggctggggttggaggaagtggcccggtagccgctgtgtgtcctgaggccgtaaggcgcctgaccccacccctgaagctggcgacggagcagggcctgttttctctacactatagtgtaggttccagagacctgggcctgagctctccgcattggtacttcatgggtcgtctggattgtgccggacctgtgaccctgccgttgttttctttccagcatgatccgctgggcccccagcgcatctcctggaagagcccactcaccctggacgagctcttcggtagcctcagaccgtccttgaagaggatgactgagacattatgggccacgcgctgtgtgtctgctctcggggaactgtcatcattgacaataagcgctacctcttcatccagaaactgggggaggggtgagtgtttggaagtcagttaactagtcctcaagtttatgatcattgaaggacagcggtgtgcatatgcttggggcacaagggttttatccctatccctgtcctctctcacctgacagaacctagctacacagtatcaagaaggtggattctggagccaggcctgctaaatccacctcgtgtgaccttgataaaccatgtttttttcatcagcttaatggagatgattattatccctcactgatggagttgtgaggattaaatgagataatgtgtataaaatgtctcacccaatgcggggttgacaagtacttgataagtgttggctattatttatttagcatctgtcaagtgcagaggtctctattacgaccataggacctcaaagatttctatatctctgctcctgaggagctcacggtgtaatattcttcagatttctcttagagccacatcttgggaaggtttctgctaaatgggaaggacaccccactccccaccaggaaatttctctaggtccaagccatgtgggagatgaccatggccctttattgacccctttggcccacagtgggttcagctatgtggacctagtggaagggttacatgatggacacttctacgccctgaagcgaatcctgtgtcaygagcagcaggaccgggaggaggcccagcgagaagccgacatgcatcgcctcttcaatcaccccaacatccttcgcctcgtggcttactgtctgagggaacggggtgctaagcatgaggcctggctgctgctaccattcttcaaggtcagaaagactcctggttatggagggggttgcagcagagccacctactcaagggctgtgtgagcagtccagcatgttaggaagcagggaccatgtcctgggtttggccactttagattttgagtttgaggtgtgtatcatgaaagggctgataggctttgacatagggaagggatcaggcctaaggagcagaggctccaaaaacatctccaactgtagggaaacttgtgttgcagagaggtacgctgtggaatgagatagaaaggctgaaggacaaaggcaacttcctgaccgaggatcaaatcctttggctgctgctggggatctgcagaggccttgaggccattcatgccaagggttatgcccacaggtcagtgggaggaccctgtgtgcttgctggggcccagaggaagagcctcaccaggagacatgggaggtctctgttctcccaagaaacagcctgtatgattcttttgcttgctgggattccagccttcctgtccagagatgctcataggtcacttctacttctctacagagacttgaagcccaccaatatattgcttggagatgaggggcagccagttttaatggacttgggttccatgaatcaagcatgcatccatgtggagggctcccgccaggctctgaccctgcaggtaaaagagtctccaggttccttttctcacctgttccccattcccaccccttctggtgcatgtcccagtttggtcacatgaccatgacctgtgccccacttttgagctctgggatcactgttccaggactgggcagcccagcggtgcaccatctcctaccgagccccagagctcttctctgtgcagagtcactgtgtcatcgrtgagcggactgatgtctgggtgaggagcatrtgggtgggtatctgggtagggagggctgtggctctgtacccaccgtggagtagagtaggttgttggtttctgttgcatggggcgccaggaaccacaatatgtccccatccacttcaacttccttcctgggaaatgtcactgatactgtacccagttgtaccggatgtggtataatctgtgcccctgaacaaggtgagtacagctcagtgtcagtagtgaaggcactggctaagcaggggctaagctaaacaggggctgcggaggcctccagctgactggcagtttctctggaccctggtggtgccatgtggctgaggtcagcgtattctttttagcttatggagtctccttttaccacagaagtaaagggagagatgtcacctccactggtccccttctagggactaatcaagttatgctcagtccctaggctgcgtgctatatgccatgatgtttggggaaggcccttatgacatggtgttccaaaagggtgacagtgtggcccttgctgtgcagaaccaactcagcatcccacaaagccccaggtgagtgagcaacgaatagggcatcaagtgtttcagactcccccctggtattagctgagttgacagataggtgtcatccggtcaccctgggctcctccctccacaggcattcttcagcattgyggcagctcctgaactcgatgatgaccgtggacccgcatcagcgtcctcacattcctctcctcctcagtcagctggaggcgctkcagcccccagctcctggccaacatactacccaaatctgaaaaagcagcatgttgagaagatggccccttgtgccttggaaagaggttcccatccctcattggaatcaccacccattccatccaggacttctcttacacttgrgggtagcggggtcaggacaatcatctcagtcctgcatcttttcttctgctttcttccctccaagagcaaaacctgggcaaggggacttactgagtgggggtgggtgggggttgggaaaagggaaactggtgggatatggaacatggctctgagcaggactgttgagctcacatagtgttctgactccaaatctgggagcaggagaatgtgtaaacaagaataaagtggaagcaggttggtgtagatcttagtctcagtgttcctggagtgagagaagaggtgcaaggggcccaaagtcaggttgccatttcaggcgaactgcctgggaaggaggaatggtgcaragtcggcaatggtgtgacttcattctacaggaggttggttagcagtggacagttctagcttgtcttagatcaaaacttaaagctgcttgggctcaagctggcatctgcctgtgtcaagaactagggccccctaaaaacactcaactagttctttccttccttcactcctggggtgagtagcttagtcaaagctgcctagccggtttgctaggcaagggcctctgggtggagacacctgaggaagctttgagacaggtagattacaggtctcccatcctcagcctaggggcgaggggagtggaggtggcagcggcagctgttttggcctgtgtctccctgatcgttcaagctcatacatggttaatgattaatgaggcagtgtggtgtggcagtatccagctgccacttcctgcctactctgctgagtaaacaggggccctgtcttagctgggcttcaaacctgttccctagggaagggctctgttccctgaatcaccagggaggaaaggcaagggcagggttggcatctcctgctcttttgtgatccaagcctcctcccccgaaccatgtctaccccacagtatgacatcagcatggggcctggggctcctgttagcaaagttgaagctttccccagggccctagcaggagtctcccactagctagcacagaggctgaggccagaaagaaatcacaaacagaggggagatgacctgacttttaatggcacagccccagctccagcaaagcagcaagacaggaagctatgcaaagctgctcagaggtgcagtggcacaaacaactctaggagatcgcctgtgttccctcccatcccccaagcttatgacgtggctccatgcccaggaactctgggccagcccagccccactcccaaaccctcataatgcacagaggagcctgggccaagccttgcttccagagttggtaaatgtagaggcagcaggaagaacagggtagcagtctaactttcaaagacagaaaccactggattatactcctacttggaaaggagctgaagactcatccttcaacagtttgtgcctggattttggtcctcatttcctccctatactgagtaaccctaggacttcaatttaaagtccctggggttatgcttcctgggcctggcaagaacccctttgcaggtctcaccttcagcgatggaagggataagggtcatgaacagcaaacagagcagcagcagcatgaaggggaaggcagcagaagctcaagcactcagagggaacaagaaaccgtgcaaggaaactgtttatttcgaaaggattttgcaataaacatagtgaataggctccaggcagctgctttattcttctccctcatcytcgtcctcataggagtcgatgcccacctcctcataatccttctcmagggcagccatatcctcacgggcctcggagaactcaccctcctccatgccctcacccacataccagtgcacaaacgccctcttggcatacatcaggtcgaacttgtggtccagg

SEQ ID NO: 93260 - DNA, 49243 bp, Homo sapiens
caaagctgccttaagtggggaaatttgcatctgtagagaatctcatgcatgctgccaggcccttcccctcccccacctttctattctttccccagacccaagagcgattgggactctcacaccctttaccatctattctctccaagggaggcttcatccacataacaaggacatctttgctagtccagcttcttttcccctcttataatctgttttactagaatctaagctcctgttctttctgtaacctcaaaatggtatgtaagattctgtaactcatggggaagctgggccttcattctgaaggctcccgtgtatgcacattaaatttgtatgccttttctcctattaagaagaagatagcacatagaaataggaaaagatgccccaagacagaacataacaaaggaaaatcaggggcgtcgggagttgtggtcacccagcgtgccaggatggaagggcagggggataaaggggaagctgtgcgttcagcaccgcggacagcgacctgccttccctgctgtctcagcagccttgggaatgggtatcagagggctgagatttggagatctgctagattaagcttactgaagaagagcctcttcaggacaaagtgctatccagccccttcttatgccccttcttatgcagcggtgaggttttctctattcaaaggctcaggccttgatggacattttcggctcatgagaagttactgctttctgctctttaaggatatcttgtcaaaaaacaattggtcatagatgtttgggtatatttttgagctttctattctgttccatttatttacatgtttatgcttatgtcagttacatattgttttgatttacagtgttaaggtaagtagctttataataagtctttaaatcaggtagtgtgagccctcaaactttgctattctttttaaaaattattttgcccattctaggttctttttcttcttatttatttatttatttatttatttatttattttgagatggagtctcgctctgtcgcccaggctggagtgcagtggcacaatctcggctcactgcaatctccacctcccgggttcacgccattctcttgtctcagcctccccagtagctgggactacaggcacccgccaccgtgcccggctaattttttgtatttttagtagagacggggtttcaccgtcttagccaggatggtctcgatctcctgatctcatgatccgcccgccttggcctcccaaagtgctgggattacaggcgtgagccaccgcgcctggcctatttttctatataaattttagagtcagcttgtcaatttcaacagcagagtccagtgggattttacctggaattgcactgactctatagataaatgtgaggaggccaggcacggtggctcacgcttgtaatcccagcactttgggaggctgaggcaggcagatcacgaggtcaggagtttgagactagcctggccagcatggtgaaaccctgtctctactaaaaacaatacaaaaaaatgagccgggcatggtgatgcatgcctgtaatcccagctagtcagcaggctgaggcaggagaattgcttgaacccaggaggcagaggttgcagtgagccaagatcgcgccactgcactccagcctgggcgacagagtgagactctgtctcaaacaaacaaacaaaaaaaagtgagaatgggcagaatgggcaccttaacaatgctgaatccattaacagggtataattctccatttctttaagttttaaaacatttctctcactcatgttttgtaggttttgctacacaaatcttgtgcatattttcctacatatattataagtatttaatagttttcaatgctattaaaaatggtatttttgaaactgcaattcccaattgttggttgctagtatgtataaataggattgtttttatttgttggccttgtatcctatgaccttgctaaactcacttattagttctagcagcctttttgcaaattcctagggattttctgttaataaaggtttttctttaggtttctattctgaaaaaaagttaaatgtatagaaaagtttactgcaattgcggtaggcagaataacagtcctccaaagatgtccacattccagtcctgggagcctgtgaatatgttatattatatgtcaaagtcaaactaaggttgtagatgaaattaaggttgctgatcagctgatcttaaaatagggagattatcttggattattgggtgggtacaatgtaatcacaagggtccttaaaagtggaggacggagacagaagaagagtcaatgtaagagcgatatggccaagcgcagtgggtcatgcctgtaatcccagcacttcgggagttcgaggcaggtggatcaactgaggtcgggagttcaagaccagctgcaccaacatggagaaaccctgtctctaataaaaatacaaaattagtcgggcgtggtagtgcatgcctataatcccagctactcaggaggctgaggcaggagaattgcttgaacctgggaggcggaggttgcagtgatccgagatcgtgccactgtactccagcctgggcaacaagagtgaaactttgtctcaaataaacaagtaaacaaaaagagtgatacgatgtgagaaagactgtgtctgccattttgaagatggaaagagaccatgagctagagaatgtgggtggcttctagaagctaaagaaagcaaggaaataggttctcccctggatcctccagaaaggaatgctagccctgctgacaccttccttttggtctagtggtaccagcatcagacttctgacttacagagctgagtttgtggtaattcattatagcaaaatagaaaatgactacataatgaacatatatcatcacctacattcaccaattgtggcttttcccacattttctttctcgctctcaatgtgtatacatacatgtgcttgcattagggttataattgtggttttatttttgtaaaaccatttgaaagtaagtggcagacatcatgattcttcacccccaaatacttccacatgtacctctgaggcaaatggacatttttacataaccacagtgcagttttcaaatttaggaaatttaaaatagaatatcatctaatctagagtctatattcaaatattgcaaattatctcattaatgtccattatggcttttttttttcagacggagtctttttctgtcacccaggctggagtgcagtggtgcaatctcagcccactgaaacttccatctcccaggttcaagcaatcctcctgcctcagcctcctgagtagctgggattatggtgcgtgtcaccactcccagctaattttgaccagacctcacttacaaaacaaacccaaagataaatgcaacaatttcaagatagtgaccacagaccattaaattccaaagtgtggggcccttctgagcacagaaccctgtgtgactcccctggttgcgtatccgtgaagcaaggcctgcatctatgtccatgtctgtacttttatctatgtctatatcttcatgtaaccgccactaagagcaagctatgatgtttccaacactatggagggtaggtaaccttgagtctgctcccagtcaaccctctttccaatgccccaggttaagactattctcacctctatcactatagatcagttttgcttggttttgactgtatataaatagaatcatatgacataccattttttgtgcttgacttagtttgttcatcattttgactgtgacattcttctcagttacattccttttttaaaaaaattactgtattccattgtatgaatatatcgcaatttatctattctactgttgggtacgtgggttttttcccatttttgtctaacatgctcaaattgtttccgatttgacctatgataatactttcatgttataccctgtgtccttctgacctattcccaacatttttgaacttgcaggagttcaagactcaacaagacgttttaggctcatcttgtactttccttgccctggagttggctttttctccaagaaaccccaggttcatttggtgagggaagtatttagcaaagatctgggcagtgggtatgcctagtattattgagatatcactgcctaaaggcttttccagcaaatataagaaataggaattttaaaatatcataaactcatgtcaatacctccaattccaatccaataccatagagttcttctctgccttctcgcattccccacttacattttccttctcccacagtgagaaccctcacctgaaacatcaggatattcattcattcactcaatccctctagcttttggctagatgcccttttgccattggcctaattattctgaataaaggctgggtgctcggaatgtcctctttcttttttggaaagacatctacaagcttcccaagtcaggattaattgctgtttcctctctctgtctgctatgtacacatggcctgcgcttctcagcccatgtgtatgtctttggtgtcagaatgcacgtgtctcactctacagtaagaaggagagagtaggaataggtcccgtccagccactctgctccagattcttgttggtgtaaactccttccatcctcctggctacactacttagaggtaggaatcattcttttcctttacacagctgatgatgctcggctgcagagaatgagagcaggctgtgttgttttcatctttgtgcttccccaggcatgttagtaggtgcttcatatatgtctgttgagtgcatgactggcaaggggttgcactgagatctctagaactcggttgctctcaaattatagtttgcacaagaagtgccttactaaatgtatatttttgtaatttttctccatagatctggggtcctggaatttgcaatccaacactcccctcccctactcatgggatattaagaagcactttttggctgggcgaggtggttcacacctgtaatcccagcactttgggaggccaaggtgggcagatcacgaggtcaggagattgagaccatcctggctaacacgatgaaaccccgtctctactaaaacaaacaaacaaaaaatacaaaaaattagccaggcatggtggcatgtgcctgtagtcccagctactcgggaggctgagccaggagaatggcgtaaaccckggaggtggagcttgcagtgagctgagatcgcgcccctgcactccagcctgggcgacacagcgagactccatctcaaaaaaaaaaaaaaaaaaaaaagcaaaaaaaaagcactttgtttttttggctggactaggtggcccatactttttttttgttgttgttagaagatctcgtcctgttgcccagactggagtgcagtggtgcaagctcacagctcactgctaatttttttttttgtatgtttgtagagatgcggtttcaccatttacccaggttggtctcgaactcttgacctcaggagatccgcccgtgctcgacctctcaaagtgctgagattacaggcgtgatccaccgcgcctggcgaagacgcatatttttaataggacctaatatttacctgaaattatcttggttatttaccaatgtaagctccaacagggccaggcttctgcttgcttctaccctgacgcgtgtcggggccctggcccagtgcctggcacagatcagcagcgcgctaagcacgtgttgaatggacgactacctttcagggccttccagccagggtayctcatgcgtctgtgttgagcgcttgctgagtgacagaagctatgagcggaatgaacgcacgcacgactgaggaggctgcagaccgcgggccagggtctctgtcagccccggcagcgggtgggtgaccccggccgggggcggggcggggaggacgcggctccgcggcgccatgacgtcacgcccgtgcagcgccgcggccgcgtgccgggcggcgccatgacgtcatacccgcggagcctccgccgcgcgtcggcggcgccatgacgtcacgcctgcggagctgccgccgcgcgccggtggggcgcgagcgtgtgcggggcgcgggcgcgggcgcgggcgcgggcgcgtgcgggctgcgagccgggaggcggcggcggcgacggcgacggcggcggcatggcggagagcgaggccgagacccccagcaccccgggggagttcgagagcaagtacttcgagttccatggcgtgcggctgccgcccttctgccgcgggaagatggaggagatcgccaacttcccggtgcggcccagcgacgtgtggatcgtcacctaccccaagtccggtgagccccgcgccgaccgcgcccgccacgccatgccccagccctgcagcgcggccgsgtagacgccgcgcccgcgcccggggcttctgctgggccgggtggtcgcccttggcctccgcccctgccgtgcccaccgctctcccgatgctcggatccctgcggggcggggtggggtggggtgggggtgggaaggggcttggttctcatctggggaaaccaaggtcagagaccttcgggagcggccccttccgtggagatggagcctatttggccggcgctgcaggaggatgggcccagggccgccacccatccctgcttctccctttacctgkctggctgtgtgaccttggacaggtcactcaacctctctgttcctgaatcctgcccaacctttgatgagtgcaaagtcctggtgttcacctgggaagggagataacatgggcgtcagggctttcagcgtggaaacgtaacgtccctcctttccagcctgggctccgggtgggggatgggaccagtcccygcctggagtgccttgcttgtacattctcttgtttcagggctgcctccatcaccgaggcaggacctggggcattcacatttcccagcattagctgacgtcactttcacaataacagctgtgtgagctagtggtggtcattcccactttacagtctaggcacagaggctcagagaggggaagaggctggtccaaggtcactcagctggtgagtggctgacctgggaattaaagctaggctggtctgtttccagacctgaggtaggagattgtatagtaccccatctgaggtttttagggaaaggaggtagcagctttcctgttctgtaaacrtgccctgggatttccttgttgccactgtatttgaggcaatcacagcgtggtttagaaggtgtctggctctaaggtcacgccggaccagcagtcgggcagtttcaggaaaagctgtaggcttggctgttgtagctgtatggagttccagacacctgagggcaggtctctgacattcttctgaggaagattggagtagggactctcagtggagggtgttggttggagaacagagcgttcgatgggctgctatcttgagcacatgccagtcgccgcatggggtgggacctaaaatgctttaggaatggctaagcgtgtcgttggcttctgtggccactcattaagtcctgcgggccaagtgctctatcgctgttaatctgtgagggactcttacacctttttttcagaggctcagagaaggcacaaattgttcggagtcacacagttgctgagggacagaggtcaggtctagctaggtctcccggtccacggccagcctctcccctgccttatgggtgctccgttgcccttggaaaaccgtgagggcccaagaaggagggggacctagccttctttcttggaggctttaaaatgctggaagtctcagccacttagggattttgaggtttgtgtcacttctctgaggcccctccaagtggacttctggtagcccagttcatattttcttttcctttccttccatctgctactggggatggatttgtagcaggcatcagtgcttacacattaagaacctggcttcggagttggaagtcctgggtttgaatgcagttttgcggcttaccagcagagtgaccctgggcagatcatagaatcccattgagctgtggtctctgcggagggagaagagaccacctcggcccgctgatgtgtggctgtgaggatgagcaaaatggcgggtgagaacgcttagcccasgtccagacacacgctggaaaggctcgtggttaatgctgacttttaagccctgaacacctgttgtgcccagatgctttgctaggggctggggaagccgagaggggccccatctggtgcctgtccttagtgagctctcagtctgatgggggagacatggttggtgctggggttggggcaagtagccaggactaacaggtgccccattcacctgccatggcagggaacccacgggcctccttggatttccagtgcccaggtgtaggagatcctaatgaacttgcaggtggtcagagccggaagggcctggtcccttgtcagccccttcccaccctctgctgatggagaaactggggttcaaaggggtggtgggggctttctggtggctaaggcaatgataattagatcctgccttcgcttcctgtccggtattttttcccacaaccccgtgctgcttgctcggattctttttgtgcttgygacrttctagcttagatggcgggttaggactgtgctctccagcgtaggaccctctgcccacaggcggctgcttacatctaatgaattaaaatgaaataaaagtggaaattctgttcctcagtagcatcaccatgtttcaggtgctcagtagccacatggggctagcggctgccgtattgggtggcgcagatatggagtgttcccatcacagctgaaagttctgctgcacagcgccaggtaaaaccgtgatccagacagtaggagcccattgtgtcttctgagaaggacctttctgttgatgaccgactttgttcctattcattcttacagcgtagttggtcctgggacggtggttgtattaaatccgattgtgtctgtgaaaatattttgtccctgtgtgttggtttgatgcaatcactgccactggttttgtcaacaggttgatttgaattgggtgctcgtccccgagggggcacagccccaaagtcatggagcttggrctttgaaatacggtccctggctcagccagagcacccactgccctgagtttattttgcccctggttccggccagtcctgaagtgtgtgcgcattctcactgatgcagacgraagcttctgggcctgggcgtgggtgagccacctggtttctttgaacctcagtttgctcattaaaaatgagaggatttgaccagattgattcatttaagtcttacattttcagacaactcaggggttgaagctgaggggagctgaagctgaggggagactcatggtgtgcaggtcccaggctagatggatgtcctagttttcttggtgtgtatgtcactgtgcctgggagagacaggtttcagaagggctgggcatgaggtgatggtgaccttgtggcacttgcagtgacatgggggaagccagaatcctaacactgaaaagttaactgacaagccagggtggctgttctcagggtcaggtaaatggcctggtaatgagggttctgaagaggaggatctcgggagactgcatggaggaggagacaggttgggtggattacccattacagatgctgttttgccctccacccactttgattctcaggacggccctgtgctcttgtgattatttcctttttatagatgtgaaaatgagggcytagggaggacaaagggctggggtagtggcagcaccgagtgtagatcctggagagaaaccacccacaggagggggtaagagaggcgtgggggtgggagctagcacctgccagcgcttcctgggttaccagtttgttctgagatgagggagcatgcggagccctttgagctttaccacacagggtaacaaagtgttccacagcagtgtggtgagttacctgcgtcctatgagggaatgcagaggcctgaagaatggaacgtgtggttttgtaccagaagaactgagaagttcctctttccccatctttctcctcttgctccctcatcccttcccctttgtcttccggctgttacacatactcaggaggcttgacctggggaaggggctgccaaagcaagtgtcctgggtctgcgggggtcacgtttctccccatcactcaaccgggctgggaggcaaaagcctgcagaatgacttctggaggaagaaggagatggggctgctgggagcacagcctcctgagtagttggccctggttgaacttgtagttggtttgaactcctgggcttaaataatcctcctgccttggcctcccaaagtcctgggattatgggtgtgagccaccatggctggccatagtttcttttgccttggcctcccaaagtgctgggattacaggtgtgagtcacagtgcttggccatagtttcttttctttctttcttkttttttctttctttccttttttttttttttttttgagacaggatcttactctattgcccaggctggagtgcagtgatgcawtcatggctcactgcagcctccacctcctgggctcaagcaatcctcctgcctcagcctcccaagtagctaggactgcaggtgtgcgccaccacacctggctaattttttgtatttttgtagagatagggtctcaccatgttgcctaggctggtcttggactcatgggctcaaatgatcctcttacctcggcctcccaaagtgctgagattacaggygtgagctgctatgccaggccttggcttgtttagcttctgctgaaatgttggcttgttcttttttccactgggtaatgtgcctgttttcctctggctgccttcaatgttttctctttgtctttgattttcagcactttgaatatggtatgtctagggtttttgtatgtgtgtgttaattattctacttgggattcctctaagcctcttggatctgtggtttgatgcttttcattattttggaaaaattctcagccattatcttagaaaatgtttcttttacctcattctttcttcctttgagattccaattacatatatgttagattgtttgatgttgtcctccagctcttggatgttgtattctgttttctgttttcttccctcttttttctttcctttttttttttttttttttgagacaggatctcactgtgctgctcagactggcctagaattcctgggcttaagcagtcctctttcctcagcctcctgagtagctgggtctgcaggcatactgctgcacctggcttctttctttttctctttttgttccagtttgggtaatctctgtggaccratctgtggctaactgctcctttcttctgctgtgtcaagtctgctgatgagctgtcagaagcattcaatgtttctgttatgtttttttccctctagcatttccacttagagtttccatttctctgctgaaataatcccatctattcatgtgtgttgtccatcttttccttgggaacctttaacatgttaatcagacttcttaaaaattccatgagtctaattctgttgattgctttgtctcttgacagttttgtttgtgtgtgtrcgcgtgtgccttttttgtgaatagtaccttttgactgctcaacacagcatattagatagtagagactaaggtcagccatatttatgcttgcaaatgaggccggcttttcaactgctaggccattagtataaggaattgagttaaccccgcctcgttggtctggtttgggttcgggtgttgatctgattaccttgagtgaccactggtttcatattattgtagtgttagcttgcgttcagtggaggggctgagtttccagaggttttttctcagtgttcctgctccacctccaccttttggtcttcctcgtaggtctgaaccttggaggagttttgtctgcacactcttgcccctgtgccagtgatcgactctgctgttatctgttactttggtttagtagcttggtagggagggtttggggttctctgttgtgttgtctagctgcagtcttctgcaggctccatgttgctgggtctgggtagggctttttcattgatcctgccctcctctgagtggcagccaaactgcctggatggtaactcttgtgcaggagtttcatgtcccttctgtagcactgagaatctctagtagtcagggcccagggacagtttcctgcccctcccccaagggcagagtcttggtttttccttttgcccatctccagccacattgggtcttcaccagtgccctgggaggtgacacggtttgctgcccctctctcagtgacttaaagccttttttctgtaagggagaagggtacaagtaggatgtttttcttttcctacagccatgatactgaggaaggctctctccaaagcatgctgcccccaactctttctcctgagcacctggcckaggtctggagaagagcctgtgtttgggtgtgaactctgctcagtgtgagattctctggcttctctggcttcagaggttctgtgctgtcacatgggctcacccttggcttttaccagcrtggaaacattttacctgaattcctctcgccacctgcatgggctggcttctcttcctccagggccctgtctcaagtgagctggtgcttgcctcctgccactctgtggaagggcccatcttggttgagtgaaactaggatcttgtattttatctgacctctccctgttagtgtgggggcagctctttccagtgtcctgcatctagrgggaagtggccctagtggtccctcctgatctccgaccactagatcaggtggtgggcatgtctgtagctcctgggatgtgggacaggatgttgcacagtgtgactgtgttatggttagcagggagcgggctcctagcgtgggcttctggagggagygagaggagagtggagggcccattgagaggtggaagcctccctaaagcatgctttggagacttgctggcattttctggaagctaaaccagtcattttgtgggggctggtgagccagaggccctggcttgggcttcaggacttggctcagcttgaaatgagccagactytcctgggacctgttgaccccaccagcggcaggggcattggactaggtggttggcatttgtcctgctcaagcctcagaacaaccagggaggaaagcgggtttcctgtctttgtgccaagtactttgttttatcctccycatcctcacaactttgccatgaaataggccattttttgggtaaggaaccaagaccctgagaagaaactggcctaggccagcccaactctgcaggtggcatctccctgcgctgccacctccttccaatgggcctggctttgggtggtgccagccccggggtcatgagtggggtcagtgcctcgtccactgtgactgtccgcaccatcgtcgctgctgctgatgcctggagggtgctctgtggggaattacattgagttcatcactgtcctcaccttccagatgaggaacccacatagaggggcagatcttgtccagtgtcccgtcgtctggaggcagccgagctggtttccaaatcaggcctctcagatccagagtcctcatgactgtcgcctctctcagggcctgcccaggcatgtgagcgggtgtgctttcgtactagagagtgggcctccgctagtcaggtgggaggtggtctcagaaggcaaggggggaagaagccaggaaaggggttcctctgtggaaccctggggctcagcctgccaggatcccttgagagacracatgaacacagccaggagccttctttggcgtgtggggggcaggtgccaactcttgtccyttagtggttgggtgtggctcagggcgtcggctccctgcacttctgggcctgttcctctgtggccaggtgggaagcaggtgcaggtgcttgaggtcagaagccctcaccagcgctgcaggtgacctctagggcagctgaggggtgtaggtgggcactggtaggctctgctggaggaggggaccagttataaagacttaggtctgaattttgattttgggcaaggccctgattctttcccagctggtcttggccagactgtcccccgtgtgtgcagattgactagatccctgcttcgggctgggcttggcrggggcagctgtgctccaggcacctctttttctcttcctgggactagcagcctagcctgggccaatggccttctcttggcgacagtggaagtgcagaagaataagcagagacatgcaaaggtctctgttggccatgtcacatggtcgtgcccagagtcagagcaggacctttatgaggggccgtgaagtcccgcrgcaaagatgtgcatggggcatgtgttggggtcattgccctgtctgccattgttgtccgcaccatcatcaccactactgatgtcatgagagtgctacatgagggcaaaccaccactgatgtcttgagagtgctacatgagggcaaactggggcccttaatgcygcacaccagagcctcctttccccaaagcttcttacaactagtttctccctcatccttaaggtcccattgcaaaggctgtttttttacaaaagccttccctgactttctctcacacaagggcggagcstcttccccttgaggcagagcttctgccccctggggcggagcctcttctccctggggtggagccacgctctgcttgctgtgccagctctgtctgaaggtgcagcagcctcttggtagcctcttggcagcctcagggttgtatacccggaacagaagagctaaaggcctaggagaagttcactttgaggaaactgaggcccagaggagcggtgactttcaggcctcccagagtcactggcagagctaggctgggaatctggtctccaggtcagagtctcatcagacagaggctggggccaagycagggttgccggakcttcctggactggtcaggcctgactgtggaacccagcatgccacagctgcctggcatcaccccagcaggaggagggaggcacggccagtgactgtgcctgtttccgctctgcatccagcaggggtctggctgtggacgtggcccagagtgggcaggggtggggtggggatggctgcaattcgtttcccagggtyccaggcccagaagtgagctgccactgtcatgggtggaggtcagtcccagcaactgccccatctgtttcacccttgcttgatcgtagctagaaaatggtcagagatttagcccgcaagtgagtacacatgggacgtggccctgtttcgctgctcacttgctttgtgagccttggtgctgtgtgtgtgtagtgtgtgtgggtgtatgtgtgtggtgtgtgtgcatgtgttgtgtgtttgtgtgtggagtgagtgtgagtgcacgtggtctgtgtctggtgtgtgtgtgcgtgctgtgtttggaggagtgtgtgtggtctgtgtgttatgtatgtggtgtgcgtgagtatacatgtgtgtctgtgtgtctgatgggtgtgtaaagcactctgkttctggagcgaaagtttgaggtgctgggttcactgcccactggcctctgtggccctggacattccatccctgaacttgtgtggtcctgtgtgaagctggatggtaatagcagctccagtgaggtgggtgagacccaagggggaagtcgtagcgagctcctgggtctctgtcagcatgtcctcagctggtgctgtgagctgggctccggaagtcttggttccccatctagttgccagccgggtgaccaggaastctacttttcctcttagagcttcccrtcgtgctctgtgtcgagggcattgtgttgagagctgagagacagtgtgcggaagcacagggacaaggactggccgcagcaggcgtttaacagacgtycttcaccttttccttttccttttggaggtggggagcattctcagtgtctgctggggggcagttcccacctggatgggggcaggagctcccaggtcctgggctgttgcctggccctgatgggttgcccctttaaaagttcagctgtgggccaggcgtggtggcttacatttgtaatcccagcactttgggaggctgaggcaggagaattgcttgagcctaggagttcaagaccgtctgggcaacatagggagacccccatctctacaaaaaaaaaacaacaaaaaaaaacctagccaggtgtggtggtgtgtgcctgtggtcccagctacttaggaggctgaggtgggaggatcccttggacccaggagggtgaggctgcagtgagccatgttcagcctgagccacagagagagaccctgcctccaaaaacaaaaaaaagtctagctgttgctgtttctcagggagctgggggattctggcatccctgtggatatcccgggactccagaaccctgtagggggctgtgtttcagtggggcagactgaacacacacgctggtgtctgtttcctcttgaaacctcactaaagtgacaataaagggatagaaagctctgaactcccagagcaggagaggagggcgtggtggattagaaacccagaagatcacaggcagggctgagtgctgtctcactgggcaggcggggagcctgaatgcygcagtcgkgagggtggccaggtgggaacgaattccagcagcccagcccaggaagcagctgaggtggtgtccatgacactggggatggaaactagaggctgtcaccaagacagttttcttcttcggggaccagagaggctgtgatgtgagggtcctgtgacagctgaaggctgggacacagggcatgtgggaagtaggatctcccacaggctgcacacttggagggtgggattaccagcccctcctctcctcagctctcaggatgcctgtgacctggttccagtctccaggctggggttggaggcaccctcttttgagaaattgaccccaaagcagagccctgtacctcccaccgaagtgacaggtcctcagctgtgaaagcaccaaggctgctcccccaggcacgtgtgacccccagggctgctcccacggtctctccttcacctgtgagtggactcaagatcaccaggtagcgagtctccaacaggaaggatagagatctgcagagacaaaacacaaagcagaaaaaagaactccgagaaagcaaagaccatgtgaggagcagaagaaaacctaaaaacccagaataacaccacctccactcataagtctttgcagtatcctctgagcgtcaagacacgtgttgctttcactaaaggaaccagcagtgaagactggaataacgagtgatcatcaaagactcctggagatgaaaagtgtgatggtggaggttttaattgcacagttgtgaggtttgggttgtcaggctgagaaaatagcccaggaagtagaataaaaatttttacaaaatggtgacaaacaagagcaaaaatataagaaaaatggaagattaatcctggagttccagaaagggaacagagtacggaagagagaaaattattgaagctagattttcagaatgttcagagctcaataaaagacacccccaacccttgccaactgtctggcctagtgaatgagtaaactggggcaaagggaagatctcaaagctcccacagagagaaaaatggkcccccaggatctcagcrgcaccatcggcagtgagaagacaggatgacggaaagcgatctccagcctgggcttctgtacccgaccagactgtccctcacatgggaggtggatgtggacgtttgcagtcacctcagtctcacatgcccaggaagcagcccgggcacctgcagtcaggggacgtggagaaaggaccagtgcacccaaggtagggggaggtccaggaagatcctgtgcagccatgccaggccgttcactcagatgagggagggagagcagagggracaggggcatgtccccaagcagcaaacaggatcgagcgaacacccacccatgtctctggccacgttgaggcttgttagagttgtggaaggaatgattaatagcaatatagaaaatgaaataagcaaactaaggcagttacctactctgggaaaagtgaaatagaatacagaagaggaaatgtaatcactacatggtgtactttgcattaaacaccaaattaagccttgaattaaatccaaaatcgtgctgcgactgtatcggcaggagggaagcttgtgagtaagggaacttggctaagtcctcatctttcgtagtcgaaaatcattagcccatctaaaatgtrcagatcataaaataatgatatcagyacactttttggaaatttgagggtaaaaataatctaccaaaggtctccttccggggagtgggattagaggaggagagaaccgtgggtctttgtgccttacaggactgactttttcaactaggtgcaggtgaagccagacatttcccgactgcttcgcaggcgggagctggagtacacgagtgctggagtcagctggctgctctggcactggcaggggtggactccactcactcaaacctccttcgttccaccctccagggagggagcacgcaggtgagcgaggcaggaacaaactttgtaccagccccgcagcagcacctggggttcagaggaagttttccagtgctcttttaacccagctgtcggggcttaagtgttaccagctcagtgggcccctctgccttttcatgtgaggcggctgccttctgccagcgagggttaagggtcagtgtgacagccttttgcacctgcactcgtggcacccgagttcttgtctggcatccaggaggaatgaggctgcatgaacgaattgaagatggtaaatgtgggggattttattgctgatgaaagtggctctcagcgggaaggggagctgaaaatgggactgagtgggaaggttatcttcccctggagtctggccatccctggccagactctccgaagctacaccatgagcctgttcctctgaagtcacactgcttctgtccgatgtccaaccgtagtctctgacgtccagttactttttctctctctgctggctgaattctggggtttttataagcacaggattgggggcagggagtggttttggaagagataacatctgagcgggaaaayggggatgtaagctgtcactttgggtcttggtatcaggccttttggcttgagggtgggacccctgctggggacctgccgtcttctgccccatmtttccctgccccctgtccctatcacaggtgcaactggtgaatcctgtgagtgaaaatcagagggtttcagccacagggtcctagtggtttccaggccrttctgatcagttctgatgctttctgtgagttctggtgggaattttgatgggctctgtgcccggtgttgagamaggccatgccctagagtcctggrgagttccaccccagaacagcagtggcctcccacaggcctcgacccaagtccaggtgtcactgtgcactgctcgctgctgcagggggtattgatcggtttgccactcagaagtgattgcagtggtgtcagcagaagcacttctgtgaattactgcttccagccgacttgcgaagagctgctggagagcgtttggctcgagtcactggccagcaggtggctctgccctgttggctcccctggtttctgtttgaaagcttgactcttccccactcagggtggatctactggggcctgggctggcttccagctgcccagctgtgatgaggaagattggtgccctcccaggcccccacctcggcagcggygtatttgccctcactgctctgcaaggggcccagtgtggccacagccccatgccccctgtttgtcccacagcaacatgacaggcctcactaggactcctccacctctcactcctgccttggccccacctggccctgctgggaagcgactccagctccaggcgtggcccccacttcccagtgccttgtttccctgtcagtaagggcagtgcttgtggaccctcctgctcgaggctagtggagggaaccacagggttggctgtgggcattgctttgcctgctccaggtgtgtggcttcatcggtaggtcccaggagggtcckgtcctgtgctgtggatgagggttgccaggtttgctgtgagactgtggcgtgtccttgcacgggagcaggccctgttgctggtgccccatcttgatttcagttgctgagttgacatttgtttatattgattctctttgggcctcagcaggtcactttgtggcccttctgcgtgtcatctcctttgaccccagcagcyctgtgaagaagggaggggcatcaccacctccattttctggaaggtggcagggatggtgtcattcctgggactcctgggccagcctggagcctggcacatagtgagcyctctgctgagtgaataaaaggctcgctgggtgggtgggggtacctgtgctggggtcagagcgccaggcaggaattaggagggtggtggcaaggcgggtggaggggagagcagcagaagaggattctccctcagtctccagaaaggggcgcagccctgcccacacctcgactttgggacttctggcctccagaactgtgagagaatacgtttcttttgttttaagscaccacgttttgggtgatctccagcagcaccccaggaaactaaaacagtgactaagaccagttccctgccctcacagggcttgccccagccaggcacagcgtgacagtgtgctaggacagtgtccagggctctgtgggaccaggcaggggcacctgatcgagaggcgtgttgttagggagggcttcctgcgagcagtgacccacagagcaagcccaagctggccaggcagagggcagcctgttgaaggctttgggccactggggcgctgggcttggaagggggtgggaggctggccagagaagrgggggtgggtggagggctggcagggccacatcactgggacctcaggagcccctgggtgcagatggccacagcaagggtgggtggaggggctgtgcagggctcatgcccatgcccaagggcaccaccaggagcatggagagagaccagtgggaggagtgctgggtgccacagcttggcgtctggcagagggccttgcagagctagggctgtcttcaaagctgggtttgatctttggttccaagtgcttagaagtgtgcctggaatggggtaagtgaccagatagtataatgaccatttttctttgatcatgttatcacatcttgccagctggctttatgccctaggaaggccggggcctgttccctgcgtgtttcgtggtgtgtgttctcggtgcccctccctccctgatgcccacgttgacctgctgttgaattctcctggaagctggaaaacgtaaggtcaggaggtgttcaaccaggaaattgatgtggcaggctggagagaagggccacggggacagggccgggtggacctgacgagtcaagagcttcctttggctgatattctggcataaatatttaatgggggtgaggacgggacttgtggaactgaagtggccgatattgatgtaagaagactttaacgtgcagagaaggtctgtctgggtcgttggcctgcggggctgcacgggtggggaacgtgaaaaataggtgatgaaaatgtcactgggagaggcccatttcagggacgctgcccacagtctgatttctaaggacaaagaccccctcactgcagctgtcctgagctgctgggtggatggtcctcaccaggaggaacaggcaaggcagccacaccctggttctataacccttggcacattttggccttagcctcgtctgccatgaggatggtggtacttcctactcaggttggtgggagagtccatgggctgagaagttctttgtgtgtattgaaaagagcttgttttccatcaccaagccagaccacttccttccttcagtgcctttgctccaaagctccctcctccaggaagtcttccttgatcaacacatccccttctgattactcagtgtctatgcagcaaccagcgtttgtcggtccactcaggaaatatgaattgagcatggccacatgctggctctcctggtgcagcaaagaacaagacaaaacagcctctgtccttaaggtggaaagaggagagagcatgtaaaagaatttgcaggctttttctgggcaggtagatagcacattggaatcgcatgacagggcgagggacgggagttagtcccacagctagtgaaggagactgtgctgactgagcggcatctgagcaggcgcagggaggagtcagggagtgaggaggctccaggcagggacaccartgtcggcagcctggggaagggccggttgggctcagaggctggagggagctcaggggagagccaggtggtgagggagtggaacatggtgaaggccttgcgttgactctgtgggaggcagagctgcctgacggcggcagtggacagtggtggagtctgacttccatgttaaagccacagttttggccgctgggttgaaaacaggtagaatagtggtccccaacctttttggcaccagggagtggttttgcggaagacagtttttccatggacccaggtggtgggtgatggggatggtttcaggatgaaactgctccacctcagatcatcggggtttagttagattctcatgaggaccacatagcccagatccctcgcaggtgcagttcacaatagagtttgtgctcctatgagaatctcgtgttcccgctgatctgacaggaggcagagctcaggctggaatgctttcccgcccagtgctcgcctcctcctgtgyrtctcggttcggaacaggccacagacccgtggcctgggggttggggacccctggactagaaggcagagtgagctgggtggcagcagagagccagggaggagccctcgtaggaagcagttcaggtgtgaggacgcagtgtcacagggggagggtcagctctggacacacccgayggcagggtcggcggggctcactgaggcaaggacagaggagaggagccgggtgagccacagtgaggccaccatccggcctgagcctctgtcagctggaggggctgcttgctgagacgggctgcggrtgctgcggaggagacagccttggatgctgcccccagagctggctgggtcccactgaggcgctgggcagcgggtgaggtactggagttggtgggcatgtgccccggaggctgatgtgtggaggggtggacctgggtttggcctgggggcaggggaccagggctgcactccgggctgtcaccacgttcagggcggggagatgaggagccagtggcagaaactggagccgccgatatgaagggaccacagtgggttaagctgtgcccgtttcttctgggaggtcagacaaggtgatgactgagratcactggggacctggagctgtttttgggcctgggaatagaggctggagaaggcgcagagggccgcctttctccctgggagttacctttggtcccggcacacttctggttgggtgtcctgcctggccctagggtcctcgaatgggactctgcactcaaggcaccagtgcatgtggtcagccccatgtgtggtccaggcggggccccgcttcctcctgcctgcaccaggtgtggagccggtcacagtgcctgctcccctgggccgtagcagggaggagagggcctgtcccrtgcatcccagggtgtgcactgcaggtgatcccggccatcagaaaaggccgacttgaaggggcaggggctctgagacagctgtgcctaggctgaggctgggaggagcatacaggcagagcggagagtgctgtggttggccctgcccaggagggtgcagcctggaccccgcaccaggtgtgcagagctcagagggcctcagtaaatgattgaatgcctgggcctgagtgtgtgaacattgggaagctacggaagggttttgggctggaggccgtcggacctgagtgcgaaatgtgctgtttgtcctagagggacggttcccagacccaggcaggaggcctggctcagccgcgtggctgatttgtgaggagggagaattggtccataggtctctagccctgtgggcagctgtggtcctgtgagtgagtgccagggtgtcctcagcacacacgagctcccccgcaggcctctccctgcctttaatggcacggcacgctgggcttgcccaggctcttcccgttggccrcatctccccacagtcttaggagaggaggttatgctgaccaggccactggcgggcggaggtgatttgtctctttttaattgaattatatcttacatgtgcgtatcagttggagaaaagccctcaaaccgcttttcctctgctctcacacaagagtcaacacagaggcctcctgtggcggacaggctggggatttctccccgccagcaagcaggcactcagtcctgcagcagcaccagctggatgtcccccagtccagttcaattccagcactgcccacctggagacagcacgagatcccacggggcgaggtctcagtcccacaagactgcccccagttctgatgccaaccacaagccccaggttgttttgcctgtgtgtctcacccactggctataaattggggttcgcacamcctccctgcccacgtttgactaatttgccagagcggctcacagaactcagggcaacactgacatttcctggtttattataaaggatgttacaaaggcttctgatgaataccagaggaagagacgtctgtggaggatggaggagggtacggagcttccatgccctctctgggcaagccaccctccaggaacccccatgtgttcagctctttggaagctcctcaaagcctgtcctcttgggccttttatggarccctcattggctaggcatggtggaagcatgtagaaatgggactggacaaaagggctgtgagcccaacactgtcagtcggagtggggagcccaggaaggcctgcctgtgcgacattccttcctccccttctgaactgggggtctcatgacccacacagtcagaaaaggcaggtcagagaatttttctttttgttttttgagatagattctcactctgttgcccaggctggagtgcagtggtgcagtcacagctcactgcagcctctacctcctgggttcaagcgatcctctcacctaagcctcytgagtagctggcactacagatgtatgccactatgcccagctaatgtttttattttttattttttgtagggacaatgtcttgctatattgcgcaggctggtctcgaacttctggcctcaagcagtcctcccggtttggcctcccatagtgctgggattataggcatgagtaactgtgcccagcccagagagtttcttcatagccagctccaagacagaaaggcgggggaagattcaagtatattttcagtttgtatggcctgccttggggagaaaaaggaacaggtgaaaggggtgggggcaggagaaggtcagagagagagagagagagagagagagagagagagatgctgtttactgagacctgcttctaaggcctggagtggtccaatattatgacaaaagactgtaataagggctggggggataatgagccaggagccatagatggaaaccagcacatatcataatgtagcatgcttccatgtaattcccaccagacccagttaatagctctagaccccggaatcgcctttgtgtcttctctgaatcagtaaccaacccaaaatataaacactgttctcacttctgtcactatagttgagttttgcccatccttgaacctcatgccaatgggacatacaggattgtaccctggagcgccttggggtgggaggactccktcacatcctgtctgtggggcttggccatgctgtgtctgcagttccgtcacatcctatctgtggggcttggccgtgctatgtctgcagttcattcttttttgttgctgtgtagtacmccatggtgactgtcacaacttactcattctattgctgatgggtatttgtgtttccaagtgactttatgaatgatgtggccaagactgttctagaacctgcgtactggtrgacaagcactggcttcccttgggtgtctccccaggatagttcctggatcatgggctatgtgtatatagcttcagtagatactgggcagacgtcatttcctcatcttggctagcgggtcattcccccgacccatcattcctgcgtaaactgccaagttcagcctcaggttgggccgagtcacccacctgttacagcccctgagccacttccataacaggggctgggttctgttctgttctgttctcctaacagccctgtgaagcatcctggcccctctgagaatcagagccgactggcccatgacccagcacgggggattcaggctgagaccgtgcggggcgcgctcctcttcccagactcagtcrccctgggccccacctggggctcttgagccccttcttgggcagcaggtgttgacccgagcacagggccgrgcgcgtgggcctcctctgagcaccccgcgctggggcttctcccctccaggcaccagcttgctgcaggaggtggtctacttggtgagccagggcgctgaccccgatgagatcggcttgatgaacatcgacgagcagctcccggtcctggagtacccacagccgggcctggacatcatcaaggtacccagggccagcagcacctgtcccagcacctctttagggtatttctaccgttacaccctgatgattgacagttgctcctgggggctctgtggattaggggagagcagatagccccagatagccaggggagaagctggcaggcctgagctggcagtgacctggaacccgatgagggcgtgggtgacacatcagcgtcagggagtctgtgaagtggaaaggaagtcaatgcctggggggcacagggctgaggggccatttgtggggagcaggccctggkcctccccctcgctttcccctgggggccctcctctgagggagctgggtaggatgtgtttgcatcaaatatttggtatcaagaatgaataaatgttaccccagagccctgctccccgcacccctcagacacacccacaggcacccccaccccgtccgctgcacctctttagttccagcctcacacctgaatgggccagaactgcagcctccaccacacctgtcctcctccctctggagcagcattccaaaacccagctctgagagtgccatcccaccctgtgtcatgctctgagagtgccatccctccccatggcacaagacccctgtggccctccagggcccctgtctgcaccccagcctctcgggcctgaacggccattttgctctccttgtccgtgcggaaccatctgggagtcgttcygtactgccgtgccgagggccaccgcgttcaaggcactgctcttggcattgggggcagcagtgactgacagcatcaggcccggcctttcagcccaggaagccatagtagctagccagcratcagcgctgggaggggagcagatcagggggggaccagcagtctcctstggggatgtctgaggcaggtcctgaaagaggagaggagcagagggacccgtgagcaaagaccccacggcacgaggggcctggccttccagagcagtaggcaagcctgggggttgcaggcaacggttccgggctctttggcttcatgagggctgggcccattcctagggcagctgggaagacgggctctgagcagagagcacggtgctggctgctttacaggacaaccctggctgctgatgggaaggcccgaggggcaggtggaagcagtgagcgcatcaggccaggttgctgtgcggtccagcgccagcctggcagcacccactggggctggtgcctcctgctgcctctgctgccctccgacgccactccaagcyggggcagtagctcccaggccccctgagcagatcctgtggctgtggctatgatgggtggactccccaggccaaagtcaaggacccttgtctctaccgccagggtccagccggggtgtgctcatgtctccaatctttgtctcaggtgacaagggaggctgtcctggctgggtccgagactctctccaggacaggagaccagggcatgacagccttgcctcctcttgctctgacccctccctactcctggcctcacctttccctctgacccctaccgttctcccctggcccccaccccttccctcgtcctctggtccccctgctcctggccttacccctccctctggcctcacccctccctcttacctgacgctctcctgacccctccgctaccctagacccgcygttccctctgataactccacttcccctgaaccccaccccttccttcctcctctggcccccttccccttggccccactcctccccttggtctcaccctttcctctgacctgcctctccctctgactccacgcaggaactgacctctccccgcctcatcaagagccacctgccctaccgctttctgccctctgacctccacaatggagactccaaggtaagctggcacctcctctgcctcccgagatgagtccccaccaagaggagcccaaggtccctgtgcaatacacatgcaggtccctggcacttacctggccttgggggctgtcttcccaaggagcccacacgtgaagatcccttctgaggtggtcttgggtcatgcgtctctagcattttacccaagtttttaacgacgggttggtttttacctcacagtcaaacatggctgtggccagcctaatccaaagcaggccagcaggcgtgtacctgctttgggccgaattctctttgtttttcaattgcatcaaatgccaaggcctgtggggtttttttgtttgtttgtttttttgtttttgagacggagtcttagtctgtcgcccaggctggagtgcagtggcatggctcactgcaacctctgcctccctggttcaagcgattctcctgcctcagcctcctgagtagctgggactacaggcatgtgccaccacacccggctaatttttctatttttggtagagacagggtttcaccatgttggtcaggctggtcttgaactactgacctcaggtgatctacccacctcggcctcccaaagtgctgggattacagatgcgagccaccgcacccggccagaggcctgtgttcttaccaccaggatcagggttgtaagttttttgtcttctgcagattttaaagtagttctagaggacagaaataaaatgctcaagtaattttcctggccagctctactgcatggacagggcacctttctgctgaaacagcgaagcagcagcacccagcagccgtgcacatgggccccagctggacgctggaagcaggtgttggtttgtgaggtgcaccagcaggttcagggaggctggcctgtgtcrgggcagccctgcctgggagggaaggagacacggactcatcctgctcctgtcacccacaggtcatctatatggctcgcaaccccaaggatctggtggtgtcttattatcagttccaccgctctctgcggaccatgagctaccgaggcacctttcaagaattctgccggaggtttatgaatgataagcgtgagtgttgcagcctggcggcatgttagaaccggagccgtctgttgtcgtggacggcctggcaggtgctgggtgcttccccgacacggtctccagttctgacagtgaccatgtaggtcaggcccgcggtcactttacagatgaagacactgaggccgagggtcgtgaacgtggccgagatcctagagctggtgtgtgtcagagcaggtccatctgaacccagagcccttctcttctaccacactgtcggggtgtctgagaagttccccagttaaaacatccatccttcctacctgggtttcaaacagggagagaatgaaaacagtaaaaatggaggcccaggtatcactactgttagtgatagggcctggagtggagactggagctaagtgtgacaggcatgggcctttggctgaacctcaggcacaggcaagctactggggcagggcacacttgtgcccgctgggaggaggacagccgggctgaacctcaggcacaggcaagcctccggggcagggcacacttgtgcccgcagggaggaggacagccgggccgagagtgccatgtgctgttctctggcttccattccagcccctgaggaggagcgaggctgggttccaccctgccctgctctcaaggaaggcgggaccaggcctcttgtctyggtcccactcgctcccagtccttactctcttgccccgctgggcyacctttcccttgggagtggtggcagagctcctcagtgcagttctgttcctgccttcctgagggggctccccatggccagccatggctttgggaggtcctgggacagaaagtgggcagtgtagggtgtgcaggcagaggagctttgaaatgtgtcataatagctgcactttaattaaatctacactgagactcttccctacccaaggctgaaaatacactttctgttttatttcccaacggaagtgatgctgagccgcattgttcagtgtggcttatcgggggctctgcagggggcttatgtgacaggatgaggatgaatcatgtagcagagatcctggaacgtaatgccctcgagtttaagtggaacttagggcagtggacctagagctgctgccaggcctggttgaaggggacctcttggcggggcggtgcagggcgccacaggctgactctgttgcttgcagtttgaaaacccacgagggcctcaaagccctgggatgattctgtttcctgcccttgagcctctgcttccactgtgcctgctgagaagtggccctgcctgcaaggggtaggaggccccagaccgcaccctgaagccccctgagcctgctctgggccttctgtccagcccctcttcccatggcctcttggccctggcacctgctcttgtggtccaccaggcatttggagcaacccactcatggacttctgaagctgtttcctagggtccagcatggactctgctctctgcagagcatggggacaacacccacattcagaccagcacgtggaagaggctacaaacatcttgctcaggccagagcagttaacagttctcttaatataggcctctccatgtcaccacagtcacagacccatcctccactgagtgcaaggtcccacacacgtgccttggtcccagcaaaccctgtagacaggcccactcagcacccctgtgctccgtccttcattgtcactcagtgagcacgcacatactgaggaccgctggaccccctccctgatgtcctgaagacggtggaaactaatatgcacgggaaccctgaaagcacaccatgtccagacaggccaggatcagaggccacagcacagggcaacagcaggagggtcctgcataaacaaccacgcgtgagsctggtgaccagctctgcgaggctggagggcaaagggccctggaggcaggtgacacctgcagtgtgaggatgccccgtgacaggcttcctgtgacacctgcagtgtgcggacgctgtgtagacaggctccctgtggcacctgcagtgtcaggacgctgtgtaggctgggtccctgtggcacctgcagtgtgaggacgctgtgtagactgggtccctgtggcacctgcagtgtgaggacgctgtgtagacagggtccctgtggcacctgcagtgtgaggatgctgtgtagactgggtccctgtggagccttcagtttgatgtgtagacaggctccctgtggcacctgcagttggaggacgctgtgtagacaggmtccctgtggcacctgcagtgtsaggacgctgtgtagrcaggstccctgtggcacctgcagttggaggacgctgtgtagacaggatccctgtggcacctgcagtgtgaggacgctgtgtagrcaggstccctgtggcacctgcagtgtgaggacgctgtgtagacagggtccctgtggcacctgcagttggaggacgctgtgtagacagggtccctgtggcacctgcagtgtgaggacgctgtgtagacagggtccctgtggcacctgcagttggaggacgctgtgtagacaggctccctgtggcacctgcagttggaggacgctgtgtggacagggtccctgtggcacctgcagtcggaggacgctgtgtagrcaggstccctgtggcacctgcagtgtgaggacgctgtgtagacaggctccctgtggcacccgcagtgtggcatgcagcctctgtgaccgtgtcttctctggggtggacagtgaggttttgttattcttccttcatattccagatggatgattcccttccctttcacagagcagcgtggagcccagggaaaagcgtggaggggcccggcgtcctcgcctcctctcaggcattccggtgggaaggctctccacccagcaacctacagctcattcccgtcccccctcctgctgtggggactccgtgcacttgctcctcacatcagcgcaggaccacacgtgcagtccttcatgccttgctccttccagagtcctcacactatttccccctgcaactccatgtcaccgggatgtctgtttttgacatcttgctacatgcttccttggaatgaagtggggtttttctttaccttccgtgttcacagggccatttgactcttccttctgccccagggactcatctgcttggacttagctaccgatgatgggctgcagtcgggccacttgggcttccctgtctgggcccccatgattattgacctgttggtgacttgggcaagtctcttcccttctctgggactcagctttattctgcagaaattggaggttttggtgggatgtgggtgcagctcctccgtgggaatcctgccgggtggcagggcccagcagaggagtctctacagccagcgctcctcatccagctgggctgcttcctgctgcttagcaccgccagcccccgactgcccagtgatccttaactgacgccttgctctctgtcgtatggaggtccccgtggaagaaaccgtcacagtggtgggcacggcatgtggcaggcaggggaggatccatagcttttataaagaacactgcaaagcargctggagactccatgagttggtccctgcctgtgtgccccaccccacaccaagggctctgaggcagcgcaggccacgcaggaagctcagggctgcggtgggggcgcgggaagctcagggctgcggtgtggctgcgggaagctcagggcagcggtgggggcgcgggaagctcagggccgcggtgggggcgcgggaagcwcagggmcgcggtgggggcgcgggaagcacagggacgcggtgggggcgcgggaagcacagggccgcggtgtgggtgcgggagtgcmggcctcttggaggtcaggacaggactccctgcccgtcttcagctttcaggtcccatggagagttcctcgatttactgaggctactgcctgtcgccctcttgcccagcagggccccgtgttctggatctgtcctacagcttcctataccccaccctgtccccactagcaaccctagcggcccctgtcccagttcttctgggctttgttccagggcttcctggtgaccacttgttaagcggataaagtaacgggcactgttgcggtccactgccaggtaccacagggaccaccttctcagaggctgtcacccccatggtcaggccttcaaggcgtgccgaaggcgggagggytgggatggctcaagacgtgagtgcctcgggggcctttgccagacttgtccgcagggatcacgatgtcctcatcacggctgctgggtggcaggagggcagccctgtggggtggggatggccccatgtgtgcgcttctcctgcccagccgtgtggctcaccctgtcccctgtctccgcagtgggctacggctcctggtttgagcacgtgcaggagttctgggagcaccgcatggactcgaacgtgctttttctcaagtatgaagacatgcatcgggtgagtgctgcyggagcagctgtcctcsgggtgccctggccctcggcctggcagctcctgacgcaggagccctttacagtgggcgtgtgggaggaggaggaggggtctgaggagggacagaggagggggcgggacagtctgtgggctggaagggggcttgggggtgtggggagcagcctgtcaaagcctgaggtgtggcagggcagccatgccgtgcgaggctgagggacccaggaaggcgggtgtggggaggggactggggcttggcttatcagggggcctttggagtgctttacagtggtggttgatgggacgttgaggagaggccactgtctgcagtgagacacgaggcagctggtagcttggggagcctgggtcaccacagaagagactgagcattttctaggtgttgggagaaagcaggagctgggggaggggttgaaaagaactaatgggacaaggtcttagtccaggcagaggcagggcttggggctggagcctaggcagaggggcttctggtggcaggggcaggacaggcaggagacacctgtggcctggcccatgggaaagaggagagacgatggggtgcagatgtggactgtgaggttgctcctgtggggcagaggcctgagtgccagctggaaaccatgtcgatgtaggggacagacaaggccagsctgtggggctgctagtgtcagtggctgacagacaagcaggtttaggttgagtagcagtgggtgggagctgggatggggaggaggtctgctgggagacagacaggagagctgggtgctggggagggtgagccagtgctggagttggaggtcagaaagcccaggggtaggaaggccagccttgtactttccccacacctgcaggaagacgccagacctggctgtgaacagagccacacgaggtcccctatggcgctggggtgggrgctgtgccttgtggccctggggtggtggggtgtttgttgtggccctggggcgggtggtgtgtgcactgtgatcctggggtgggggtgtgtgcgttgtagccccggggtgggggtgtgtgcactgtgatcctggggtgtgggggtgtgccttgcgtttcctgcagttgttcttgggttgctttgtgctcacacactggggcctgtggtcagcaygggccaggtcggccttcgcaggagcgtggcctttcggggcttgctcgatgtgcaggaaggaccccgtctgcaggtctgctgccggctggcgcatgctgtcggttccccacatgggtcctcaccatggctctgtgttatggtgaggaaagagcaaggtcatgtggcggtctaaggtcacacgcgccatggagccgactgctgggtgagcctgtctgactctacatgggcctccacctgtctgcctcttgtccacacaacttgacacagagccacatttagggtccctgctcacgcccagaggacggtgtggtagagatgaaggtgtagcccaagcaggttggaaccctggtcctgccgctgacctctgtgaagccgtcggccgtggtttcctgtggtgctggggaacaacgtgggctctggatgctggctgctcaggccaaagtcctgaccaccccaagcctctgtaaagtggggaggtgacagcacccccgtcactgtgtggctgggaggactgtgtgagcatcacctacgtgcaggcctggcacgggcccgcctggtgtgtacctttttgtggtggtgtcatgcacagtgaggtgtacttggcacacacgtggggcttgacagccttttacctgtcacatctgggcagccaccttccagatccagaacattccagcttcttgcagttgatacccctgcttcccagaggccaccgcggtttcatctccctcaccggagcttggcgttgcctctttggaacctgtcaggtgtggaactcgcatgggttttgctgtctggcttctgcgcagayggcgaggctcctccacctgcgtggcgcggagctctgttctttcctgtgctgtggtcggtgctccgttgcagcacgaatgtgccaccgcttcatccatccagtgttgccgggcgtggaggccattttcactttggggtggtcatgaataaagcctccgtggacgttctggagtcttggtggacgtcagcacttgtgcttatcgggcccrtacccaggagtggaatttctggggtcctgggtgtgcatttgtcagctggtcactattttgccaccaatgacatagcattgaacatgcactgcccagggccactgaggccccaacatgagaaggtgaatagggaaagcgcccagctggccagctgcccacacatctcgggggcagctgccgggtcagcagtttcttcctggagcttcagtttcctcagcaatgatggactgaagttttaaggtccaaacacacactttactccaagcccttaaagggaagttcatccttctctgccttccaggctccccagtgaaagtggtcagacctgttgctttcagtccgtcagggtcaaggccaccakccctgcctggaactttaagagctgccggggtcagtgctgggacttcattttctatcaaagccggtctgtgactcaatggcatccctgggacagtcagcgtttcgccttctaattggcatgggtttattctttttttaggaacctcagtaatggcttgttttaatggaggtcaagtcacatttttaggaattaatattgtttacatcttactccagaaaactagccccgagtgagcatggttgtctccaggactgtggtgtgggtccatgtgttctcaccctggggttgagagggaatgcttcctgccagagcgctcactgcctgcgctccactgcaccgcaattacagtggccctttcccacgagccgggcactgtgccaggcaccccgggtatattcccacttcatcctcagtcatcttgcagggtgttctcaccagtcacggggtgccctgactgcaaccgtgtggccagctagtacctgcccatgtggaggcacgaccccaacacgctggctccgtgccgtggtgtgcggcctcttgctgcggccctgtcgctagttccagatggggaatgtgtggctcagagaggtgaagtgggccgttcctgccagctgacctgggcgttctgcctgatccctgctgggtttcataaccagcaagtgtcctgtgacatgttgctggatgtagcctggcagaaacgccccttcctctgagatggacgtcacgccgcagtgagctgccccacgaggattctgctgaacgctccagcaggctgactttaagccagctgtgtccttcttgcggcatctcttctgagagccaggtttcttcactctttctccattgctaccctttttctttgaaatggagttcttggtggcagggcaagggaaagggagctctgtattccttggctcattctctaataactgttcctctgactcttgagtcaagccctgcgcccgggatgcaccacacccctgcctgtggaaggcagtgcgaggccagaatcagacctgcaaccgctgctgcaggagtcagcgcactgtggggacccagggaggagctggcgcccacaccagctgactcccacaccagyggtcagagaacattktcttttaaggtttcygaagtgctgcawtaaagaaattaaatcatcttttcactgtaggactttttagaggctttaatgygggaatttgctttacaaaccttccagagaggaaacagcctccagcatcttcctaatgggaccaaggcacctctaggtgacagctcagggctgtgattgagaagacgaggagcctcatctcttggggagaaagtggcaggggtggggggctggggaatggccccctcaagacggttagccacatcagtgacattccgctgtcaggcgtggtaaaataatggggcagggtatggcaggcatgacggaatcttgcctgtgatgaagcgggctccctgcccagtgcagggccatctggagaccagaggggcctccctgcgctcccaagggccagcccagacgccagctgacaggcagcaggaagggaaagaggagcccattaggtcttgctcctcacaagaaccatgttctgaaatatgttttttacttcttgctcctgttaaaacttaaccacacctctattaagacctcatgtctgcaacccaattccctggaggaccagggtttgaattcaagatctccacgtgagagctgagcacacttgggcgatttcttaacctcttagtgttatttctggacaaggctgatgtcagccttgtgagcattaagtaaggaaggccgtgtgtaaaaagtcctcagcgtgtgcccagcctggggtcgtgtccagtaaaaggccccgcctctgatgggctgctctgctctctgcacttgtcttccaggacctggtgacgatggtggagcagctggccagattcctgggggtgtcctgtgacaaggcccagctggaagccctgacggagcactgccaccagctggtggaccagtgctgcaacgctgaggccctgcccgtgggccggggtacgtgccccaccctgcctccygcccaggcactccccaccccagccaggctgctttctctgcctgcttagggagccgagtccsgtccctgttgccctccctgctctccttttacagcagtctgtagctggmccatggcctgtgctctgttagctggtgcccatggatggcacagtgctcatggagtgacggagtaccctgcccgctggtgtttgcattgcctccaagcaaacagtgttttgacttgaaaaagtgcatttcaggctttgtgggcgggatgtttctcagcagggagtctactcagatggcctgaaatcaaacgccccacagagcagatccagggactgggtttggtgctatgacatgtcaaagcgcaaagcatgctgatgggtttctcagtctctaactgacttgtgggagagttaaatgaagtgggcgggaagttaggagacaccgtttttcttccttcactgagtggacgctgactgagcatcttctgggtgcaggcagcacaggtgaggcctagccccacttcggggtggtgaacttaagcagacagtaccaagctaagccgctgcacagagggaggccagttcctgctcttggcggcaagtgacagtgggcatgaggcagctggagatggggacagtgttcctgacaggaatcctccccagatccacctgggttgctccccctgtccttaagggtgtgtggcatttggctttgatgatggagagcccaggctctaaaacccctgaatcccagggtgctggccttggccataggaggccccctgttggtaagtatgaacctgatggacacttggtgtgttgggcacttcctgggttgagaatgtttgcagggagggcccagaaacgtggatggctctgttcagcagcagccccacaagatggagtgggagatgcctggggcggatgagagacgcgctgggctccagctcagctctgctgccctctgggaacgcaacataggtcaggccttcagcttctgcggctttttgttcttctctgaaaaggggctgatcacggctaagggcggtttgaaggtcaagtgcaaagtgccgtctcttataaaggcagagcagtggactcctcaggaggaagtgaactgaaccacagtccctctcgacttctttcctggctgcattttcataaatatttgttatttaacatttatttgctcttttttagttttgcttttgctgtgttttgttatccttggatgtgaccttctccaaaataccccttttggttcacgtgtgtgtgtgtgtgtgtgtgtgtgtgtgtgtkaagcagcgtcgagaacatactgtgtgcccatatgctccttcccttgggtttgctttatcatggtttaccttggttttgctttatttcagttctttgatttgttttcttttagcacattgcgtctttgctcggaagatcttcttgagttggtgagaatgcagggccgagtagccagctgcattgcttagatttgattcatgtcacagcataaattgtcttgattccaaatcctaaaccaggtgggtgactcctctgacgagctctcagctgtctcagctgagaaaaataatcatggaaaaatagtttggttgctctagcagcttctaattttgccccttaggtatcattaaagggttacaagaataatttttcttgtttttctctccaacactgrtaattttttgttaccaaagagaargtccgtrttacgttgggtattttagctcagcatttgcagggttgcagtttgaaaaacctgaggtcctgcctggacaaggaccgctgttaataacggagctagtgaaggacatttgctggagacagagctctgatctcagagagctgacratggaaagaattctaaacgagcagttcttcaaaagcagggaggcagtactcgggtgatgtgctcacagctcccataactgggaagtttggaatccccgccccagacatcttcacggtcaccgttgctattggactagaccaacctaagattttatattaacaaagacaatgggagcaacaacttctcttgtcatgttgagctgtctttcgtttttccaaagccttyataaaccagcgtagaccggtgcctgcagtttakcccacagctcagccctcccttgtggctgccaggaagaggtctgggtttctgactaagcctgggctagagcagctgggggctgtgcccagactcattttattgttgactcagggaattctcactgcagtgcatgttttgcatctagtctgtaaagctagctaatgctgcgactatttgattcactttaaattcctccccagggtttgccagggcaggcttcttgaaatctgcatctttggcccagtcaggagggcttcctacttagtgtaaaattttctgcactttgaatgatttttttttccttttcaaattctcccgaagccaatgacgccttggtggcactgttgagctgtgagtggataatggcrtgggaagggccagggctgcctgygatgcccagagcagtgcactcccgcggcagatcatactcgctcctgggrtgtttattaaacacctgccacrtgccaggtgccgttctaggtgctggggacccagcactgaacaggagtagagtctccctggtgggccccagcggggggtgtggaatggcaccaggaggtggttgtggctcactgtgccacagcctcagagggaagctggttcaggtcatgttctgccgcatccagtagtttcacaaatgttaggggaccacctggtctgtagctcagacggcccttcctgcmcccataggccaagttcaaagggatccaggaatagatctgraatgttccagatccatttccaaggcttcctttagttcagtagctggccggacagcaagtggccccagcagttctcttgtttgcgtttcaggaagagttgggctgtggaaggacatcttcaccgtctccatgaatgagaagtttgacttggtgtataaacagaagatgggaaagtgtgacctcacgtttgacttttatttataataacagaaacaacaacctgcatgctcacaatacccagacagtctactagccaaaagtcctgtatgcattcatttattccttgctggacaaactctggaagcagcgtgtgaaacagcgggggaagggaagagcggcgtgagcggagggagtgtgatgattcccaaccgaaagcagctgtctcgcctttagaacgtgcagcctctccatgtctgattacaaacagtctccacattgcagttccaatggcctggaccgtaaggataaagcctgtaatatatgcaactagaatgtctgccttttcaaccccgtattatttattgtattttatagagcttttcactggaaatctacataaatgtcagtaaaccaaataaaagttcatttccaaggggaatcaggagcgagccacaccckaatggtagaaagatctcagggttaactctttatttttgtagttttattatctaaggcacagccattctgttctcacttggttctgagatagtggtgagaacagaggatgagttgggtctgttggggggaatctggacacttgtttattctgacggagttcacttcttcagaaccttcctgaaatgagcagaaattgttcactaggtcttcagaatggacgtccytctgccagagacttccagcgggcggctccaaaggcccaatgcagaggagcccgcggagcatgtgctgagggaagtctgcctggtgaggctggcaggtgggagtctaatgcagtcaggagcatttgcatgcagtgggtggagagtcggccaccaaaggaccgagttgcgctcggaatttgagctgaattccacagccttactttgtttcctgaagtgatagcctactaatgctggcaagcagatgcttaatagtaaatttctaaaatccccgggtctttatcattcagtttgttctgtgcacctgaggcgctcagccgtgggaggaccattttgcgagtgtagccctgtttcactcggatcaggttggcacggccgcctgcgtgtctgtccacctcatccctccgtgtatctgagggagtaaaggtgaggtctttattgcttcactgcctaattttctcacccacattcgctgaagcgatggagagtcgggggccagtagccagccaaccccgtggggaccggggttgtctgtcatttatgtggctggaaagcacccaaagtggtggtcaggagkgtcgctgctgtggaaggggtctccgttcttggtgctgtatttgaaacgggtgtagagagaagcttgtgtttttgtttgtaatggggagaagcgtggccaggcaggtggcacgtggcatcgcatggtgggctcggcagcaccttgcctgtgtttctgtgagggaggctgctttctgtgaaatttcatttatatttttctatttttagtactgtatggatgttactgagcactacacatgatccttctgtgcttgcttgcatctttaataaagacatgttcccggcgttgcgtcgagcgtttctgcttgtgggggtagaggggtccctgcagcggtgctgtcggtgcttgggacaatatgactgtgggccccgttgacaccccgttccctggggttgacagcagagggaaacaggcccgtgttgggctttgatgaagcagaattcagactttccaggggttcacttctccccattatttcactcaaattcagactttccagggggtcagttcccccactatttcctcattcacctctgatcacttctataaatggggtggaggagaaagggtaaaagcatgggagatgcgggtgcacctgtgggtccaggtgtcgggacctcccagtctctgcctgggagccckgtgttcagcgttgcgcactgtggtgcccgaggccggcccctccaactgtgcttccccactgggaattccaaagcctgtcttcctgatttcctgtggaaggagagtccagggcattgctttccttgagaaagctcgagccttctggaaaatcatgtttattttcaaatgaactacctctaggtctcaggtgaaattctagaaattattttggcacctggaattaacacagaccctgggttaatcaagtatccagtctgctgtgccctagagggcttgccttctagtaatttattaaccacatcagtcaagcagccaggatgcagtcagtgtgcctggagcccaggcagcgcctgtttacccatgtccactcttccctgcgtggtgggtgactcacctcacttcatggagtcggtcattcgactgcacctgctccatgccaggcactgttcccggcactgyggatgcggcaggggacagagaaagccctgcctctgtggagtttgcattccagtggggtagacaggcgacagaacccaagatcagttcaggcccaagcgtgctctaaggggatagggaacatgcccgtggaagaatgggggggcctctgaggagatggtgctgagcagtggggggcctggctgcagctgggtgggcaatgcgctggcaggcactcggttttggaggggtggctgcgagccagctggagggcctcacaggtcatgagatttcagcttttgtactaagatagggagccatgggagggcttattcagaagaacgccacctgctttgcatttttagaagctctcctggctgctttgtgggtagactgcaggggcaagagcgagtggacctttgtcccagctgtgagtcactccatctgcaaagtgaggtgggcactgtctgagagcatctccaaggttccttaggggtctgcagttgcaggccttcgtgtgctggcttctgagcatggttctggctgtgctcacctggagctaaggcagggaaaacaagccaaggcaaaaggtgctgtgaggactgtgagggagccagggtcaggaggagggagccatcaggttggcagttgcatgggagtgcgggtgggatttgagctgtgtcctgaggttgagggtcacctggacaggcagggaatgggagagagtcctgggcagccctcagcctagtcctttgttattttacacaacaatccacagaacattcctgaatgtcagagccctctaagcgtaagccagtggttgcctggtattttgatttcacagaccaattgagattccaaaaagtattttggggaccaaccaacatagcactgacacacacacacacacacacacacacacacacacacttcttgccatagcactgacacacacacacacacacacttcttgccatagcactgacacacacacacacacacacacacaaccaacatagcattgccacacacacacacacacacacacacacttcttgccaagcaagaccctgaactgatctcaaatgatagccttcagctgctgcccctgcccgggctgggcgcgccttgctgtcctcctggctctgacaccaagtcatttggagttcacttgttttccctcgaccccccgctcttcatctgaaaagggatcagcacagattccatggttctctgacctgaagcaggtaagtcaattcctctggtccagtgtcaggatttacacagtggtgatcgtcattgtcctgctcacgtcagaggatggttctaagaacagtgacgctcctttgagcataaataaaacgaggctgtgctggccccatcctcctgccggccagccaggctcccagagtggccaagctgcagttgccagcgggtggtgcaccgggggaggtgcgtgagcactgctaggtgggcatccacaatgtccccagtactgcggagagaccccctcaggtacaggcgccaccacgtgcaggccctgtcctgggagatctcagtggagatcggtttttacccacctctctaggccatggggcagtggtgtttgtggtggaaggagggagcctcaggtgtccagcagctctgcctggccagctccgttctcccgtagagtttggctccattcctgcccattgacatcctcttccactctttattgtacaacgtgcattttaagacagggagggcccctgggtcaggtgacccagcatgacccagctgaggaacagcctctgtgacatccctgacaagggacatcttgtccccggtaagctcaccagctcctgggacagcccctccactctgagccaccctctgcagccgccaccccagccagggccctcagaatcatcacttccctcaactgagccgcccagccctgcctcctctgctggacaagtgcatcccccacactccccagcgatccctgctttcctcaccgccccacctcagtgttgtgtggctgtttcctttggagacagggacgtcctgagagtggggactgcaccgtcagggttttcctactgttcctgcttggcccatggaggctgcatcttcccaaacaagacccagcctggcctcctgtctccttaccctggacccccacttcctgccattgcccccacttccttagtgacatttctttactgccagtggctcaggtcctggtccttcctacaagtgcagcctggctcgtggtcttccccatgtccggaccatcctttccgaggtcactggctttccaaatctaggtgtagctgtgtttccggtgcccttccttctgcccttctttctctgtcccaagcccagaaacgtggtgcccatagagctactgagacccttccttgacactcccatctctccctctcttcctgcatctcttgggcatttaggagcacctgctctgcaaggccctgtgcttggtattctcccccttctaatcaagttccctccattccattccctcggggctctgctctcagcaatcgcccacgtccttgtggaaggaggcctggcagggagcagaggacctgggctctaaagtcccggctttgtccctggctggctgcatgacccaggcatgtatgacccttgccttctctcagcctgtctccatatctgtcacgtggccttccaggtttcttctagttgtcagagtctccagttgatggctaagtgggctttcctggtgtccctggcagcacgctgctttgcccgtttaaacacacacctccataacaaacgggcaaacaaaaggggcggggcagacagtaaacaccgcagattccaagcggtggcttcagtgagactgcttagtgtgagaagtacgcgtgagccgggtctggaaatggggcaggagtcagggagggcacacaccaggtgggcagaaacagaatacgcccaaatgaggacagaacccttccctgccgggagtcgggcgccagctccagtgctgctctgttcctatttgtgggactgcagggaaggtcccttttatgtcataatgaagaggtcacagaccaggtgtcctaaaattccacccagcaggagcatgctgtgcctcttaagtgtggtcacagtgtccagcgactcagctccagagaggagctgatgggtgtgggagatgccggcttttcagccgatgacaggcccggccggcaggagcagagagcccaaggcagaagcacctgccacccagtgtgggccacgggcaccgtctccaaggcgtgctgagcctttgccaaatccacacatcaaacgacaatttgattctcacacttggatccctgaatgctagctggcactgactgtctgagctacagcccttaaatctgtctcctcaccactgaggaaaggagtctgtgctctattaaaagcattttttaaaaaccagagaatgctaaatgtgtttgaaaaataaaaaccgaccaaaaaatacattttatccctctttagagttgttatcttcccatatattcgtggtgctgggcaccagctgggaatgcaagtctgaagactgtgtgagcaaggccccctctgcagaagcagagaccgcattggagccagccagagactcttccccagtccacgcatccccagacactgaagtgaatggttgagggccttttccctgtttctgtctctcaggttgaccctttacaatccatagtacatgcagttcccagatggggaaataatctctcagatccagtttgtggcctggcacccatctcactgccagagaaccacggcttgtctgtgccctccgtgtcccaagtatgcacttccctccgcctgggttgccattccccgacttgacccagcttacactgattcagtgcgatccaggcacgatctactccaagacgcccttgggcacagtccaggcatgatctactccaagaagccctctgccaagggtaggagctcagagctccacttttggttaatattacacctcccttaacatatcccggatacacggccatctgccgggaaagcttcttgaggccagggccatgtctctctcactttccttggcatcaggaacttagcacagaagcagtgctccgtgaagcctgatggctgggagcattcccagagtctgacggatccagccttgccttgtcatgtcagctgtgtccagctgcctccactggctatgcacttggaaggccctctctggcccagccacactgctcactctgagaccttgacctgcacttctaacgttcgcttccctaactgctatggaccgtttggccccttggaaagccttccccgttatctgtaggtgctgccaatccatgtccaccacatgccttgggctggtttaaaaacgcaatctcctgggggctgccatgaatgaatcccagctcactgccatcctggacacaactaggcctcagtttttaccaaggaccttaggggggggtcaccagatctggcagacaggctgtttttcaatgggtgatggctgcctccatcctgcgtctccatcacgcccggactctgcagaggaagagaaggccggaccgttccttagcccacagaaggcgtgactggcatatcttcactcccatcatgagacgggatgcagaaacgcatatcttttttccttagaagtgtgccagcagttagagccttgaattcggaaagagtgatgattccctgtagtggtatatcggtttgcatttgctaactgctttcaagttttctttcctgagtagatatttctagtccaagtaggctgtgagcagagtctgtgcctcattcatccctctgttcccatactgtgcattcgttcctaacaggtaatccataaatgcttgttacctaactaaaggcaaattaaatgctaaacagcactaatgacaagctgttgcaagatcccggctctcaggaaagaattacttgtggttgtcaggggcctgcctgttgcccaggtgtaggaaacatgaaacacttctttcccaactgcttctctattccagaggtggtgcattcttctaagattgctgcaatataatgtttgggaggcaggtttcattaaaattattttttgagacagagtcccactctgtcacccaggctggagtgcagtagtgcgatctcagctctccttaacctccacctcccagggttc

SEQ ID NO: 93261 - DNA, 26790 bp, Homo sapiens
cgatttcatcactgcacatcccactgggattggcccccaaactggggtgtcctcatttggatgaggtgcatctgtgttgcagccaaggtttacaggagagggtggaaacggtgcaaaccccagcctggcacagctgccctgaatggcgcttggctcagaggcaggggtggcccagggagtttgcagacactgatgaggtcccttctgaggcccgtcctcctgcaacacctcctcgcagagcctcggcttcaagccacaacagtgtcatagtcaagggctaaagtcggggtttctctactccagaaacatctggagcgaacacaaaactatggccctaaaacagtagcagaagcaaaggacccagccagagtggtttcaacaaactcatttctaggctgctctgggtcagaaaccctatcaggctccctctggagctgcctcaggtctgggagtgctctctggcacccaggaaaccatcaatcagagacaagaagcctcggaagctccccagcccctcctctcccgccacctcgagaggaggcgtgtcccaaccagggcacggacagccggcccctgtgatggcttagtttggtaccagcgcatgggcagccgaccctacgatggctgtttggtttttgaaggagaaattttaggctgtttaaacccactcttctctcacccctcagaaaggtcactgatggtttttgaaggagaaattttaggctgtttaaacccactcttctctcacccctcagaaaggtcactgaactcgtcttttacccgatcatccgaggttgaagatggaagctgcttctcacccaactgccctgagaaacaaagaacaaggctcctgttaccaacacggagcacagaaaggtctcacctgcaaggaggcatgattctactattgatgactagaagggagactggggtccctgaccctcaagttctccccaccgtggccccatccccaccaagggtgctatgcagcctctgatcctgccctgccagcccaacgtccagaagcacacaggcagcaacaagcatcagaaccctcaggaacagcagaaccagaaagcccagtccttccactgactccgatccagtccttctaggacagcctggacttggtggatgttctgagacatttaaaaaattactaggccaggcacggtggctcatgtctgtaatcccagcactttgggaggccgatgcaggtggatcacgaggtcaggagatcgagaccagcctggccaacgtggtgaaaccccatctctattaaaaatacaaaaattagccgggcatggtggcacacacctgtaatcccagctacctgggaggctgaggcagaagaatcgcttgaacccgggaggcagacattgcagtgagccgagatcgcgcactgcactccagcctgggcaaaagagcaagactccgactcaaaaaaataaaataattaaaaattactattctcagtccgggtgcagtggctcacgcctgtaatcccagcactttgggaggctgacgcgggtggatcacaaggtcaggagatcaagaccaacctggctaacatggttaaaccccgtctctacaaaaaatacaaaaaattgagctgggcgtggtaactcatgcctgcaattccagcactttggaggccggggtgggcggatcacctgaagtcgggagttcgagaccagccttaccaacatggagaaaccccatttctactaaaaaatacaaaaatagccaggcatagtggtgcatgcctgtaatcccagctactcgggaggctgaggcaggagaatcgcttgaacctgggaggcagaggttgtggtgagctgatatcgtgccactgcactccagcctgggtaacaaagagtgaaactccttctcaaaacaaatacaaatacaaatacaaaaaaattagcagggtgtggtggcacaagcctgtaatcccagctactcgggaggctgagacaggagaatcacttgaacccaggaggcagaggctgcagtgagccgagattgtgccactgcactcgagcctgggcgacagagtgagactccatcaataaataaataatactgttctctcggccaggcctggtggcgacagagcgagactccataaataaataaataaatattactgttctctcggccaggcctgaaggttcatgcttataatctcagccttttgggaggccaaggcagaaggatcacttgaagacagaaattcaagaccagcctgggcaaaagagtgagaccctgtctctacttaaaataagttttctttgttttgtttttttcttttttagacagaatcttgctctgtcggtcaggccagagcgtagtggtagaatctcagctcactgcaatctccgcctcccagggtcaagcgattctcctgcctcagcctcccaagtagctgggcctacaggcaaccacagccacatccagctaattttttgtatttttagtagagatggggtttcaccgtgttagtcaggatggtctggatctcctgaccccgtgcatccgcctacctcagcatcccagagtgctgggattacaggcgtgaaccactgcacttggcctaaaataagttttaaaaagtattgttcttggctgggcgcggtggttcacacctgtaatcccagcattctgggaggctgatgcaggtggatcacgaggtcaggagttcaagaccaagcctggccaacatggtgaaaccccatctctactaaaaatacaaaaattaggtgggcgtagtggcgcgtgcccatcatcccagctactcgggaggctgaggcaggtggatcacgaggtcaggagttcgagaccaagcctggccaacatggtgaaaccccatctctactaaaaatacaaaaattaggtgggcgtggtggcacgtgcccgtcatcccagctactcgggaggctgaggcaggtggatcacgaggtcaggagttcgagaccaagcctggccaacatggtgaaaccccatctctactaaaaatacaaaaattaggtgggcgtggtggcatgtgcctgtcatcccagctactcgggaggctgaggtagcggtgagccaagatggcaccaccgcactccagcctgggctacaaaacgagactctgtctcaaaaataaataaacacatagatagatagataagtaggtaaataaatagataaataggtagataaatagatacatagatatacagataggtaggtagatagagagagacaaagaagtaggaagatagataggtaggtaggtagatagatacacagatagatagaattgttctcaacacactgcatacaagtttacagagccaagcagctctaagatgtgacactcacaatcccgttcctacctgaggcccccgagccgcactgtctcatctgtgcacccgtatctagctaaactatctgggtagctgtgtttctgtttgggacagagtcttgctctgtcacccaggctggagtacggttgtgcgatgtcggctcactgcaacttccgcctcccaggctgaagtgattctcgtgcctcagcctccagagtagctgggattacagatgcccaccaccatacctggctagtttttgtatttttattagcgatggggtttcgctatgttggccaggttggtcttgatctcgtgacctcaagtgatccacccacctcagcctcccaaagtgctgggattacaggtagctacgcttttcggaagctcccctcaagactcaaagtgggaactgagtgctcaggtggggacaggtgcacagagcacacacaggacaagaggccggagggaaactggccctggccctcctaaaacaacatccaggagcagctgcaccagcccacagtgctatgggttctggggcccaaacaagggccttgtgtttcccctcagcctgtcagcagagaaagctgcgccacactggcccacaccagggtgtcaccaggcggctggctgagtgccaggaaatgacctgcagctggcccagggcagcagccgcagaggcaacggccattcttttctcccacatccacagacaaggccctattcttccctcttcctcagtcccctcagccccaagcacaggcttagaaaaagactcgacggctgatgagcgtgtctccacagaaactgctggaacagagccctgctcacagaggagcaagaggcggagacaggctggccgcccctccctgctctctggatgtggtgagcagccgcaggcagaagccccaagctctgctccttctcacaccacaccccagccaccacctagagcagtggagacattcactttctgctgaaaaccctgcccsactgaggagcacacatcctggtctagcaccagcaagaggtgcctcctacctggggccctgcaaaggggcaggcttggctgaggtgggaagcccgacctgggccccacygcgtcgctgtccgaaggaggctgggccacatccgtgctgggcagggtcttggtctcagccccaactggggtccctgtccctctaccctgggaggtctgaggggcatccccagggttccaccctcggtgctggggcagccgtggcgccgtctctttgtcccrtggccacttgactgccagcgcactgtccagcaagaaggccttgcagctggagctggtatccatggtgtagtcgtggccctggtcgcagccccacacgacctggatgacgccgcagtactcggaggacagtgtcctctgaaggtggggcagggccccgcagctggccgcatgtccatgcacccaccccaccaagccgtgcaggcactgggggctggatgtgatmagatccactgcagagagtcaacagagatgtcagatccacggctggtcggcacccagcccaccctccaccgggggaggactcacccagacacgctccctcctctgcccctgttgggggctgggcaccgaccctgcaaaggatcagtgtggccatgagcaggacaagcaggcggaggttcacagcgctcgtcgtacgggaccctctcgagatctcaaacctcagcggtccccataggcaactttctcttccctcaccccagctcctcccagttcatctctccacaacagtcccagggctgttggcactgaacccgggcatggcccattccccccacccagaggctcccgcggaggcacgccctgtccctctctcaacacccgtcacactgcagtactgacagcctgaacgtgctctgaacagactagggcgtactttgcacaaggcttccggcgaccagccggggaggcgttgaccctctgcaggaaggacttgagaaggctgtggcactggtagaactgggcgtggcagctcttgcagacaaacggagacaaggtggggtcctggcggacagccacaccaagcaggcgctggaagtcccgtacgagcacgcgctcctctgcggatggcctctccatgctcgctccaggcgccctctcggagatgctgcgcaggcttctcgaggaaaacttcccgtggcagaggcgacagtgacccatggcgagagcccggcctgctcctgcacagagcggcaggaagtgttagcagctggcaaaggaggctcctgagcacagggcgtcccggactccaggtccgagggcagcgcctgcagcgcccttcgcgcggctcccggacacagcaagcggctcgggcgcgcggctctcggcgggacaagccgccctgtgggggatgtggccgctggtccaagaaatctttcaaatttcaaaggcctctaaggcctctccagcgaagcaacttcaagagtgaaacctggaactgcaccctcctcccagcgaccgcgagacccggggcaggcgctgcgccctccaggaaacgccgcggtttcctgtctgccaattgcaggtgccgcctcctttccggctccgcgagggcacgaagcaggggagggcgattcccacgcgcgggcaccccagggcgacctgcccgcggtgacagcgctcctcacgccgggtcccttctggccgagcccgcggccggggaggccgggccggcgacgccggcgtcacggagcgcgaggaaaaccgagccggccgcccagcgcctatcccgacgcagccccgagtccgctacgcccttggccgggtggaggagaggccgcgccggcttccgggcgtcagtgcggctcctcccacgagcaacccctgccgcgaccccaacccgccacgcccgggccgcggacccacctgcctcgtccgcgccgtcctcgcccgcgtccccgcaggaccccaccgggccccaggcgcgccgcgccgtcgccccgtccaccctcggcccaccgctaagggaagggcggccccgagtccggctgacgccgccgccgccgtccgaggccccgcactgtcgggacgacccaggagacaggaagcggcccagccggtcccgcttcatggcagcggaggacgccagcagaatcccgcgggtgctgcccggcccgaggttcctagaggacccggcgttaggctccgctcggcgcgctggaagcgaggcggggcgggggaggggcggagcgagaagcaaagcgaggcgggcggggcgggccaggggccaggggcgggaccccgccggccgaggttccacccgcggtgccagcgcccccgctcgtaccgctcccctctcgggcccgagggcggccgtgcccgcctctgtcgccaatggagcgctggcctggggcggggcggtgggcggaggggctcgccgacacctcacgacgagtcctccagggagaggcgacgcggccctcaccgcctcttaccgtgggagacggaggcgcggggcgggcaggcgccggcggaggccacgcggcgcgcaggtggcgggcgggctgcagaaaggggaggggggccggggtctcacgtagagaggggcctggctgccgcggttagacgcccatggcaactccgtgaggggcccttctcgccagccccgtctcaagacggcgaagaggcccggctccgtcgcgacaacccacccggactctgccgcccccgccactaacacccgtggggcccgcagtacgcgcggagggggcccgtcgccggaagtgcggccgcgtcccttcctgcggtccgctgctcgggcggctccagcaccagcgccggctgcgttccgggcctccggtcgcccgtccagcccctcggctaccgccgccgcctcccccgctcggcgccatggccgctgcggccggggacggcacggtgaagccgctgcagagcgccatgaagcttgccaacggggccatcgagctggacaccggcaaccggccccgggtgaggcggggcgggggcggggcttggccgctgagggtggcccctggagggacccccgcccggggagggcgaggacggggccggctcgggctggagacttgggagcgggcgccagccgggatcccgggccrcggttcccgggcgaggacgggggcggggcgcagccgggcgtgcagtgaccttggacagctcagatcctgcggaccttggctttccactccgctcgctgagccggtgcatcacagcctgggctccacctgtagaggagatgtagcaggagggtccgccaggccaccttccaaaatccgagtgacgrgcaggtccgtgcgttcgtgcatttttctgggcagagatggtagatttaatccggttgccacaggggacggcatgcagagaaggccacatacctgctcatttgtgatgctgtttgcagtcgtcttaggaaggaaaagcaggccggaggggtgtggcccgttcctgagatggggccgaatctaaggttggcgaccaggtagagaagctggcccagccacacccggctgcccaaggagggaaggagcctgcctgtgcctaggagaagcctcgttcctgaatctgctgctttccccaagttggtttttagggcagcaggtgcccccgcaagtcagaaatcctgcctggattatatttcgtctttctctctgaggcatagacttaaagataggaaacttaacagctagggataaaacaaaaaaacatagcatattgctgggcgctgtggttcacgcctgtaatcctgacactttgggaggcccaggcggtggatcacctgaggtgaggagtttgagaccagcctggccaacgtggtgaaaccccgtctctactaaaaatacaaaaattagctgggtgtggcggtgcacacctgtaatcctagctccttgggaggctgagggatgagaatcacttgaacccaggaggcggaggttgcagtgactcgagatcctgccactgcactccagcctgggcgacagagtgagactctgtctcaacaaaacaaaacaaaccaccattctgtggttccaatgacctgtgccttgtcagaggggtcacacagccttgaaaggtaacagttctaggctcctgtgtgcactggaaatacgtaactcgcaggttctgggaaagggatttctcggaacttaaaccgggaagtgatttgawaacttccagtatcactccctttatcctctcagaaaagtatttttttaagccactgaatgaatcacccttgagttgcacaagaaggaaacattgcatagaatgaaaaatgacagcaaactgctgaggtcacttccccaggcccactgaatgagaatatcagttcctgtgctggagagaaaggcagtcagaggagaaaatgaggtccagctcgtccctggctctctctctctctcaggtcctgatgtcttttccaagtctggagagcagcgatgctgcctgtgccctgcgcagaaaaccgtgttccggctgcagctaaccaccgcaggctcaatgtctctgggtgtatctcagagataagcaggtggtggtgttccttgcttatcccacaagggcacctggccggaataatggagtcacttccctccactggcctgaccccactctttctctttcctggacacaggaggcatacacggaatacctgaggagcatccactatatctcccaggtgttactagaagaagtggaaaccactaaaggtacggctcagccagccgggcgcggtggctcacgcctgtaatcccagcactgtgggaggcagaggcgggctatcacctgaggtcaggagatcgaaaccatcctggctaacatggtgaaaccccgtctctactaaaaatctaaaaaatcagctgggcctggtggcgggtgtctgtagtcccagctactcgggaggctgaggcaggagaattgcttgaacccgggagcagaggttgcagtgagccgagatcaccccattgtactccagcctggaacaagagcgaaactccgtctcaaaaaaaaaaaaaagaaaagaaaaagaaaaaggcatggctgagccctgctgcttcctccatgctggacaaattgtgggcatcctagcccttgatgggtgccaggcttcggcgggggtctcttgtatccttccagcctgaccatttgtagyaggtggaccagcccacactcagtgtgatatagtggcaggaagggaccagcgttgtggataagaagatggagactggggtgtggcaagacactggctccagtgagcggcacagacgtggggcagcattccagctgtggggtgtgcaaaggccctgaaataggagtgggcggggtggggctgtgtgcatgccttgggtggaactggggccgttctggtgtgcagggaaacttgaagagactttgagctttgagggagaggacagcctgggagtggagcctcaggtgaggactgaggatggcagtggccagaccacccaggatgggagcagtaaacggcctcggggtgygtcctgaaggtggaacagagcagacttgcaggaggcagatggggcaggagcaaactggcaaggagaggaatagcaagttccgcaatgaacacattaagtttgagaggccagcagccgctgcacataggatcacagaggtcagggggagccactggacatagagcacagaggtcagggggagccactggacgtgggatcacagaggtcagggggacccactggacgtgggagcacagaggtcgggggasccactggacgtgggakcacagaggtcgggggagccmctggacgtgggakcacagaggtcggrggagccmctggacgtrggatcacasaggtcggggsagccmctggacgtgggatcacagaggtcggggcagccactggacgtaggatcacacaggtcagggggagctaacagttgccccagctccctagggagccggtgagctcggctgagctctggcgctccaagattgaggagttgggtggaggagtggcagaggatcccctggggagagcaaagtcccagaagacagaggaactccagtggcccaccgtgtctggcaaggtggggacgggtaagggcagtttccggggggagtcgggggctaaatcggggcgggatgagaaaatgggagtctatgagaagttttctgtgaagggcagcagggaggtgggtcaggcgctggggcggtgggtccaggggcgagtcacagagaggcagctcccacggcgcgcagaagggctgtgtgagcaggtccatggtcgcgcagaggtgctccatgccaagctacgggaaggcaggactttggggacacagccggtgggagatgggtgaggcgatcccctcagcacgtccttgtctctgtaaaacggccacttcccagaggcctgcagttgcaagtgaagctgagtgagcactaaaggcctgtttagggtcgaggctgtgacgggcctcgatgaggggcccacagccttagcagactcaggaggcaaaaccaggggcagatgattagaaatgcgtgggtggggggacttgcctggggtccatggtgggggcaggggccttgcctggggtccatgaggaatagtcggcttgcccggggtcagtggggggtggaaggggcagtgggcttgcctgccttttccgttgcctcattttatctcagcagtaagtaacagtggtagagccgactgtgaccagccttcttgtccctcccccagaagctggggaaactgtgccccccgayacctccaagatgctgaarctagcacagcagtgtctggagagggcccagtcgacggccgccaagcttggtgggtctcctgcagtaggcggctctcctggggcatcccccaarcccgcatctcctctgtgggatgtggcccaccgcttgacccctggttacccatggcttgcagggaaaacacgcctgaagccaaccatgcctgcagctgctcccatyccccagcctgccggccgacaccgccgtgtatactccgatgaaggaggaaagctctctccttttctgccacccgagatcttccagaagcttcagggggcagagtcacaaagctgtaagaagtaagatggacaagatgggaggtgggatgagcctgggattgggtttttgaggctgagaaagatgagctgatgacagcgattttttttttgttttttgagacagagtctcactctgtcacccaggctggagtgcagcggctcaatcttggctcacggcaacctccacctcccgggttcacaccattcttctgcctcagcctcccaagtagctgagactacaggcgcccaccaccacacccagctaattttttgtatttttagtagagacggggttttgccatgttagccaggatggtttcgatctcctgacctcgtgatgcgcctgcctcggcctcccacagtgctgggattacagcgtgagtcaccgcgcccggcccccacagtgctgggattacaggcatgagccactgcgcctggcctgacagcgaatgtttttaaaatgagtcccagaatgggaatatcccctggccggacacaagcaaatgcaggcggcctggtggctcacgcctgtaatcccagcactgtaggaggccgaggcgagcagatcacctgaggtcaggagttcctgaccagcctggccaacatggtaaaaccccgtctttactaaaaatacaaaaattagctggccgtggtggtgtgcacctgtaatcccagctactcaggaggctgagtccaggagaatcgcttgatcctggaaggtggaggttgcagtgagcgaagattgtgccactgcactccagcctgggcaacaagagtgaaactccgtctcaaaaaaaattaggcatagtggtgtgcccctgtagtcccaactactagggaggctgaggtgggaggctcacttgagcctgacaggttgagggtgcagtgagccgtgattgtgccagtgcactccagcttgggcaacaaaatgagactctgtctaaaaaaaaaaaaaatgaccgggcgcggtggctcacgcctgtaatcccagcactttgggaggccgaggtgggtggatcatgaggtcaggagatcgagaccatcctggccaacaaggtgaaaccccatctctactaaaaatacaaaaaattagctgggcgtggtggcgggcacctatagtcccagctactcaggwggctgaggcaggagaatcccttgaacccaggaggcagaggttgcagtgagttgagattgcgccactgcattccagcctgggcgacagagcaagactccatctcaaaaaaaaaaaaaaaaaatttagctgggaacaagaatgagttatatatctatatatatgtagaaatccatacatacaaaactgagcagacaagtttataacagcagagcagatatagctgaagagcaaattcatgtattggaaaaaaggtcaaaagatagctagaatgaattacagaaacaaaaaataaagacagaaaacaagagatggaaagcctaacgtgttcgttggagttccagaaagaaaatgggagggaggccaaggcaggcagatcacaaggtcaggagttcaagaccagcctggctaacatggtgaaaccccatctctactaaaaatacaaaacttagctgggcatggtggcgcgtgcctgtaaccccagctacttgggaggctgaggcaggagaatcgcttgaacccaggaggtggaggttgcagtgagccaagatcgtgccactgcactccagcctagcaacagagcgagactccggctcaaaaaaaaagaagaaagaaaatgggagagaggcattattagaagttagaatggcagacagttgtctagaactgatgaaagatacaaagacacaaatgcaaaaagcccagtgactcccaagtgggagagacgagaagggtccactcctcctgcccctgctctggcggggcctggcttcccagtccccttgtttctgcaatgtggcttcagggcagggtggccaggcgtcaggctctgactttcctccttgtyctccattgtccctgacagtgggaaggtacgagggaacaaagctttcaaggtggagtggctgttgggaactgtataaaggagacaggacacttcttcctttcatgggtcacagactaatctggctgtttgacccacatagtgcctttaaagcaggggtgtccaatcttttgccttccctgggccacactggaagaattgtcttgggccacacataaaatacgctaacactaacaacagccgatgagcttaaaaaaaaaaattgcaaggctgggcgcagtggctcccgcctgtaatcccagcactttggaaggccaaggcgggcagattacctgaggtcaggagttcgagatcagcctggccaacatgatgaaaccccatctctactaaaaaatacaaaaattagctgggcgtggtgtcacatgcctgtaatcccagctactcgggaggctgaggcaggagaatcacttgaacccaggaggcggaggttgcagtgagttgagattgtgtcactgcactccagcctgggcgacagaatgagactgactcaaaaaaaaaaattttgcaaaaaaacctcagtgattttttgagacagagtctctatcacccaggctggagcacaggcacatgccaccacacccggctaattttttgtatttttaatagagacggggtttcaccatgttagccaggatggtctcaatctcctgacctcattatccgcctgcctcatcctcccaaagtgctgggattacaggcgtgagccaccgtgcccagccctcagtgatgttttaagaaagtttaggaatttgtgttgggccacattcgaagtcatacagcctcggattgttgcacaagcttgctttaacaagattcatactgttgccaaacacatataacggatctccatagaagtccagtggtccagcttctcttgaaaaaccaaaagtccggccgggcgcggtagctcacgcctgtaatcccagtactttgggaggccgaggcgggtggatcacgaggtcaggagatcaagaccatcctggttaatgcggtgaaaccccgtctctactaaaaatacaaaaaattagccgggcatagtggcgggcacctgtagtcccagctactcaggaggctgaggcaggagaatggcatgaacccgggaggcggagtttgcagtgagccgagattgcgccactgcgctccagcctgggcgacagagcgagactccgtctcaaaaaaaaaaagaaaaaaagaaaaaccaaaagtcctggcaataccaaaacctgtgttttctttctttttgttattttttgttttggttttgtttttttgagacagagtctcactctatcaccccagctggagtgcagtggccagatctcggctcactgcatcacctcccgggatcaagctattctgcctcagcctcccgagtagctgggattacaagtgtgcaccatgcccagctaatttttgtatttttagtagagacagagtttcaccatgttggccaggctggtctcgaactcctgacctcaggtgatccgcccggccttagcctcctaaagtgctggcattagaggcgggagccactgcacctggccaaaacctgtgttttggaagggcaggcaagaaggggcagatgttgcagcccaccccagatggctcccctcctctttctcctcacctcctggcctcagagcaatccgggaggatgagagagactcctctggtgtccagacaccactgggcttcctggggtctagacagcagcttgtcacatttccagagagctgacgccactggaggaggcctccctgcagaatcagaagctgaaggctgcgtatgaggcccgaatggcgcggctagaccccagccaggccatgcagaagacatccctggtgagtgggggctagggagggcctgggggtgcgtgggcgcggggcagaggggagtcggccttactccctcctccccccccagaccctctctctacagcggcagatgatggagaacctagtgattgccaaagcccgggaggagacagcagcctttctgaccgccctggtggtccccgaggggaaactcagtgtggccttgagccaagggcagagaagggggcagcgaggggagcggaggttccggggtcggggtacagggccgaggggctccccgctttgcagaggcagggtctcaggggaaggcccggccgccgtcccccatgttctctggcccggccctcctggcttgagcgcaggctgccttctgccccagaagccttacctggggacagcccctcaccgagaggaggtccctgggacgtcccggcctctccgggtgtgggacggggttgggaaccgagggcccgctcagatcccacgctcggccccttgactctgcacccagctccagagaaagatggaggagcgccggctgcggctccaggaggccgccaacaggtgggactcctgcccgcccctggggccgctgcggggagggcctggccccggcacccaccgcgtgcctttctccccaggaggttttgcagccaagtcgccctgaccccggaggaacgggagcagcgggccctttacgccgccatcctggagtacgaacaggaccatgtgcgtcccccacgggcccaggctttgtaggaggagcccagcgaggggggcggggtcagagccgcgtgggtgggcccccgtggggggcggagccagaggctgtggggggcagtgagggggcggggccagaggcccgtgggagggcccggtgagggggcggggccagggctgcgtggggcggggcagagcgaggaggcgaggtcaggggtcgcgtgggagggtcccagcgaggagggagggtccctgcgaggagggagggtcccagcgagggtgcaggcccagggttcgcctaaggtttccctcgggtgtgggtgggggcgggggcgggtcgcggggcctgctggcgctgggtctcctgcaccccaggacgggctcccacagtctctaggggtcggcactggtgggagatgaggcgcgtccggtcgtggcggacccaccgtgctttccttcaaggccccctgtcccgtaggactggccgaagcactggaaggccaagctcaagaggaatccgggggacctgtcactcgtraccagcctggtctcacacctgctcaggtagctgggccttcaggccccacagagcccctgcscaccggccttgggcacctctgcctggtgcyaggtgccggagaggggctggactgacacagggagcctgtgcccggccacgtggacactgcagctccctttgcgctgagggcgtttcctcggcttctccaacctccccagcgggggcggggggcagactttccaacattcactgtcaggaggtaatgcaagtcgcttctctgaaaccgggcatagcgcggcacctgtggatgccacggagaggccgaggctggccgcgttctcacgtcctcttctcccgcagcctccccgaccacccgatcgcgcagctcctgaggcggctgcagtgctccgtgtacagcgccctgtatcccgccgtgagcagagcagccgcgccagccccaggctgctgccccccgacccccaaccccggaagccgacggctgcggccctcgcagagcctccattgcatgctgtccccgcccgagcccagcgcagccccgcggccccaggacagtccccccacgcccccactccaacccggccccgtggggtctccctcacccctgggggacaccgcatctggattgccagacaaggacagctcgttcgaggacctggagcagttcctggggacgtctgagcggcagggccggggccgtggggtacagccggagccccagctgcagcagctgaagaccgcggtggaggagatccacaatgccgtaggtgaggccaggccctccctgggagagccgccgcagctcttcacccctgcttattggtccgtttcaagcttctgtttggggaagggtctgttgatcagagactctgatcagacttacatccacccagctcacgcctcagcccttctcattttggaaacagtgtggtagaaacggagtttcaccatgttggtcaagctgttctcaaactcctgacctcagttgatctgcccaccccggcctcccaaagtgctgggattacaagcatgagccaccgcgcccagcccagagttttctaagaaccactgagggaggcccaacagtccaggcgtcattctcactgtgctgcccacacactaaggaacttggtcagggtccccacccacagggggttggatctaaagtcttccctggttcctgcagttttgggtaaagccccttttgagaaaaggatcattctccggtttcttctcaggctgctggcccaacagggcagcagctgtaggtgaccgtttccagtcccggactccctgccctgggccgaggagggtcaggggtgggtgcaggaggcttgaaggcggtggaaagaggtttcttgggcggagaaaggccccgtggcttagagccacttgacccagcaggggaggagcctctgtggacgtccccggctctgttcctagcagacaggctgctctcgctgacccttctggccttcgaaggcctaaacacagctgcctccaaggaccgctgcctggcctgcattgaggaaccctttttctccccgctgtggcctctgctgctggccctgtacaggtatggacccagctgtacaaccacctgcgtggcctagtgtcttccagcccagtcccccaggaggcctgccctgctccctggcactgtctgctcccctccatccccaagactcgtgtttgctccccctagcctgtgctttaccctgaggccatcctcaggggcttccagtttgcaggtaggattattgccactctcccgtgcctggggtcttggcaacgctggggctttttgcttgagatacatagccagttttctccaggactgagctccagccacagccctgcttctgtccccagggcaaggtccctggggcagcttagcctggcctctctctgccccaggagcgtgcaccgagcccgggaggctgccctgagcaggagcatggagctctacaggaatgcaccccccaccgccattggcatccccaccaagctcctcccccagaaccctgaggccaagggggccactggctacccctactgcgcggcggcccaggagctcggactgctggtcctggagagctgcccccagaagaagctggagtgcataggtcagcaggttcgagagtcagggggagggacaggctcccatcccagtaggtgacctggagcctgtgtcttcaccactgagcttctcttgtcacgtgccggtggggaggttgggggaccagaacaaaagtggtgtctgagcaacatcgccagggtcaccgtggctcttcccagccgtgcacatcaggaggtgggtgggtgggcgggcggggtataagcggtggctcaggctgctggacggggttaactgcccctgaaaccctgtctggggcgcagtgcggaccctgcggatcatctgtgtctgtgcggaagactactgccccaccccagaggccacaccccaggccgggcccccgcccatcgctgcagctgccatgtgagtcccaggagggcgaggtgtggccagggaggaagggccctagaaaggcaatggtcacgggagggactatcttcctgccccttagccttgtgccagctggctgcactgtagamgcaggagggccgtgtgggcccagccctggctccgcagtacgggagctccctttagggacagcctcaccatgcccagctgccttccggtgcctctgcgcagaagggcacagagatggcggccagcacggccaggatggctccacagctgctgggtttgcggagtgagaggctcctggccccaacccaaggccgctatgccctcccgacagtggtgccgatgacctgctgcccatcctgtccttcgtggtgctgaggagcggcctccctcagctggtgtcggagtgcgcggccctggaggagttcatccacgaggggtagaccctggcgggtcagggtgggggtctctgtgcgaagagcagggacctcatccctcaacctaaacggtggttgtcagtagcagctggggagggtagcgtgtggctccgtcacagccatgccttcgggcagcccctgtgggtccacctgtgcagagtgcctgctgccacatgtcccgtggcccttcgcttagctcagcctctcccagacagcaggagctgggggctgtcccctgagcagcatctgcctggggaggggataaggatccagtgccatccctggctctaccgtccaaggacgagcacayagtgggtgggaaaggcctcctctagcccagccgccctgacagccccacctgcccaccctcagcacccaggtcctgaactgggagggcagacactaccttctggagggccgggggtrtccttctgttcgttyagatgacaccggctgcccctgccatccatgcaggtacctgatcggagaggagggctactgcctcacatcactgcagagtgccctgagctacgtggagctgctgccccrgggaggcctggccaagtagtacagctagagcccagggtccctgcagggcctggcctcgcctcccagggctgtctctcctacacctggagccatgggatctactgaggaccatcctggagcctcacgctgctctgcacatggtgggggcttgtccactgtggtgtgctctccagctcttcaccttcctcacctcacatctgaccctggagcttggggttggcacctctgccccgacagaatggggctgaatcagctccaggaggaaccaggccctgctctcctgtgtaggcctcagagaggccaagaagggaagctttgggcttcggtgggtgcaggctcagygatgaacatctggctggggcagctcctggggagcatcagggaagagggggccatgagccrgccagcagtggagacggcagtccagtttctctcccctctgacccctagaaggggagttgtagccccatgaactagtttcttgtctgggtcaggaacaagggccggctggggcctggggtgcagctggtgtcagggtatgctgtttgctgatgggcagggacacccctgcagggtctcgggctctgagcccaggacattccctgccccttrctcaccttggctgtgggctgtgaacattccgggaccctgggcatcttatctaggtccgtgcagcccaagggtcagccctcttgactgtcacatgctgcccccacccagcctaaaataaagagctcactgctgtgcttcgccgtgtggctccctcaatccccaccccactggccaggcagcacaaccacccctgctgcccatggcagaggccgctgaggatgtgggggacgagccacagcccagccccaaaccaagcctggcccaacctcttgaacatctgccagcctccgagaccctctgcatagaagcagggtcctcttggggctgtgcctggccaggcaggtgtgggcttcaccctcttggacaggagagctctgcagggcatcagtgggtgggaagggtggggtgaggctggggtccaggtcatcactggggacctgagcccagagcagtcacccgagggtctcaggaatcatcgttctgtgcatggcgacacacacatgctctgaggtgcayagaaggctgccgggcgtggacagcatctgccagggcggtgtgggcagatcaggatggagggctcttctgcaagaaaggcacccctggcaccttgagatgccatgaggaggcaggtggcagggctggtggggtgggaggtcccaaccctagatgctaccaggagctggctggggggcagtgttgctgttctcagggaaacagtcttaaaagcagtagctgtggacctcggtgggatgctctgtgcttgcaccctcagcaggggctggtttacccgccaaggaccccatagggagacagaagtgtctctctgggtggggcagagctggagcatctgccccagccctcgatacgaaccccagctggccacggtgccttggagcttgggctgctccggcctcagcgttggtgtctagaagatgggattttaaagtccgcttcatagaatggtggagatgagctgtgtcttgaacaaatcctggcgtgggagcccctgctggcttggcatcggggccacacctgcagcctgcacactgtgggggcygggaacgtcctggctcagctgtatccctggcgctgagacccggcagacatgttcaagtgctgctgtttgctgtgcagctttgccctcgctgagcctgcagctcccccataagacaggaatgaataatagcagcttccttttagaaatcctacaaatggccgggcgcggtggctcacgcctgtaatcccagcactttgggaggtcaaggtgggcagatcacgaggtcaggagatcgagaccatcctggctaacacggtgaaaccccgtctctactaaaaatacaaaaaatcagccgggcgtggtggcccgcacctgtagtcccagctactcgggaggctgaggcgggagaatggcgtgaacctgagaggcagaggttgcagtgagctgagatcgtgccactgcactccagcctggacgacagagagaaactccgtctcaaaaaataaaaataaaataaaaagtaatggctgggcgcagtggctcatgcctgtaaccccagcggtttgggaagccgaggcggacggctcttttgaggtcaggagttcgagaccagcccggccaacatggcgaaaccccgtctctactaaaaatacataaattagctgagcgtggtggcggtagtcccagttactcaggaggctgaggccggagaattgtttgaacctgagaggcagaggctgcagtgagccgagatcacgccattgtactccagcctgagcacagagcgagactccatctaaaaaaaaaaaaaataaaactattctgcataagcagtgtccaaatcataacaaaaatcaaatgaaaagtaaacaagatgtaaccttatatccattggaccggagaagatgaggaagctggacgatgctgagtacaggagggggagggagctcacgcacactgtggggtggacacggcagtggccccaggggaccaggtgcagtcctggagtccaggtaagtgtggacggaacctccgacctggcaaggctgctgccggttttagaggatgtatatgcagtggaggcaatggagtgtctgtcccgggagggcagggaaggacggagaatccacacggcagctcatggagtgtccatccccgggcaggaagggagggagccgtgaatgtgtacagcccacgtagccaccgctgcctaacaaactaccccaactcaggggcttaaatactcaagacgccaggcatggtggttcacacctggaatcccagcacttcggaaggctgaggcggggggatcacttgagcccaggagtttgagaccagcctgggcaacatagtaaggcccccctctctactaaaaagttaaaaattaggctgggcaccgtggctcacgcctgcaatcccagcactgtgggaggccgaggtaggtggatcacctgaggtcaggagtttgagaccagcctggccaacatagtgaagccctgtctctgctgaaaatacaaaaagtacaaaaatcagccagatggctcctcagcatcatgggaggctgtttctaggtggtaacccaatgaccaggggttggattcatccgaagagctgtctgctgtctatggttggtgccagctgtcggctgggacctcattcagggctgtcggaacgacgacgtgaggactggatgtgttgccaggggctgccaaaacgaccacaaaatgggtggcttacagcaacagaaatgttctctctcaccatcttgcaggcctgaagtcaaaatcaagctgtcagcagggctgactccctctggaggctttagggtagaattctgtttgcctccagtttctggtggctctaacacagctgtgttaccttcgctcacggcaccctcgttccactctgcctccgtctttaagcggtcttctctcctgtgcgttcatatctaagtttctctctcctcataaggacagcagtcatactggattgagggcccatgccaacccagaacaacctcatccttttttttttttttttttttgagatagagtcttgctctgtggcccaggctggagtgcagtggcgcgatcccggctcactgcaagctccgcctcctgggttgacgccattctcctgcctcagtctcccgagtagctgggactacagatgcccgccaccacgcccagctaattttttgtattttttagtagagatggggtttcagtgtgttagccaggatggtctcgatctcctgagttcgtgatccacctgcctcggtcttccagagtgctgggattacaggcgtgagccactgcgctcggcccagaacaaactcatcttgatttttgtctggaaaaactatttccaaaaaagtcccaagaataggctgcaggtgaatgtgagtcgcaggtcgaagttgcaggccaaaagctctgcacacggccgtggccttctcactctagtggctgggttctgagggtgtgttagtccgtccccatgctgctgtaaatagctgcctgaggctggataatttataaagaaaagacgtttaattgactcacagttccgcatggctggggaaggcctcagcaaactcacaatcatggcagaaggcgtctcctcacagggcgacaggagcgagaatgagcactgaacaaaggggagaaccccttataaaaccatcggatctcgtggaattcactatcacgagaacagcatggaggaagctgcccccaagatttaattatctccacctggtcctgctccagacctgtgggattacaattcaagatgagattttgggtgtggatacagaaccaaaccatgtcagaggccaaggatctcaagacaaggccagggtatggcatgtttatgatttagccttggaattcattccacatcagttctattccatgggttgaggcaggtgcaaaaacccacccaggcctatkggaggagagctaggcccactgctggatggatggactggtgttgccaaattcagtgaggacaaaggcagaacagttacctccaccctcctccgcatcagaagaagaataaagatgagacttacgaagttagctgtcctgaggactggtgtggacccatggtggcactgggcaccaagagtgagttcagtaaacagtaagtaaaagagctccctgtccagaggtggccacctagataactcagggagatccaccgactgcatcacgatttttttttccagacattctcgctctgtcacccaggctggagtgcagtggcacgatcttagctcactgcaaccgcaacctctgcctcccaggttcaagtaattctcctgcctcagcctcccaagtagctgggcttacagacatgtgccaccacgcccggctaactttcgtatttttaatagagacggggtttcaccatgttggccaggctggtcttgaactcctgacttcaggtgatccgcccgcctcggcctctcaaagtgctgggattacaggcgtgagccaccgcacccggtcatgatcactatttctaagatgccagcagggaacttccaggtaaaaaatctaagaaaaaggggggacctcgccgcccaggcccagggaaagtttcaacaaacttgggccttggttttggtggcctggagagatgagggacacagacgtgaagtagcaaagcctgcccaaagcgggggtgtggggtaggggtgggtttcggctgggacctccaagggtctccctcatcctcctctacttctgggcaatgcgagaaagtggctgtagcacagaacagaggaacccgagcgaagaaaacgtccccgggaagtcgtggcccagatttagcctgggtggatccgcagcccaggtcagcttttagcctagagaggggggcggcttcgccctgcctcagagacccgcccagacgatgctctcaagggctgcagatggcaagtgcaggaggccgggaagcggagccagcataaacagaatctgaggtccccgcatccacctgaggctgctgtttcagacgagtctgaaaggcttgtccttccgcccaccttccgtgccgcgggcccctccctcaaggggatggccccgccccacaggggaggcccgcccccggatccggccaatccccgccaggtaatgcaggtggccccgccccgcaggaaaggctcttcccaggatccagccaatccccgccaggtaatgccggtggccccaccccccaggggacgagcccgcgcacctgcttccccgcggccgggtcgcctggggctgggtccctgtctcgtggggaggagcggcccaggcacaacgttccctgagcgcctgccatgagcccgcagccctcggcccagcggcgtcgtgaacgataccggtcccgcgaggagacgggcgacgcggtgacaggaggctctcggggtgcctcgcgcaggggctcggccgggctgacacctcctcctcccctttcaccaggccccgcccctcctaaattattcggaggcggggcctgcgccaagccccgccccgcccccagcgtcacggccgcggaccccgggcggagccgactcccggcggaagcgcgcggcgcgcggggaggcccgaactgatccgcggcggccggagaccgctggggacagacaggtagcgccgtcacccgcgggatccgcagctccatctgccgggcgaaggggctctggtcgggagagggctcagcgggcggaagcgcgtctctagagaagggtgcggtcgataaccgggggcgcccctggaaggccgaggtacccaggctggagggaggggctggaggtgcgggggcgctcaactggaggggcctggatcgctgggtgggcgggcagctgatggggccgaggtctccagcgtagggggtgccgaagataccgggggcgcccagccgctgggggcggggtctccaggctcgaggggtcctggggacgctgggtgagggttcggggagagcgcggcgggctgggcgcggccttaggtccctgacccccccgacccccgtccgccgcaggatgggcagcagctcgctgtccgaggactaccgccagtgcctggagcgcgagctgcgacggggccgcgcgggcgtgtgcggggacccctcgctgcgcgcggt

SEQ ID NO: 93262 - DNA, 38819 bp, Homo sapiens
taaatgccagtgagtgctaaaggattttagagaagtgcagtatataccattttgggttccaaagcttccatgatagccagatggttccgaattgtgtctgcagtctacaaaaaggttgctaggaaaattggctttgttttacttcaaaataatatgtggtattacagcttcacttgagacattttccagcactttgttgcttgtgtctatatctgctattttagattttactctttattctgcactacattataaaaataatttaacacaaggcagaaacctacgattacttttgtggtaggcagcattaaaccataccccagtgtttataaaatgatgacaatgagctatctgaggattttgtctgtaagtaaaagttacaggagatttaatctcatttattttttgcttgatatatatgtttattttgatagtttcagtgaaccatgttggttctaggaaggaaaaagattggacaagtattgaaaatttcatacctttaccactacaattcctgatatcgtctagacagttttgtaacttcagaacatttatgacttgctttgtaaaaggctcatagtatttaactcctcgctgatcaatgattctagcatttttttcatgaaatatttattactgagaaggaaaagcaaaataatgtcaatgttgcatatgtaactacaaaatgcatttagaaattcaccactagctgttttgtttgctgggttataatatttcatttgcatttataaaactgcttagggaaatgtttatagttcgcttcattccattccttcgcgaaattttggtatttgtgatgtatacatcaaagtggtcatctgtgtttgaaaacatcagagatttctttaaaaatgttcaggcaaaaatatatagacaaaataagagtctcttggactttaatcttttcgattaaagctccagtggtggaattttattcttgagctttcaagaaagagaacagattttttagatgaaaagccgcagactcatttacaaagacgtaatattttcttgtgctgatagcataccctgagggcccccacccaggataaagagaggcggaaagaagattctgtcacgatccaaaggcaactggttgatgaggccaaataagtacatgatgatttatttgtgtgtcaggtgccaaggtgtgggatgtgaagagttatatctataaaccaaaatgaggcagaccacagggtagacgttggtaagtgatgaatgtgaaagaagtcaatgtcagaaatgatatacttcttgaggcaaattagaagccacattctctgcagagggttctctctataaagggaaaaaagagggggaaaggaagggagctaactaggtgccaggtactcttttaggttctgggtgtgctaagaggaatatgacatcatctctgtcttccgggagttcacaggctagtaggagaaaataatattgtgtatttgttaggctccaggcacaccgcatataccatcacatctatcttcatggaaaaagataaaaactaatgaggagtggccttcatttggtctagaaaacattcaaaaaggagaatggggtgataagaccttatctgtgtatccaggtcttcccaggagagaaaatatccgtatcactttaaaaacaaaacaaaacaaaccaaccaaacccaaactactcagtgttctgttactttggatggatgagcttatgatcctgtttccagacccataaacccaggaaacaaaacttgactgtgaactgaagacccttccaagacatagtaaataaagagaatgaggctaaaatagtatatctgatttgataagacatatagttatatatagacatgctatgagtcagggcatgggaccagttgacacttgaaatgtaagaagaatattctagaagtccagattacagtcgctagataggagactgaagcctgagcaatccagtgcagtgacctcagaattaatgttgggaggcagaagaggatagtggtgaagtgcacaggctctgcagtcagtggcctgtgttcatatcctgggcctgacattgaccagttgtgccaccttgaataggctacctaggttctctgggtttcagtttctttgtcggtaaaatgagactaataatagtatttgcttcacagggttgttgatataaataaatgagataatacattcaaagtgcttagcaggatgcctggaatatagtatgcagttaacaaatattagctgttgctattattccgagaatgaaacctcagaagcatgcagagtttcagctagaatgagggaacttcctttgagtcacgaaggaggcaaaattcgtgcaataaaaaaaaaaaacctgtacacagcagacagaaagataaaaacactttccatctcgaatagattgtgcgagttagaatataagttgagttagatatgccactactatgtccctagagccccatcctttcctctatctcagctcttgttaagtgaattataattgtctgtttgcttgtctgtcttcttcactggacctatgagctacttaggggcagatactgtacttttctgtaacctaagtacctactataatgtctggcatatggtagatgctcataagtgttggttgaaataataaaaatatttaagacaggcttaaataaacacacacaacaaccctgtctctggcttctcacttaaaaagggcatttagaaagattggcctcataggtaaacccagagattatcaaaaggaggtgctcttttgtaaaaaaaacaatttttttctttaatcatttttgtaaaggaagtgaattttagtaagtgctgagagaatgtgtaaactcaccacaggtaacactgtcataacactgtcacaggagaattcacacctataaatgagctagtggaagaacaaagttagttttgaaaggtcagagaaaaagattttgaaatgtcagagccactctataaaactgaccacccttggcatcattcttttaatctacctgggtttgagaatagcctagggcatttgaaatgaagacaattagcacctcagacagggcttccacatgcaaaattctgtcacctctcagagacctcaggagttgacaagtttggttaagaagatactttcaaccttggctggcagtttttctaaaatttcaatgcttttataatctgatttaaatggcatctatattctaaaaggttgtaactgtgaagctctcttcctccattctatgattttcccccttaagttattgtaaaatgtcaagaatgaaaatatttcctttattgagggagattgaggaaacaggtctttgttcttgtgcacaaataagttcaattcatttcccctctgtttctctctaaaacacatttggcttttgtttagagaatagaatgttaaacctagacgtgaccttaggggtcatctggttcaattccatttgacagatggagaaaatgagactcagagagaagtgatttagtggcaaaacatggcatatatttcaactctcctacttactggactactgctccttccaattcatcttgtcatttcaaagacgaccataggcatgtagaaccaatattgtgtgtgtgtgtgtgtgtgtgtgcgtgagtgtaaaagagaatttcagtattttttcttttattgagagcattaagttcattcattcattcattcacacaacaaatatatatagcacctactacttgccagacacaggatacagtggtgagcaaagtacacaaaatccctccatcatggaccttacattctagtgggggacacagacgataaaccattaattaaataattctgctcctaagtggtttatacttgtacttggggtccattcttcctaactctttctctgttggtgcctctactatctccattgctctcctctttcattttctcccatttcctctcgtgtgtatggggagagaaggaagagagtcatttcaattcctcttttctctacgcttcaagctcagtgtgaagttttgaatttgctaaagtcaggtttagtactggtgtaggattagagtgaagatgtcagtatttttyatcaacactgcactagtgggctggctcggctggctcagctgtcagcttgcttgtaagatgacaatgaggtactggatgtgaaagttgtactattaccttataatttatctgttttttagtgcaattttagttgtgctgaaccccgtcatacctggctgctttgacaggtgtgctattttagcaacatggaacaaaacagagaaagaaaaaaagagtgcatggtacgcttgtgctgtcagatccaggttgctctgttcctaagtttatggatgatttgttcagagttgttaagagacaaaaaaaggttaggttttgttttcacttatgtgacactgaatgttctcacagttcacctcacaggtcagctgttgctcatatggactgatataaagggatccctttccctgtctcctttctatttgaaattccaccattttgattaattcctctgggctaaccatttgcctgctcaatatatggagagcccaaggtggacaacctttcaaatccttaatgttggagtatgcattcatatatcagattaatttcttccttgatccaaagcatgaaaaggggtaagaggtggagttggtcaaaaacatgtgaggaaggaagatgataaaataatattggtcccattccccagagccatccccaaatgtcaccttgaatgctttaaaaaaaaattcttaatgctgaaaatgactagtaggagacttatgtttatactttgcatactaaggctggacactcttcaatcaagaagaaaagttgctaccagctaccactgaaatcttagaggattgttcttaatcctagtagatgaagagcaaatatctgcctttggtgcaagtcagctctgtacatccaatccattggtaagacatgtgaggaattaagtgtcgttctcgctattgagttcccagccttgccatattctcaaagaactacacactgaagttgcagaaagcatataatagacgacatagcttcagttatttaaattcaaattttaaaagtactttacataatctaaaggtacatgtacaagaccattcagcttcagcaataaataaagtcttactctagtgaaaatgcaggaagctttgcggaaatattacctagcacattttgaaatagaagcaatgttttatttcagagaagaaaatgaaggttgaaaggttttaaaatattaaagacagtttagcctcaatcgaagaaataacattttctagaaacaacagagaataaaagttacaacaaaattatcaacaacttgcaaatgattcaaaacagattttatggacaaaatgctgaaaggtgggccctgtacaccaaagggcacatacaaatccacataaaggcaaagcaccagttaaatgattcacagtctcatctaaagcccatcaaatagatacatctggaacatctttggatgtacattgtgacttttgtatctcaactagcactttgggaccttggacaaggtgttaggaaagaaatcaatatttgctcaggatcaagacttctcaagatgactgcgtgaggtagaaggaagagggagaagaagaacttgcccagagttcactgttcatctactatgtctgattctgtaggagtcttcatggccatgttcagtaatgattgcatactgacagtactgataaaactatcagtgttttgttctcagagctcttggtcctttcattttgtcagtgtgtttttgccctacgtagtgggtccacataccaacagagacatgtacaacttgcctctatcatcaactccttatgggctagttgagctaagttattcctggtggcctctgagtaaaccgcaagaacagaagcattactaagcatccctgtctgagtgcaagggtgtgtgttggcagtacagccccaatcttgcaaaatccttcttccaatgttcctcccctctctgtatgaaccctgtgttggggggcagaagatggaagcccttggcaagctcgatcgaaccaagctactaaattgctgagctcgttttaactgaagtgtgagaaggaggtttaaggcaagtagacaacatcctgttgttggggtgcttctctcttttttgcacatctggctgaactgggagtcaggtggttgacttgtgcctggctgcagtagcagcggcatctcccttgcacagttctcctcctcggcctgcccaagagtccaccaggccatkgacgcagtggctgtgtrtsatggcaaaatcagcagggaaaccggcgagaagctcctgcttgccactgggctggatrgcagstatttgcygasgkacagcgagagcgtgccaggcgtgtactgcctatgtgtgctgtgagtatgatacggtggacatgggcctgctgagggtgtgggcggtgggcaacagcagctggggccagggtggaggccgaggcaggcaggggcgccggcgttagcagctcgccgacgcctcctccgtggcccaccctcaagtccagcccagggccgtggtggaacacactttcgcctcaatccctcgctggggatttcattccctgggcctcctgctctccagaaggccctcaccagagccttttggggcagctgcagagaatgccatttcgggtggtgaaatgtggtccacagtttaccttcgctccgggaaagacccaggctccccacttccattttgacccctatcgggtggcgccctgcgagccttactctagctctctttaaacgacttttgaagtgtcatcccaaaggaagagcatgacattcagagagaggaggcacattaagaaacagagtcaattactttaagaatgcaatgccagttaggtcgagatgctgagagaggagggggatgtgtgtcagtaaaatcacctctctggatctgctgatgtagcatcctttagaaaagtagtggggggtggggaggggcaggggatttcagaaataggacccttcttgataaacgttaggactcacaatagtcttaaagggaatggagggaaaacacccttgttatgattcagctttgccatttgcctaggcatgtctcattctaaggcttcattttgaatcaaattcatctgcgtctttgctccagggctccggagtcaggcagatctgagactttgtcctgtgctcgtcagatgttaggtttgtgacttgggcaaattaacctctcagttccccagttttcttatccattgaataggtatcatattactgcctacctcataggattgtaagattaagtgccataatgcagtaaaaaaattagcactggggcctgacacctagtaaatgttcaataaatgtaagctattggtattattattataccaaagatatattattattttatcttctcttttcagttgatttcttttaggaatcatgggggcatttctaaggaaggacctagctcaggcattattgtcagcaggataaaaaaaaaaatccatgaaaacagcagccctgcattgtaggttctagacagaaaccaaatgaggttaaatgcttggtagtaagttcagcatctgataataccccacaagagtttgaaataccttatgggtcagtgaagaaagattatcctgatgctggtgctagaagatttttcactgtatattgttttttaaaaacggtcaagccttgtttgtggcagctctcaggtcatgctaaatacatttttcacaaaggcttcaagggaaatacgtggaagctattgaatgtcttgggcttgaatctttatgttttgcttatataattattgttcccgtgtggaacctagggaagggcaatgaaaaccagctaggattcttaggctcttttctcattgaaagaaggtggagtgagtgggtgggtgaaaggcgctgctttagggaagctgacaaaggagataacatgctccttaacccaaaggtgaaaaagaatgtacaaaacaagtctgggcaggggagggacaacagggtatagtgagaggcaagatatacctaaggcttcagcctcacggggctcctggccgtttctcaagctcctcaaaaatgcccccacttaggatttctgcgcttattgttccttctgcccaaaataccttcagttcacatgtttgttcaactgtctcctccctcagagaggacttgcttgaccacctatctagaacaagtgccctctccctgtccctgatacactcactccatctctttatttttcttcaaagagctttaaactatctgataatttgcttgtttacctacttattgctgggctgtcctgcaaaaatataatctccatgagggcggagatactgtctccatcaccagaaacacaggaacacataataggcactcagcagatatttttgaattaacaaactgtcaaggcaaattctgttctttactgcaataaacggaatggccattgagaggttagggtatggactctgggaaagtcactcaaattctctgggactcagtttccatatttataaaacaggaatagtaatgtgtatcctaccttctgcaaaagattgccttaagtaccttatgcaagagagaagggcagctttagacttttgcctatgtaggccggaaccacatgaggaattaacttaggcaggtgagaaattatcaagcatttaagttttcgcccaaagtgaatcttgcataaatgcagtttttatgactcttagttctccatgaaaacctccttgtgaagtagcggaaaatactagacaaattgggagttcccttacggtgtctttcaaatggtacactggggcctcaaagtcttatgtgactgttagggtgatagccagaatgtgctgcagagggaagatatgaggatacattgccttttatcagtttctcaatgtttttgagttgagtgtcccttttgataaatgtaaaaatttcattccctctttttggtgctacactgtaattataaaatcagattttatttagaaataaaccacgtactcattttaaaccagaacacttatgatatgcagtcgaaataacaatataagtggtatcatatacacatggacaacaaggtatagctgacaaacatgcattgattgtagggtttactcagaatggtttctcattctatcttttgtttactcctattaaccaagaagatttaattgagctatagtttttatatttttattgtagagataatacatttcatatgccttcaaactgtactttaaactgtactttcaaacgatgcttgcccttttccccagttctgaacctcctaatcatggctttcagatatggccttttcttctgttctgatttagaaaatcgaaaattgaactgcttcataaagcactaaaggagttttccatttataggattgctcaccttcattttaagtaataagtatttctttcaattactttctctaaataaatatagatttttgtataagtctattaaaaatagttccttatacctattcattatagaaaatttgaaacatatagataatagaaattagagaaaaatcatctatagttttataacctaaagatgactattgctaaaaattaggtgaattttcttctatattttaataagatgaattgctttttgagcacgtgtgctcttacaattgtattcttacgagtgacgtatttgactactaaaaagtttgatttttgtatgcgtcaaaaaaagtaagggcaaacaccaaatgttatatatttatatatatataaatatctaatatatataatatataaatatataatataaaatatataatatataaatatatattatataatatataatatataatatataaatatatattatatataatattatataatatataatatataaatatatattatatataatattatataatatataatatataaatatatattatatataatattatataatatataatatataaatatatattatatactatatataatatataaatatatattatatactatatataatatataaatatatattatatactatatataatatataaatatatattatatactatatataatatataaatatatattatatactatatataatatataatatatactatattatatatagtatattatatactatattatatagtataatatagaatatattatatattgtatataagataatatattatatattgtatataagatataatatattatatattgtatataagatataatatattatatattgtatataagataatatattatatattgtatataagatataatatattatatattgtatataagatataatatattatatattgtatataagatataatatattatatattgtatataagatataatatattatatattgtatataagatataatatattatatattgtatataagatataatatattatatattgtatataagatataatatattatatattgtatataagatatattatatattgtatataagatataatatattatatattgtatataagatataatatattatatatatattataaatatgtatatttttatatattattataaatatatatattttatatatattattataaatatatatttttatatatattattataaatatatatttatatatatttatatataaatttacatgtgttaaaaatatgattgtgttcttgtattcttacaattgtatacgtttcccatttcccacttaatatgaaaaaaatacactcatatgtaatgttcttagagacaactttaagatgttatttttaatggctgcatggtagtccagctagctagtaagtataccatattttgcttagccagtcacctacttttagacatttgactcattccatatttttgttattataaattccatcaggatgtatatttcagtacattaaagtttccttgcatttatgattatttccttagaatgaatttccagtgtggaatttctaggtcagaaaacataaacagcttaggattcttgatatatacatgatcatgagatattttccctaaatggttattccaatttacatgctcacctgtaatgcatcagtgtccatttcaccacaccctcactagaartgggtattgtagttaagaaaattttcccttgacatttggcctgttattctttattttatatttacactctatctctttattttccacattttatattcctttggttagtgactgtcattttatatggttgttaagctgttgtatttcctcccatgatttggctttttgtgtatttttctcatttaaccagttgaatcatactttttttaaacacactctatgtgtatatatatatatgtgcactaatccttgatctattgcaaggtatcctttcgaagtttggtgtttgcccttacttttttgacacatacaaaaatcaaacttttttaacacattgtaaatttatatatatactaatccttgatctgttgcaaggtatgttttctaagtttggtgtttgcccttactttttttgacacatacaaaaatcaaactttttagtagtcaaatacgtcactcgttttctttgtgtttgatttcttccttggctagaaagtcctttccccttgagatatgtcataaaacttcactgcagtttttgttttaaattacggttttgttagtttacatttacctctttaattccatttggagttgtattttgatgtggataaaagatctaatttgattttgtttccagatagctagcaattgtcctaatataatttataaatacaacttccattcttcattgatttgctagccgactttaccatatattaaattcttatatataacagttactgtttctggactatctatttgtctcaattgatccatttattcttgcactgatagcactatagtatgataatgttttaatatattttaaaaattatttgctattcttatctgttggttcttcaaaatgaaatctagaatcattttattaagttaaaaaaaattcattggaccaaatgttttagctctcacatgccagtgagaacacatgatatttgtctttctgtgcctggcttatttcacttcacataatgacttccagttctatttacatttctgcaaataacaggatttcattctttttaatggccagatagtattcaattgtatatgcatagcacattttctttatccattcatctgttgctggactcttctatatcttggctactgtaaatagtactgtgataaatgtatgggcgcaagtatccctttgatatattgatttcctttccttttgatagataccctgtagtgggattcctcaatcatatggagatagagagtaaaatgatagttaccagaggttgggaagggtggaaggcgatgaagagaggttggctaatgggtacaaacagacagttagatagaagaaataggttctagtgttcagtcgcacagtacggtgactatagttaacaatatcttatgtattttgaaatagctagaagagagtacttgaaatgttcttacatatagaaatgataaatgtttgaggtgataaatatcctaaatattcaaatcccctgatttgattattacaatgcatacatgtgttgaaacatcacactgtaccccatgaatatgtacaattattatgtatcaaaaatttttttgaaaacaccattggggttacattaaatttattaataaactaagaatgaattgtcatctttaaataatttagtcttcccttcccataacataagtctctccatttataatttttttgtttatatccatcaatcaagttttatagttttctttttgtatgtcttatacattttttgttatttcgagttattgtgtgtatgaatgtgtatgctgatttttaaaaatcataaatgggatctgtttccactatattttctgtttcataggaaagctactgattttatgttctgttcttgtatttatccagtgtactgaatgctcttattaatgcagatagttttttttttaagtttattccctttgttttttttagatacatcaagtttcttttcactgaggtacatatgttctctcacatttcttcccttctcaccctcaatgtagacagccattgggaaagttctgactgcccagtgggattgatggtgataagacgagaactaatttaaaatatttaaaataattagctcaaaaaatagtttatttccatagttggcatccttctggacatatctgcctttgtttgctacttatctgatggaagatttggaagaagaaatgctgttataattctttagcttcaaggacacataatgaagtcatttgacatgtatgtctttagataaatgcataattatctttttgtcctttaagttttaaagggacaactgggaataaagtgcctgtcaaacaactgaactggagaaatgggggaggagcagtgatgaaataaaattccagtttatcagttgcaataaaggggaacagtgtggcaaagaacttgaaattataacttaacttcatttagtgagaaattacaacttgcatttagtttttgaattcaattggatatgtgccttggtgccacatttatcttcatgataacttaggccaccaacattattttcaatttcctgaatacaatccagtggtaaagtgagcctgaaagccagcctaggattgtttgccacatataaaccaccgaatggataattcacggcaaataagccaagtactgactctggttgacaatgtaaaattaaagttgcaagattagcctgaagatgtcatttagcttaagcaaagggggagtctgggttgatctctttcgggctctccccacctggcctcttcccttcagctccctccactgccctccttctctcagtggacagttctagctccatgtccaagcagattccctccctttttgagaattgtgcttttggaattgtcttaaagaccaatttgttaatacattccctctagtataagagaggggcagcacagaatggtggttaagagcccagatcttccagccagatctctgggtgtgcatcccagctctgacccttaactagctattttcccttgggcaggttactttaactttctgtgtctcaggtttcttacctgtaaaacggcagatggtgataatgagagtacttacctcacagggttgttatgatgattatgacatgagttaatatttgtaaagttaacatgtaatatgtgttttttaatatgaataaaagctctataaataattgtaatacaaagttagaacatcataagtatacgtaaataaaacttgatatggaagttcaggggaagaagtggttatatttattttcatgactcatcaaaatatcacatagttttaccatcacacttgaagttgaatgactttcaactgtttcaaaaattaaaattctctctgaaagaataaagtttgggccattgtaagtttggaaagctcttgaatcagagtatagtctcaaaaataatggctttgtgtaggatactattcctctggatataaaagttctgaaacgtttgttaaaaatcattatagttgtgtcttgaattttgtatgtagcattagttcgtatagacgtagagggcataggtactggcttgctttatttgaaatgtcatgaagaagtcagatgtagctaaatgttttcttttgtgtagtacttgacgtggtataaaaaaggaattgatgtggatttgtcagttctaaaccaggatctgtccccaacactgacccactgagaaaataagaaataagtcaggttggttgcttcttgcttcttgtccatttctaacctggacacttttttacagttagggacaacttttgatgaaataaagacaaatttcaatatcagcagagactagattaacacatgctttatagtaattaaaataaattaaaggcaatgataaaactccaccgttctttaacaattattcatgttctgatttttttggtgatacattttaaactctaggattatcaaaaagtccaaaaaagctttaatgagggaaggaagttaaaagtacactacattgctggtttgtctgtattaagggagggagtcagaggaaatataatcctgaaggggatgtaacaatttaaaaaaatgaattacatttttatgagttgtgatttgcttaggctaggtttgtaaggctccaaattgtaattctgcttgtttttcttaaaaaattagtcacttaaataactacatgaaaaaataacatgcaagaatgcatttacgttagtttaaatttacttctagtttatatacacacagggacagacagttttgaatagttgtaatcagagtggcatccccttgtgcccactttttacacatactgtcattttatttttttatttttattttttgttttgtgtgtgttttttttaatactttaagttctagggtacatgtgcacaacgtgcaggtttgttacatatgtatacatgtgccatgttggtgtgctgcacccattaactcatcatttacattaggtatatctcctaatgctatccctccccccaccccaggacaggccccagtgtgtgatgttccccttcctgtgtccaagtgttctaattgttcaattcccacctatgagtgagaacatgcagtgtttggttttctgtccttgcgatagtttgctgagaatgatcgtttccagcttcatccatgtccctacaaaggacatgaactcatccttttttatggctgcatagtattccatggtgtatatgtgccacattttcttaatccagtctatcattgatggacatttgggttggttccaagtctttgctattacacatgctatcattttatgtcaacatagtccacatacttaaagttttctggaaaacctaagactctaacatttttgaattttggcataagattttatttgtttatttatttatttatattttttgagacggagtctctctctgtcgcccagcctggagtgcagtggtgtgatctcagctcactgcaacccctgccttccaggctcaagcgattctcctgcctcagcctcctgtgtggctgggattacaggtgcgtgccaccacacccagcagttttttgtttgtttgttttgtatttttagtagagacagggtttcaccatgttggccaggctggtctcgaactcctgaccttgtgatccacccacttcagcctcccagagtgctgggattacaggcgtgagccatcgtgcccagccagcattaacattgtaaaccttcacctttgacatagaaagtgtaattttgaaccattgtttctgctataattcctttatttttccctaatttatatatttatttctaaactggcaaaattgtatatatgtattgtgtatgacatgatgctttgaaatatgtatacatgtgtaatagctaaattgggataattagcatatgcattacctcacatacttacattttgtgatgagaacacttaaaatctactctcttagcaactttcaagaatacaatacattgtttttaactatagttgccacgttgtacaatagatctcttgaactttttcctcctaacctaaatcttttatcctttgacccaaatttcccaatccccaccctgcacgcccctacgagcccctggtagccacccaccattctactcttggcttgtattagttcaactttttaagatcccatgtataactgaaactacgcggtatttgtttctctgcgcatagcttatttcactttacaaactgtcctccatattcatccatgttgttgcaaatgacaagatttcctttgtgtttaaggctgaatagtattccattgtgtatatacaacatattttctttatccattcatctgttgatagacatgtaggttgattgcattatgtcttggctattgtgaataatgctgcaatatacatgaaagtgcagatttctccttgacatgatgatttcatttccttttgatatatacccagcagtgggattgctggatcatatggtggttctatctttaattttttgaagaactttcataccgttttttataatggctgtactaatttatattcccaccaacagtgtgcaagggttcccttctctctgcatcctctcttgttgtcttgtttttgataataaccatcctaacaggtgtgaaatgatatctcattgtggtttcatttgcatttttctgatgattagtgaggttgagcattttttcacatacctgttggtcatttgtatattttcttttgagaaatgtctattctggtcctttgcccatttttattttattttattttttttgcaatggtgtctcggtctgtcgcccaggctggagtgcagtggcgcgatcttggctcgctgcaaactccacctcccaggttcatgccattctcctgcctcagactcccgagtagctgcctttgcccatttttaaatgggattatttgttttctttctattgagtaatttgagtctcttatatattttggatattaactccttatcatatgtatggtttgcaaatatattctcccattctgtaggttgtctcttcactctgttgtttcctttgctgttcagaagctttttagtttgttgtaatcccatttatctatttctgcttttgatgtctgtgcttttggggttatacccaaaaacaattcccttattttgagcaattattccttatttaggggtgcttaggttagttccatttttttcactattaaaatagggctagtatgaaaatctttgtcaaattgcgttttcctcttgacttgtttccttggagtgtatgaagataagcaaggttatgcagtcaaaaatatgtatggttttataggtctcgttatataacttgccagtttgaatagcgattttccatggacagggacagagtatgttttgtttgaaaaggcatattcaatattttagtttaattttatgttacaaaattactggtttataatagaagctatagaaaataaaactaagaaatattattggggaagaaaggaaaaaatggttcagaaacactgtcctgtgaagactgaaatgattgacaaaccttcagcttatactaaaataaaattgcattcttaaagcatagactgaatgactacggaggaggtggcacagaactgccctgggcaggtggaagaagccaggttgacaacagggaagttgccatcaatattcccaatgagatgtgggcattcgctttacattttaatcagtccttctgtaactttaatgttcatacaaatcacctgggcatcttactaaaatccagattctgatttaacaggtctgggtggggcctggaagtctacatttctaacaagctcccaggtgatgttgatgctgttgtcctgggaatgcaatttgagttgcactgttttagatctcttccttgtatgacatattatagtaagagttgactacaggggatccttggtcagttacttcagtaacttgaaagtgaaagatataaactgctggcctatttgaggggtgaaacaattttgctcattcagaaattggaggggttgtggggagaaggaaattgttaatattagatgagttaatcatgagaagttttatgtaccattcacaccaggttgttcagagactgaaggaggtacgaagttttgaagtggtactcaggttcctgctacttaactgaaagtgagataagatcagattcgttaggaaacaattctcaaaacagactcatttactttgactaaatgcgtctgaatgatagtagggagatagagtcattgtattttttagagacccactgttttagaaagtggaaaacttgttgcttaccattctgcttatcttgttgctgagattttaaataatgaatctccacatcacccttatgatactgaattattgccattaatcatttctcatagggaaaatggaactaagaacctatgctgtttcactgcttccatctccattttgctatgtggctttaagaaaatcacttaaaggcttatgttgagttcccatggtgaaaaatggaaatcaaagctcttgccttgttccccatagagtacttgctgaagttagtgggctttgaggtagatttcaagtgtttaaaaagacaaaagactttaacattgtaatattgtatatttattcagcatattatatataggcatatatcaagctattttatatatgatctaaatattctggcaatccttcgtaaaaaataaaacatcatataatccacatcagtagttaaattgaccttttgttcagtgtcacgaatcaagtaaatctgaatagtgtgtttcagatttgttttggccctttaggtaatcagttctgatgcatattgatgaaagatatagtaatttttttttttagatggagtctcactcttgtcgcccaggctggagtgcaatggtgcgatctcagcgcaccgtaacctctacctcctaggttcaagtgattctcctgctccagcctcccgagtagctgggattacaggtgcccaccaccacgctaggctaatttttgtatttttagtagaaatggggtttcaccatgttggccaggctagtctcgaactcctgacctcaggtgatctgcccacctcagccacccaaagtgctgggattacaggcgtgagcctaatttaattcacatatttaaatacttttatttccaaaggaggttaatggtaaatgtgatcatcaagtcaagcatgacactctgcttgtaaacacattgattttaaccagagttcagtgcatgtcctggctaggtgtggtggctcacacctgtaatcctactactttgggaggcctaggtgggaggatagcttgaggccaggagttcaagaccgtcgtggtcaacagagcaagaccctgtctctgcaaaaactaaaaaaaaaaaaaaaaaaaaaaaaaaattagctaggcacagcagtgtgcaactgtagtggcagctactcaggaggctaaggcaggagggcaaggctgcagtaagctatgatcaccctactgtactccagcctgggtgacagagcaagacaccattaaaaaaaaaaaaaaaaaaaaaaaagcatgtgtcctaaccaaaagatctctattgacccaaacttgtgcccaagaatagcaatcagaaaatttatgaaatgaatgatttagattcacattcaattgattcacaattgattttgattcacattcaaaaactgaaacaattcattataaagtttaccttactgttttatgaggtaaaattttattaggcaaattaagtaggattactatatatactaaaatataacaaataatctatatccagtacagtgtggggatcaggaactggggatctagaatcaaatgggcctgattcaaatcccatttttgcttcttaatctctagactgattttggttacttaacatctcaaagtctcagtttccccatctataaaataaatattacaacataaacctaataggatttttgtggggtccaaaggagataatgcatgtgctagaaacttaactttttatcctcctaaattcacacgtttaaacccttacctccaatatgcttgtatttggagataggacctctaggaggtaattaatgataaatgagatcataaggatggggctgtaatctgataaatttggtgaccttatgagaagaggaagaatgcatgtacaaagaagaggtcatatgagcacacagcaagaaggcggctgtctacaagccaagagaagaggcttcagaatgaaacataccttaccagcaccttgatcttggacttcccagtctccagaattgtgagaaataaatttctgttgtttaagccaccctgtctatggtatcttgttatggcagcctgaacagaccaatacagattttggtactgagaggaggagtattgctgtaacaaatacctaaaaatgtggaagtggccttagaactaggtaatgagtagaggctggaggagttttaaggtgtatgctagaaaaaagcatagacggctgtgaacagaatgttggtagaactatggatgttgcaggttattctgatgaggtctcagatggaaatcagcaacatgttactgcaaaatgggagaaaggtgttccttgttataaatggtaaagaacttgactgaactgtgttctagtattttgtggaaggtggaatttgttgagtaaaaaaattgactttttatctgaggagatttctgagcaaaaagttgaaggagtggctcagtccctcctgactgcttatggtaaaatacaaaaggagagagatgaattgaagaaggaattgttaagcaaaagggaactggaacttaaacatttggaaaattctgagcctttatgtattgcaataaatgaggaagcttgttctggagacaacactaagggtgtggctggactatctgtcactacttaagattacttatgatgttaaccagccatctgagcagaagtcaggaatagagtttggaaaaaagcagcagaaatattaccagtttggaccaaagagaacaggacagtatggtatagttatttggctgcaaacatggtttatctttcaagaaaagggaagaacgaccctgagggtgattcagagataaccagggctgccattcctactataggcccaaagtgcacaggcctggagggtaaggctgcctctaccttggtttcaaaaagtgagactgacatccaacagagccacataggtggggccatcaccctagccaaaggatgtggccaccttacagagctgtgggggtgatgctgcttttccagtgaacctgaagggcagaatattgaatcgaagaggattattcttgagccttaagagctaatggagtttgccttgctaggttttggacttgcttgggacctgtgacccctttatttcttccaatttctcccttttggaatgggaatgtctatcctcttcctgtagcaccattatattttggaagcacatagcttgtctggtttcatagtttcacagctgaaaataaattttgcctcaagatgaataatactgctaktctcacccacatctaattttatttagatgagactttggactttagattttaagttgatgctagaatgagttaatttcttttgaggccgttgggatggtataagtgtgagaaggacatgagttttgggggtcgagagtggaatgatatagactgaattgtgttcccccataatatgtttaagctctaacttccaacatgactgtaattggagatagggggtaattaaggttaaatgagttaaatcataagggtggggctctaatctgataggataatcataagtgtggggctccaatctgataggattgggggccttattacaacagaaaaggctgtctgagtacacagcaagaggtcagctactcacaaggcaagagaagagggctcaaaatgaaacttatgttgctggcacctcgatcttggactttccagcctccagaactgtgagaaagtaaatttcttttatttatgccattcaaggtatggtattttgttatggcagccaagcagactaatacagcaagtaaaactcttggcatgtagtagaaatcaattagacaaatatacaatatagatataaactgagtaatgggaaggaatgtttaccccatttaaaaggataagctgcttttaggaaaataaagttacaactaaggcactttggagatagtcctagtttacagaattttagagttgctcttccacaaaagtataatttaaaacaagcagcacttgtttttaattcatatattttttactattacttcatttataatatattatagggtaatatagtaatacagtcatgtgcaatatagcaacattttccttaacgacgaacagcatatacaatggtsgtcccataagattataatggagctgaaaaattcctaccacctactgatgttgtagccattgtaatgccacagcacaatgaattacttatgtatttgtgatgacactggtataaacaaaccgactgtgctgtcagctgtataatagtatagcacaggccaggtgtgatggctcgcacctataatcccagcactgtgggaggctgaggtgggtggatcacctgaggtcaggagttcaagaccagcctgaccaatatggtgaaattctgtctctactaaaaatacaaaaattagccagccatggtggcatgcacctgtagcctcagctactcgggaggctgaaacagaattgcttgaacccgggaggcggaggttgcagtgagctgagattgcaccactgcactccagcctgggcaacagagcgagactctatctcaaaaaaaaaaaaaaaaaaaaaaaaaagaaagaaaaagaaaaagaaaaaaatgtatagcacagacaattacatacagtacacaatacttgataatgataacaaattactgtgttactggtttatgtatttactgtactatacattttatcattattttaaaatctactcctacttatataaaaaaaagttagctgtaaaacagcctcgggcaggtccctcaggaggtattccagaaggcattctggaatatgaatatcataggagatgacagctccgtgtgtgtgactgcacctgaagatcctgcagtgggataagatgtggaggtggaagacagtgatactgatgatcctgaccctctctgtaggcctaggctaatgtgcgtatttgtgttttagtttttaacaaaaaagtttaaatagcaaagaatacataaaataaaaattttgaaacagagaaaagcttatggaataaggatataaagaaaaacagttttgtacagctgtacaatgtgtttgtgttttaagcgaagtgttataaaagagtcaaaaagtttaaaaaaatttacaagtttataaagtaaaagagttgaagctaagattaatttattattgaagcgatacagttttttttttttgagacaatctcgctccgtcacccaggctggagtgcagtggcgtgatctcgtctcactgcaacctccgcctcctgagttcaagcgattctcctgcctcagtgcctcagcctcccaagtagctgggactacaggtgcgtgccaccatgcctggctaagtttttgtatttttagtagagatggggtttcgttgtgttaaccaggatggtctcgatctcctgacctcgtgatctgggaaatataaatattttaaaataaatttagtgtagcctaagtttacagtgttcataacattctagtagtgtaatgtcctaggccttcacattcactcaccactcactcattgactcacccagagcaatttccagtcctgcaagctccattcatggtaagtactctcaacaggtatagcattctttatcttttatactatattttactgtgccttttctatgtttagataggtttagatacacaaataccattatgttacaattgcatacagtattctgtacagtaacatgctgtacaggtttgtagcctggagtaataggctataccacatagcctaggtggtataccatataggtttgtgtaagtacagtctatgatgtttgcacaacaacgaaatcacctaatgatgcacttctcataatgtatcccccttggtaagtgatgcatgactgtggcaatattatattgctatacattataatagtaattttataaaaatatagttatattcaatttatagtattatatccttatactattgccattatatttataacaaatattattaatattaataattatttatgtgggcctgatagtgtattatcccagtgaaatgttttcaccttaagtttcgatatgtacttaaaaataagtctattgtttgttaaaactatctaataattcatggttttatcaattacaacaggtccctgttgtagtttctttctgtccaaatggtctctcaacttgacaaatctttaggagcatgaatttccatatttcaaaaaatgaaaagataaagaaatctcactggaaactgtggttgggcagatacaatatggagacaagttagattcactatgctttacttcctatgaatgcaatgacaccatatacgtgtgtcctagtatatgtgacatttatatgtaatattaagctcaaatttaaagtatccattgttcttttggaatctttcagtaatggaagtttattctttcacaggtatcacggttacatttatacataccgagtgtcccagacagaaacaggttcttrgagtgctgaggtatagttgtatttatttttgcttctgggggtgtcaaggaggtatttgaaatttaggctggttttataaaagagcaaattatacattattaagtattcataaggtttaaatctctaaagctccaatccaaaattgttcatggatcattaagaaagctttagagaattttggtcccagtcctgtttagccatcattttgcagagttgtatgactttgggagaaagataaaaaagttgaagaattatgtcaaacttttagtgactatgtgaaatcttagaaagcatatcaaaagtaggtaaaataattaaatgaacaattatktaccaaatgataccaatatgagtattggtatcgtgggagattaaaaaacatgatgcttattttctaagagactamaatatacttgggaagttataacttgaaattaaacagttatgagtggaagaaactaggctttgtcaacaggtgaatctgggttccaggtctggtctcccctcctctctgataggtctatgatcttgggcaggttacttgacttttctgtgagccagtttcttcatttgtaaacggagcctaagaatcctcccttatgcacaaggctcawtttgaaaagtaaataagataacacacataaagaagctgtttgccacaaggcctggcacacagtgagccctcaaaaaagtgaactcctgaaaattgccacaactcctattaataactcaatctgtgcatttaaaattttctgaagtctagacttcaagaagttaaaatagctctcacgtttactgatttatcagtaagttggaaagtataaattacagaccacaaatgttttgaaccactgagatgaattaggccaagttttcaaacacacttttgctgtattatgtaaggatcattaaaactataatactaactaaagataaagttataccatttctaattgaaactatttatacctgtttatttaaaaaattctctgtatcactgcagagatgattgaataagaaattaaactttattatgaagaaagttatgtgtaaaatatactgacaaacacacacacacacacacacacacacacacacacacacacacacgtttgtatattatttcgccagaaatagctcttctccccagagaaatacccttcagctgctgaagaatattatgtaaggaaaggatcttaaatgcttagggtttaacaactttgtttttcaacttgttttcctgcattttgagtataacatcatatgagattgttacatgcttgtgatcatgttaaagaagagagggcttattgaacacaaatgccccctcatcctgttgtctgatctgacgttgtttatgtaataatattgtaattttctgcaccaagagagcagaagattggcatgacatccgcaaatagaaaatagtttaaaaaattctttaatttttgaaatgcatattgcatttttttctatctactaaatttaccttcttagcagtgcttttctaaggtgaaaattaaactagtgtatattctcagagctcataccacctgactggaaaaaatttctctagagcatattgaagaccagctgtgatctaatacatgtttccatggataactaagaggtgacagtatgggagatttgcaaatttgaagaatagctgagttcagtgacaggatgagagttgtcagtggtacaattcttgtgataaatgtattttcgaaactgggtaaatgatagatattaatactgatttttggaacaatgttttagtttgccatgctgcaggaaaaatcaaggcagtagcatgccaccatctgtgcatatattatgctagaaatctaggtaagtgagatttgttttaaagagtgtaatgaaatcaaaccctggccccactgaattatgaaagacagatatcatgtgtttttctagttttagagagacttttaggttaaatctttgcctagtgtattatcttatatgactcagactaaaagtttgttacattgttaatttagataattccacaatctactttcatttattaatatgtgatttgttggcaatacattattaaaaatgtactgacatcaccctgttgacatcagtgtcttcaggctttactgggtatatgatcaggagatcagcagatgttaaataattgtccttattaatctaagtaaaacactgtaaaataggccagtcatttgcttatgaaacatcagatccccaattcaaatagcttccatacttccagtgctattattcatttctgttagcatggataatcaagtgttagctacatatcagtacccataaaaatgttgcttctctgttttgttttgttttgagacagagtctcactctgtcgctcaggctggagtggtggaatggcccgatctcggctcactgtaacctctgcctcccaggttcaagtgagtcctgtgcctcagcttcccaagtagccgggattgccaccacacctggctaattttcatatttttagtaaagccaggctttcaccatgttgcccaggctggtcttgaactcctgacttcaggtggtccgccggtctcagcctcccaaaatgctgggattacaggtgtgagccactgtgcccggctatgcttctgttgataaatgactttacaagccacaagaagctaaaaagatgtgtggtttgaaatctttccacactttaggtgtgtatagtttttcttctgtttgatgaccctagcttcgctagatcctgtttggcccagttctaatctgaaaggcaagagactgggtcctgggattctgagccagttctgcctctggttgtctgtgtgactttgggcaagctgattaatttctttgcattcatattttcttatctgtcaaatgggaataactgaatcagccaataactgccattttgtgaggaaatagtgaaggcaagagataggaatgtgctttgaaaatgaaaaagtgcactgaggaaagtataaggaggcaatttgtgcctatgacctgcatttgcaatttggagactctatcttggaaccaacgaactgtttggacttctgcaagaatggccatgttattttggatgagttctcaatcgagctttaggaaggtggagggtaggtgagagagtggggtggagctgggtgagagagtgttctacatctactgtgaacatatgggggaacactaatatagagctaaaaagaatttttgtcatgttttcaatgaaaaattaccccaacataaggaaatgactgagagttactatggatagtgtagtatgctatcttcagcataccactatctagctgacagaagtcttcatgctcgccttcatgttttctcattaaatgctaaaaaaacaaacagctcccacctcaaaaatctaccagatggaatagctgaaaaacaacttaaaaaaaaaactagtcattgttcaattgctcatagcaatactattttattttacgtaaaatgacaggtttgagctgatgcctgaagcttggctcataagcttttgcaggaaattgttgttgatttcaggcagtgtctttgcaagacaactgatgtcaggaaaggaacacattttaatagtcacctgcaaataactgtctctttaaaaacacacaaataaataaataaaggtgaccttatatagtctttcattttcatgtcatagagaaaaccttgttacagtgacgtgctgatggagagaacaattttgggagtatagggaagtttcccaaggaggaaaaaatttaatgtgaagaatggcgcaggaaatattgtgaggtgaaagagtatgaggactgaactagccgtgcactgtgtgcatcataacagccaatttttaatttcctgtgtagcattttatattgtgggatgatggcagggaggaygggttgttggtttttcttttgttgttgttcctcaggctttttattaatgacctgtaggatctgtttttttgtttttgtttttgttttttcctgtttaactgcatcccctctgttggtgaattcattgtgggtaatggcctgtatacccttagaggtttgagatgtctgatggggagcaggcaggaagggcagggcaatgagcaagagcttgtacaaactaataccacctttgggagaactgaaatgacagctcattagctcctcttgcagggaaattcagccaaccaaagtaagctcttctggaatgttgtttttccttcttccttatgttttcaaatatttcaacaagttacacaaatgttacttctmttagcatccctagcacattttgtaggtctttttgtatcattatgagataggtaaataatttgcttggccttttattttccagayagcacctggggtacataaaagatatttccggaaaataaaaaatctcatttcagcatytcagaagccagatcaaggcattgtaatacctctgcmgtawcyagktgagaagaagtcctcagctagaagtacacaaggtactacaggtatgatttcctcttaatttttgacagggtttggaagctcagagttatgagtcaacctgttcataaccatataatcaattagaagttatgtaagaaaaatgcagtgagaaagtagatgtagccagcaagtcaaatgagaggtgacaatttatgtgctataattttcatctattattctaataacttttaataaatctctgtaaaaacatcaaaaattctataagcccataacattttaactgctcttgtctgtctcatcttgttctttcctgtccctttaataggtagctaagtatgatttcacttcactaattcagacacaaataatgtgaaagatggtataattcagagaacacctgggctgtcctttatctttgcttagtaaactgttttttccttcagggacatgaaagctaacgttagcctggcacacatgattctgatttctgaattggtggtgcttgaattaatgacatttttctgaagcaaaggaaattaaatagtgcactttattgttccactggcacatattgttacatatcctgagcaaacctattttagtgtatgtgtcgtgctaaagactgaataccagccaatgtctgtagctatctgatacgtgactgtttactcctctattgaatggggtttatcatttgtttggagtaagaggataggccttgattgaaacaataaatatttatgataaaagaaaacgagtccctttttgacagggacctaggctcaggcataaactgacaattagactcaagtggtgaattaaattaatgaatagttagcctttataatacaaatgcaaatagagctctaatttccaagttggctagttgtttttttctgcctaatattccattctttataactcagttttaaataatagttgcttgaggtatattactgtgttgtgtcattgtgagttttatgcagttggaaattttataagtttgagttaatctgtaattttaatagtttgtaagtttattttttcttgatttttgttatttttctttagggataagagaagatcctgatgtctgcctgaaagccccatgaagaaaaataaaacaccttgtactttattttctataatttaaatatatgctaagtcttatatattgtagataatacagttcggtgagctacaaatgcatttctaaagccattgtagtcctgtaatggaagcatctagcatgtcgtcaaagctgaaatggacttttgtacatagtgaggagctttgaaacgaggattgggaaaaagtaattccgtaggttattttcagttattatatttacaaatgggaaacaaaaggataatgaatactttataaaggattaatgtcaattcttgccaaatataaataaaaataatcctcagtttttgtgaaaagctccatttttagtgaaatattattttatagctactaattttaaaatgtcttgcttgattgtatggtgggaagttggctggtgtcccttgtctttgccaagttctccactagctatggtgtcataggctcttttgggatttttgaagctgtatactgtgtgctaaaacaagcactaaacaaagagtgaaggatttatgtttaattctgaaagcaaccttcttgcctagtgttctgatattggacagtaaaatccacagaccaacctggagttgaaaatcttataatttaaaatatgctctaaacatgtttatcgtatttgatgctacaggatttgaaattgtattacaaatccaatgaaatgagtttttcttttcatttacctctgccccagttgtttctactacatggaagacctcattttgaagggaaatttcagcagctgcagctcatgagtaactgatttgtaacaagcctccttttaaagtaaccctacaaaaccactggaaagtttatggttgtattatttttaaaaaaaattccaagtgattgaaacctacacgagatacagaattttatgcggcattttcttctcacatttatatttttgtgattttgtgattgattatatgtcactttgctacagggctcacagaattcattcactcaacaaacataatagggcgctgagggcatagaagtaaaaacacctggtccctgctctcagttcactgtcttgttggacgagaaaacaataacgataaaagacagtgaaagaaaataacgataaaagacagtgaaagaaaataacaataaaagacaaggaaaaaataacaatgaaagttgataagtacatgataagcgaggttccccgtgtgtaggtagatctggtctttagaggcagatagataggtcagtgcaaatactctggtccatgggccatatgaaaaggctaagcttcactgtaaaataataactgggaattctggattgtgtatgggtgttggtgaacttggttttaattagtgaactgctgagagacagagctattctccatgtactggcaagacctgatttctgagcatttaatatggatgccgtgggagtacaaaagtggagtgtggcctgagtaatgcattatgggtggtttaccatttcttgaggtaaaagcatcacatgaacttgtaaaggaatttaaaaatcctactttcataataagttgcataggtttaataatttttaattatatggcttgagtttaaattgtaataggcgtaactaattttaactctataatgtgttcattctggaataatcctaaacatatgaattatgtttgcatgttcacttccaagagcctttttttgaaaaaaagctttttttgaatcatcaagtctttcacatttaaataaagtgtttgaaagctttatttacctaatttgtcttgaaatattccttataattccttataaaatattcagagactgatgctattaataaaccaaataaaggattgatgattatcttatcggagtgattccctggaaaaggtaagtgcttttctgattttattgctgtccaagttcccggttgatgagcctacttcctgtcttctttggctggccttttattcatcaagttttttttttttttttcaccttttctttcccaacatgagcatccttgctattttccagtacgtaatcacttgcacctttacagaaaggtcatatccttgctgtatctaaaatattgccatgctaacatattgtaagatgctgagtcaaggtagaaaaatgcacaatatatttccaagtgtgcagctctcttcagaaaaaaaaaaagtgtgtcagcaagcccaaaaggaacatgacagcttatcaaatacttattcatttcctctgaaatttgttcttaagagataaggtcagtagggagacaagcttaggtaattgtctgtttggctgttacaggcagggaacctttgtggtagtgcacaggtagaataagtctatagagaatgcctctgattaagtcctctgctataaataaagggctggatttaagatattctttcgggtagaatggacacagaattaaaaatgtgagaaacagctttaaactctgttaataatgtttcaacatcagcttatgttttatttgattcacttcgttaagcttagaatccaaagtctactactagtaaaacccagatttgcccttgagcatttcaaggttataggatgcctggtcttcctgttaggatgctatacattcaactttgacacctatgttttctcttgcagtaaatgggataccaytattttgtagtttgcaactaggggggaagttaaactacccagtttggacattttcctaatttggggtgattggccaaacttgtagtaaaaggctgaattcttatcattaggtcatttagttcttaaatgaagattttttttttaatgtagcaagatataataaggctgactaactggatagagtccattaacatatatggaattgagatatatatatacatcttggttgcacacatacacgcagaaatagaactgttttctcacaagatgacaaaaggctatactacgtatcacattcagtattggacagagagagtaaaagcaggaatgcataagaactgatttttttttctttttctttttttagtcacctggtgggccatttaaacattttatttatttattttttaatttttattttactttaagttctgggatgcatgcgctgaatgtgcagatttgttacataggttacatgtgccatggtggtttgctgcaccatcaacccgtcatctaagttttaagctctgcacgcattaggtatttgtcccaatgctctccctccccttgccgcccaccgcctgacaggccccagtgtgtgatgttcccctccctgtgtctatgtgttctcattgttcaactcccactgtttttcatctttgtcactgattatccacgtgaccttaggtaagtcagtctgttactgttactgcatttgccaagtaggaataattaagtcgtactaacctcacaagattattaaggtacaataatttacatatatgtgtgtgcgtaattacatatatgtataactttaaggtagtaatattactgaatgtttaaataacattgactgatagtcacagatctctaaaagggagggtgaatagggaaggaatatacaaacgtctcctattataattctctctctataggagctcctgcccttttaaaaaataccctgagtgtgaggtgggatgcatattttgaaaaaaatttccagatgattgatactaacaaccccctacccccattgttttttactgatgggttgtgttgagatgatcaaggttgtcttctgctccatgagtcttttcactctctctctctctctctctctctctctctctctatatatatatatatatatatatatatatacacacacacacacacacagacacacacacacacacacacacacataaaaaagcagcagggcattttgaagtggtgtaaattgcaggattccaagtttcagtaatgggttgtttggactacatgtgctccgcgagtatcaagatgaatttttgaagatctgttggccagatttcccagcgtcacttgtaaatgtcttcttgtgaaaaacaagtgccaaatggcaattgtaattgcataggatttttttagtgtttcatgattgcctcccctccctgacacccttccccactggctgctgccccaacatccattatttttgccagtgcatttggacaccctgaactcctatatatctctcccaccccgtttttataattttttattttctttctattgctgagaaaggcaccaaaaggagagggaagcctttttaaaggaagtcacagcctagaggcatttaaatttgcagcagctactcttctttgtttattaaatggtcacttgtgtcagagatcctatttgtatgaaaaataaaaatgaagagctgtctgcctaggattagtgactttttgatttctgtacctgcattttcaagatggtgtggttttattgttccctgttagtgagccacttgtcctatctaaggtgaccagactgatttgagaatgcagtttggcgcataaataaaatgggacacatttttcattggcaattttattttttaaaaatgaaatattcaaagtacttttctttcaaatatcaacacataatgtttaactttaaatatttacagcatgttgttgtgatgctcttgtagaaaaatgcatgcttctggcctgaaagccagagcaaaatgcaaaagaccatttaactgcagccagagaacatgaacctgtacagtatccagtcacttttcagcacaggagagcaggaatacaaaattggaacctattgtttcctagcaacatggctcagaccattataacacaattttcaatatgattagaacctctacctgttgttatacagaaactgaaaacttggcatacactgtaaacatctttacttttcatgagaaagtaagcagctaaaaagaatgtttttctgacataaaggctatacttctctttttcgccttctttcttactgatgcttttgccagaagaatagtaaagatttagacgttgtcatgattcatacaagtaaaatatttttcaaggacacaatctgatatactaacatttatttaagaggttaaagtccaccactaaatctaaggaaagatttttaactgccaaacacatttcctttgacaaataatgtaagatgacaactgccaagacaaaatccacagcaagtttaactctaagtattttcagttactgtttagaaagtaatttcttcttatgaacagtagtatatttggtccttaatagctttcacatgaaggacacactgaaaataatagtcactatttatggttgaattcttttttgttgtttgttttctgtatttttaaattttactttgcttttttttgtttttttgttttttgcgctttttttgttttttttgttttgttttgttttgttttgttttctttgcagaagaaagaacctttatagaaggctgtggaagagctgaagtactagtcaggtcagctatgtgtatgtgaatttcttcaagaaaacaggaatgttccattccatctgtagccttatgtctttccacaagctatatataatatgctccaatgtctccaaaattttcttttcaatacttcgttactgtacttttgcttctattaccaatgaactccattacaatcacccttacatgaacacatcttcataaatgcaaaaactttgccctgactctcttaagtgatattatagtggggcctggtctagttaaaaatatatttttaaagaaaaaaaaaagaaaaagagtcaaaataacatgatggaatgcttgaaactgtgtcaacagtgatgaaaatgtctcatgaaaattataacttaatttcatacctgtctacataggtagcatgtgaattccaaattatacattgtcaagttttcatacatttggctatgttgtatatattatatatatgtagtctatatattatagatcttctmgataaattgacagtaaaggacacacttattttatacattttttgggttaaaaataaatcatatacttatttatatggtaaaagtgttttgttgcaagttagtatgaattgagatttatttccctttccttcaggagtcatgcttctaatcaataacgattagaatgacaactaaaagtaaacatatttaaatgtgttaaactttgaacttttcagttcatttggatctctagactgtagtgcaagagtgaaaacaaaacaaaacagaaaagcacaaacaaaatgggcttaagtaggaaaaagaaacaaccatggagtattccctgcctccagcccagaatgttcttcataggagagtccaactactatgctctcactttaacttactcgaatggtgtgtggctgtgcagtgtcagccatctgtctgctgggtatgagaaattcatatgtttctctgaaaaatgcttttactttcatcaggaaatgcaaacgaattgttctttcaataatttaaactgcagaactgcaagtcaatgaaggcattctttctattcagctgaataggaagtgatatactcaatatctccaycttcttcttaagaaatgccaaaatgtttctcttcgatttactactgattagtagttttgttttttttttctttcctccctcaagctttaggagttgtaaaaagaataataatagttcaaggcagtattaaaaccacagctgtaagtaataaaaagtgcatttcctgaatataatacaaatgtaactttaacaaactaaaggcacgaaccaaccaaatacgtattacaaactagaaatgcacagttcaaggtaatcactattaagtaaaagcttcaaatatttgtttctaatggatatttaaagcagtttgaaaatgatacatcatcaatgaattgcaaaaacgtataattgcttaaaatataagcaaaatagactctaatattgacattttggatttgtgataaaatacataatcacatttatgaatgcactctctatatacagttcacaaattatttttccattaatttaaaagaacatcagaggttctaggaacttaaggtccatttttaggttggtgtggaggtattcaaattttcaacaagtttgttagtaattttagaattccattctgaataaatactgtaccattaatacaggcctgattcagaaaaaacccaataatatgattttagtatggattagcaatatatcaagctggtgtgtttccagttataaagagagatgagttcctcatgaattctgtctctcagaatacatgtgtaagtggtattctaacccgaaggttttgaaaatgaaatgtttgaatacacccttccctactgtttgccagggtcatttcctttcccttgctttcctttgtgtagtaggaggcagactcttgaaaaaccttaacatgagcttatgactttgcatattttcaaagaaactgtcatcgcaaagcaaggcaatgaccccacactgcatttaggtagcatctggaaagaatccaaactaacattccatcataaatttgccttcagacatagcaaatgttcagattcggtgatgaaagtgcagaagctggctcaggggaattttctacgggccacattgtgctgtcatgtattttcatttgtggtaacttacaattacacagcattttacaaactatctctttgtcactgggcacaaatcttccagctcaccaaggggcttgttttactgcaggattcctagagattgagaaactgcagctgatattaacactaatcctgacctttctcc

SEQ ID NO: 93263 - DNA, 23393 bp, Homo sapiens
ctgagcccattttgatactgagggcagtgagggggctcagggtgacaaggtgccctgcctggccacacagcacaggatgacatcagctcagacctgtctccctgtgccacacagcgtggtgaaactgagcctgtttgatctctgtcctggatgtgtcctgtcctcttaccttcaattggaggctcccagaagacaggggctgtcccctctctcaggtccccagttccctaagagcagggtctgtctctgaccagcctccagtccctctgctgcctggcccaggctgcaccctggagaacagagttgtgggacagactgtgtcctccctacagattcctgtccatgctggaggaggagatctatggggcaaactctccaatctgggagtcaggcttcaccatgccaccctcagaggggacacagctggttccccggccaggtatgtgccatggtacgctctgtagggtgtctggcctgcctggctgagctaagcctcctgggtggaagagagctcacctgggccggaggccctggatcccactgagggacctgccaccggcttcagcycccccagtccctgccttctctctctctctcctcagcttcagcacccccgtccctgactctctctcctcagcttcagcccccgtccctgacttctctctctctctcctcagcttcagccccccatccctgacttctctctctctctctcagcttcagtcagtgcagcggttgttcccagcacccccatcttcagccccagcatgggtgggggcagcaacagctccctgagtctggattstgcaggggccgagcctatgccaggtggatacttgacccctgacctctgaccctcattcactccttcccaaaccttttttactgatcctgagcaaccttgcctgcctccccaataggcgagaagaggacgctcccagagaacctgaccctggaggatgccaagcggctccgtgtgatgggtgacatccccatggagctggtcaatgaggtcatgctgaccatcactgaccctgctgccatgctggggcctgaggtgggcagcccgacctgctgaccagttgggggacccccaccaacctgagaccccggctcaccacccctcttctgtgcccagacgagcctgctttcggccaatgcggcccgggatgagacagcccgcctggaggagcgccgcggcatcatcgagttccatgtcatcggcaactcactgacgcccaaggccaaccggcgggtgttgctgtggctcgtggggctgcagaatgtcttttcccaccagctgccgcgcatgcctaaggagtatatcgcccgcctcgtctttgacccgtgcgtcccccagagagcccctcccccagggcagcacacccagttcccttcctcctcggcctcttcactcctcaaaattggggatcccctgctccccacttctgaggttcatcctttgagcattcttacttctcactgcccaaccctgactacagctcagacttccagggctctggggacctgaaggggacagtcaggggctatgacatgcccccctctctcttaggaagcacaagactctggccttgatcaaggatgggcgggtcatcggtggcatctgcttccgcatgtttcccacccagggcttcacggagattgtcttctgtgctgtcacctcgaatgagcaggtcaaggtgagcrcggctccccggccccagccccagtccacggcccactcctgagtttgggccagttcggagcagcaggatgtgtggcatgcagcagcccgttgctcttctcttagttagcggcccgttcctcacatccccacaaggtggcagccgtactttgataactgtggattaggaaaccacctgttgacagacggagcccaagcagcagccacactttggtggacctgtggacttgggttttctgcatcacaagaacatttacatacatgggggaattaattactttactttttattttttatttatttttttgaaagagggtctctctcacccaggccgcagtgcagaggcatgatcagggctcactgcagcctcaacctcccaggttcaagtgatactcctgcctcggcctcccaagtagctgggaccacaggcatgcaccactacgtctggctaacttttgtattttagtagagacagggtttcaccatgttgcagggtttcacccaggctggtctctaactcctgaccttaagtgattcacccacctcggcctcccaaagtgctgggattacaggcatgagccaccgcgcccagccraactaatcattattacagtagccctatgctgatagttttggcttctgtcctttgttacaacagacccactcgtagggtctctggctctgtgtgtcgcatacctcagatctgtgtggtgcctcattggccctgacgtgtgggaggcattgctcctgctgctcagacctctggtgactccctctcccgcttctcccaactctgaggcccagggactgggaatcagtggcctgtgttgggtttggacccggccctgccacggctggcagcctgaccttgaacacatttcctaacgtagctgagtttcggttttctcttctgtaaaataaaggtggtaatactcgcctctggggttaatttgagaatcggtctgtaaaacaggaagcactgcacctagcccagagtgagcttagaaagcccgcacccttcactttctccccataagctccccttcctctgtcagctgcctttcttcctctttgcctggatgctctcgctctctctacctcctttccaatctacccgctcttctctggtctctgagacctctccagcaccaggcccatcctcagctcctggtgagtcctgcttccctcccccgcagggttatgggacccacctgatgaaccacctgaaggagtatcacatcaagcacaacattctctacttcctcacctacgccgacgagtacgccatcggctacttcaaaaagcaggtgacccgtagcctcgtcccacaccggtcctttgcctggaggctggggtaattctgtccagcccctctgtggatggagtaggagtccctttgcgtcccctacttcacctgacacctgccaggagagtctccatgcctatcttctttcctctgctgccattgccccaggggagaatgagggcctgtggggccagtagagcaggccggaggaactgggggtcagtagagcatcctggaggaactagggggccagtaaagcaggccggaggaactggggggggcactagagcaggctggaggaactggggggctagtagagcaggctggaggaactggggggccagtagagcaagctggaggaactgggggccaagagcaggctggaggaactggggggccagtagaggaggctggaggaactggggggccagtagaggaggctagaggaactggggggccagtagagcaggctggaggaactgggggactcttcgggatgagtcaggagtgggcagctgacctgggacctttccagggacagtttgaaccctcacagtgccccaggaggaggttcaggagcaggaggtggcaagtggcacgtgctactcctctggtgctcccaggtgagggacgacagaagttgggaaatacttatggatggactgggtcatgaccatccaccccccagggtttctccaaggacatcaaggtgcccaagagccgctacctgggctacatcaaggactacgagggagcgacgctgatggagtgtgagctgaatccccgcatcccctacacggagytgtcccacatcatcaagaagcagaaagaggtggtgtgcacacatgcgcatctgtgggatttttcatgaatgggcatgcagagggcgagcacacgtgtgtagacctgttctacgtctacatgcatatatgtgtgtgagtgaggaggggcaggccaggatcttggctcttgctctgctcccttggggaagttatgaggggaggtgctggattaggtggcgttgcagctgggtgggtgcagccagtggctccgactgtggccctgggaggggttgttgttggggctggagttggcccctcagtcccttccttccctcagatcatcaagaagctgattgagcgcaaacaggcccagatccgcaaggtctacccggggctcagctgcttcaaggagggcgtgaggcagatccctgtggagagcgttcctggcattcgtaagcaggggtctcagttgcagggtagtgggggcacgatgcttggggtgtggactggcattcttagagacattctcccacttcccactttgcaggagagacaggctggaagccaytggggaaggagaaggggtgagtgtcaaaggagccgggttgggggtggggcagagggacttggagcctcagacttggtgtctctcgccccaggaaggagctgaaggaccccgaccagctctacacaaccctcaaaaacctgctggcccaaatcaaggtggggagaccaggtttcctttccagggcccctgcaccaatggctgtggcctcttgatgcagtgtggggtgggtagtggtctcgggctggcgtgggcgcagcagggctgtccccagcccggctcttctctccagtctcaccccagtgcctggcccttcatggagcctgtgaagaagtcggaggcccctgactactacgaggtcatccgcttccccattggtgaggaccttccattccatccccttccctcctcttctgtycccacacctgctcctgccctcactgcgccctgcagccccagggggcccaccctggtggacagccctgccgtggtcttcagcctcttaaagctgtgctccgtctcctgctgccccagacctgaagaccatgactgagcggctgcgaagccgctactacgtgacccggaagctctttgtggccgacctgcagcgggtcatcgccaactgtcgcgagtacaaccccccggacagcgagtactgccgctgtgccagcgccctggagaagttcttctacttcaagctcaaggagggaggcctcattgacaagtaggcccatctttgggccgcagccctgacctggaatgtctccacctcggattctgatctgatccttagggggtgccctggccccacggacccgactcagcttgagacactccagccaagggtcctccggacccgatcctgcagctctttctggaccttcaggcacccccaagcgtgcagctctgtcccagccttcactgtgtgtgagaggtctcctgggttggggcccagcccctctagagtagctggtggccagggatgaaccttgcccagccgtggtggcccccaggcctggtccccaagagctttggaggcttggattcctgggcctggcccaggtggctgtttccctgaggaccagaactgctcattttagcttgagtgatggcttcaggggttggaagttcagcccaaactgaagggggccatgccttgtccagcactgttctgtcagtctcccccaggggtggggggtatggggaccattcattccctggcattaatcccttagagggaataataaagctttttatttctctgtgtgattgtttctttggtgtagtcccagccttagcaggctcaccttggcccccagggacctcttgcaaactggaggctgctctccccagcaagcctcaggcctggtcctgtgctcctggggtgatgggtcctacctgcctgcagccccccacctctccctcctccaggctgctcctgatccagatgccagggcagcaggggtcagaacctcctgccttcaccttaacctgggtggatgtggttacaactgactgcagaagggccagagcgtagaggatcctgtagcactgaaagagtgcttccctgttagcacacgtggttctttttcttggggcagggataggagattcgtaagtcggctcagctggctcctcccctcagtttcagtttccatttctgatttctgctctctgcgctgagcacagcggcaccaggctgagctaagcagggccgccttgggcaggcmtacstggtggtgcaggcgagacccaggctgggcaaggcgcaggtgtagcctgtgttactcccaccccccccccacccccaccttttggccacagcaggcttctgatgagttttgagggtgtccccccccccacctccctcaagtggggtggagtcctgggcaaagggaggtctctgtaccgactgctctggccaggagttgggatgagtggagggcccagtgggtctgagtcccctgccattcccagaatggagctgtggccctaccaatgggaggtgatcatgcctgccagggygctggcgcagcagcagtacttaaccggagtttgtactcacggcagttggcgatgactgttagcacaaacggttcttttctcttggttctttttcctggggcggggatgggagattcctaagtyggctcagctggctccttccctcagtttcagtttccrtcttgggtctctgagctgagcagagtggcaccaggctgagttaagtgggactgccctgggcagacctacctactagagcaggtgagwcctgggctgggcagggggcaggtgtagcctgtgttactcccgcctcccccttttgggcagagcagggtcctgatgggttctgagggagtcctgccccacctccctcaagtggggtggagtcctgggcaaagggaggtctctgtactgactggtctggccaggagttgggaggggtggaggagtcggtgggtctgagtcccctgccattcccagaatggagcttcggtcctaccaatgggaggtgatcatgcctgccctggagggcaagaatatcatcatctggctgcccacgggtgccgggaagacccgggcggctgcttatgtggccaagcggcacctagagactgtggatggagccaaggtggttgtattggtcaacagggtgagtggtctgtccctaccccgctctcccaccaccaagcagggtcttagctcttcaggcatctcccagtccccaccagaactccaaagctgctgtggccatcgctaagctcacctgtctttccaccctggctcagtacccagccatgtcctgygggtcaccttaccgcctccctacccctggccccagattcagctctcttttcccagctcattctccacccccaggtgcacctggtgacccagcatggtgaagagttcaggcgyatgctggatggacgctggrccgtgacaaccctgagtggggacatgggaccacgtgctggctttggccacctggcccrgtgccatgacctgctcatctgcacagcagagcttctgcagatggcactgaccagccccgaggaggaggagcacgtggagctcactggtgagggccatggccgggaggaaaaagatacgcatctggggtacctcctttcgccaaccccagggcacctcctggagtcaaggtgttgggagttttagtgggagtgaggggttgcctgttcacaaaacccctgcaggcactctagtagaaacaggccgggctatcgtgtaggatcttaggccagtcccttccccagctgagcctcggtttactaatctgtgaaatggaaagaagtcttccctgcctggctcctcatcctgggaccagctgcaggttgtraagggaagaaggaattcttacatcattgtggggactacttgaaagctgatgggaggaagggctttgcaaacataggtcacagccttcccccctgtgccctcagtcttctccctgatcgtggtggatgagtgccaccacacgcacaaggacaccgtctacaacgtcatcatgagccagtacctagaacttaaactccagagggcacagccgctaccccaggtgctgggtctcacagcctccccaggcactggcggggcctccaaactcgatggggccatcaaccacgtcctgcaggtcagcctggcccctgtgggcctcccactgccagacccaccagggacttccctccctccctgcctgccctgccactaccccgtccccaccagccctaccaggctctccatggcagggtctggccccttcctcacctaagacccagcctccaatggtttcttatggtacaaagaattaactcccgactctactgtggtttacaaagttccacgtgatctacctctccacctcatttcctgcgccctccctgttgtagctcatcctacagttacactggcctgccttctgcatgttgaacatgtagggcttgttccatctcggggacctttgcatttaccatttcttttgcctagaatgcgcttccctttgaacttttcctgctgcctcctccttgtcattcattgaacagcttaatgccacctcttgaaagtcctccctgatctctgctctctgtcatatcatccagtgctatcctcttcagagcttgttaatgcgctctgcaaggttttattgttttctttttttttttttttttgagatggagtctcactctgtcgcccaggctggagggcagtggcatgatttcggctccctgcaacctccgcctcccaggttcaagcgattctcctgcctcagcctcccgagtagctgggattacaggcacccaccactatgcccagctaattttttgtatttttagtagagacggggtttcaccgtgttggccatgctggtctcgaactcctgacctcgtgattcacctgccttggcctcccatagtgctgggattacaggcgtgagccactgtgcccagcctctttttttttttttgagacggagtctctgttacccaggctggagtgcagtggcacgatcttggctcactgcaacctccacctcccgggttcaagtgattcttctgtctcagcctcccgagtagctgagactacaggcgcgtgccaccatgcctggctaatttttgtatttttagtagaggtggggtttcaccacgttggccaggctgtctcaaactcctgacctcaggtgacccgcccgccttggcctcccaaagtgctgggattacaggtgtgagccaccatgcctggccggttctattattcttttactggtttattatctgcctctccaactccaatctgagttcctttgtatccccagtgcctagaacaagacrggcacagagagggcgagcaatatttgagtagacgaatgcccacattctcctgtcctcagctsggatccatcctgccccaaatctttgaccattgtccccacagaccctccctttccagtaaagtcctctgttgcccccagctctgtgccaacttggacacgtggtgcatcatgtcaccccagaactgctgcccccagctgcaggagcacagccaacagccttgcaaacagtacaacctctgccacaggcgcagccaggtaygcgggggcagggacacggcgagagcgggagccggtgtgaagttaggacacctaggcttgggccctgactctgccctcactagctctgtgacttcaggtcacttgctatgtatccaagcctcaatttctcctttctgtgaaatggggcagatacagcccatgcccacagcccgctctttggattgactcagaaggcaccactggtgtctgtcacatcactgtcatgctggggagtgcactacaaaccagagagcagggatactttgtgctgaggctctactgagccctctctagtgtggacacggcctcgtgtctgccatgactggactggacaaggactaggtgtcaggtccataactataccaaatgttacacttggggtcaggtttgagcccatgctgtggtctggagggagggagkgagtgagcagatagctgaaagaacccttggggggccataggcaggtgaaatgtagttttattcagcagcggctctctcacactgtccacctttatctgggctgtctgctccggccctgtggctcctgctgcccccaygcctgcagctgctctccctggccggcaaggccagctctgtcagggtcagcagcttaactctttccctctgggcacaagcgggttcctggctccccactgcccaccttcaaggcgaccggctgtcccttgcaggggttagtagcattattctctctctgggcgmgcmagcgtgccctgccgtgccgagctgaaccaagctccgtgaacagcgtcagcagggcagttttaccttctactgacagtagagtccagtatgaacttacacaaacaggttatatagcaagtggagtacgtgcctgccccccaaactcgctgagtcactctggcccggatgtccgcctcggcctattccttgaccaaagcacgtccatgtgccttacactaggcatcaccgtgcccaggccaaagggtaagagcacatcgcgggtgagacagggcaggactcccccacaccctagccggcctccctctggagctcacaccacagctaagacagatgggtgaggcagtcgcggtgtgctacacgccggggtcagcacccccactgggtgcccatcctccaacgtgtatgggaatcccctccaactctcctcttgctcaggatccgtttggggacttgctgaagaagctcatggaccaaatccatgaccacctggagatgcctgagttgagccggaaatttgggacgcaaatgtatgagcagcaggtggtgaagctgagtgaggctggtgagaggggcagcccttcwggcggaggcgaggatgtgggagtggtcaggggcggggcctgccggggcggaggcctttggggcggggcctatccaccccaggggtggagtcgagtgggacggccctatggggcagggcagggggcggggctgtgggctgctcagaccctgcgccctcttcccgcagcggctttggctgggcttcaggagcaacgggtgtatgcgcttcacctgaggcgctacaatgacgcgctgctcatccatgacaccgtccgcgccgtggatgccttggctgcgctgcaggatttctatcacagggagcacgtcactaaaacccagatcctgtgtgccgagcgccggctgctggccctgttcgatggtgaggggcgggagggggcttcggggccggggatgatgggacctggatgcgaggtcagaggccagggcacaggcgccaaggtcggatgggaaggtgcccgtgaggatactggtggagatcctatttttctaaccaaaatccaaggccatgggtaggactgatttatttcctcatttgtgaaggtttttgcttagttgttaaaattaattaacattgttgactttttttttttttttwatagtcggggtcttgctctgtcacccaggctggaggacagttgtgcaatcatagctcactgcaacctcgacctaatgggctcaagtaattctcacccttcagcttcccaagtagctaggcgtacaggtgggcaccaccactcccagctaattaaaaaaaattttttttgaagaggcggagtctygctttgttgcccaggctgatctctaactcctgggctcaagtgatcctcctgcctctgcctcccaaagtgctgggattacaggtgtgagccactgtgcccggcccagattttttaaaaggattagctaggagtggttcctttagactgagagagtgaagctgaaagtcagagggtgaaatttaaggttgcaaatcgcagcacaggctggggctcaagagatctgggtagcagaggtcagagttaaaagctcaagggtcatcctggtcactggggagaagagggttctggtctgaggttctgtactgtatgaccccggtgtgaggctggccttgagagtgggctcggtaggaggcatccttttttgtttttgtttttgtttttttgagagggagtctcgctctgtcgcccaggctggagtgcaatggcaccatcccagctcactacaacctccccctcctgggttcaagtgattctcctgcctcagcctcccgagtagctgggactacaagtgtgcatcaccacgcccagctaatttttttgtatttttagtagagacggggtttcaccatatttgtcaggctggtctcgaactcctgacctcaggtgatccgctcacctcaccctcccaaagtgctgggattacaggcgtgagccaatgcacccggccagggcatccttaaatatgttcttggtgctgctgtgggggagttgagcaggagttccatccttcccccaccccccaccccccaccttctgcacgcctacagtcctattgctgtgagaacctcctccgccagtgccctccccactccaagatctgaatcctctgcctctggggcttttcttctttctctttctttctttccctccctccctcccttccttccctccttcccttctttccttctctctttctctctctctttcttttcctttttttctttctttccctccctccctttctttccttctctctttctctctctctctttctcttgctttcttgctttctttttttttttcccagacagagtctcactctgttacacagcctggagtgcagtggtgcaatcatagctctcttcagccttgacctcctaggcttaagcgatccttctgccctcagcctcccaagtatctgggactacagacatgtgccactacacccagctaaattttggggtttttgacagaccgcaagaatgagctggcccacttggcaactcatggcccagagaatccaaaactggagatgctggaaaagatcctgcaaaggcagttcagtagctctaacagccctcggggtatcatcttcacccgcacccgccaaagcgcacactccctcctgctctggctccagcagcagcagggcctgcagactgtggacatccgggcccagctactgattggggctgggaacagcagccagagcacccacatgacccaggtgtgggcttcggggaaagatgctggcgctgggagggattccataggagagaagtgcggggaacagggtcttcagcacagagaggtgggggcagggagaccctggggaaagagaaagttgactatccccaggcagaggggcaaggagctaggggagaggggcggacactgacctccccagtgctggagyctctcccagtctggaggtccttgggggcagaaggttgggcatgggggtcygtagggaaagaggtgggtgatgcagttcctcagggcacaggatcaggtctggggtcccttgcagaagactatggcttgagagtttttcctagactagaggggcagggacccttaggagtccctagggaagataggggttggacagttacctgggaagatgggcaagatcctgggggtacctggggataaagatgggattcaagtactctagggagatggaccaagattgggagtgagggctgaaccagaagaggctactctggcaggtggagtcagtctgagcctcctcatgtaccagcctctttctcctccytgccctccgcctgcagagggaccagcaagaagtgatccrgaagttccaagatggaaccctgaaccttctggtggccacgagtgtggcggaggaggggctggacatcccacattgcaatgtggtggtgcgttatgggctcttgaccartgaaatctccatggtccaggtactcacatcctcctccactcagccgcccttataggatcctgtgtggggccccagcccaactcaggacaccccttgtctctcttcccaggccaggggccgtgcccgggccgatcagagtgtatacgcgtttgtagcaactgaaggtagccgggagctgaagcgggagctgatcaacgaggcgctggagacgctgatggagcaggcagtggctgctgtgcagaaaatggaccaggccgagtaccaggccaaggtctgcaggcagcctgcatgccctgtgggagggatggggaggagggagcccctccctggcaggtttctgactgcacacatacgtccccctgtcccctctacatctcggggctaactttggccacctagggaaggtttaaataagggccggggtggggctgccagggaaggcagtacctggactccagaaggccttgggaacaggccttgtccaaggctctttatttatctttgccatgagatactttatgtatctggaagagctgcattacagcctttctggaacsaggcagaggggacaagataagtccacgtgcagaagataagcccagaactaggacttatatcatcagttcccctgaggcagggccaccaccatcctgccttgtccagggtgctccctgttgtcccagcataattgttaatgatgccccatgacagattcacagaagcagctttgcctaaagtccttcaagattgagcaggaaagcttacccctcccactgttgcccccgactactcatactgtttttctccatagctgtttttttttttttccccgagacggagtctcactctgtcacccaggctggagtgcatggcacaatctccacctcctgggctcaagcaattctcttgcctcagcctcccgagtagctgggattacaggcatgcgccaccatgcccggctaattttgtattttcagtagagatggggtttcaccatgttgcccaggctggtctcgaactcctgacctcgtgatccacccgccttggcctcccaaaatgctgggattacaggcatgagttactgcatcatcacagcaatagagcttcttttaagctccagggagggttaaggaaagtctcttccaggtacaaatgatcttagttctttgggaaccttttgtcccccaaggaacgttctcttaggccccagccatgcctggtgtctcctcccaccccagatccrggatctgcagcaggcagccttgaccaagcgggcggcccaggcagcccagcgggagaaccagcggcagcrgttcccagtggagcacgtgcagctactctgcatcaactgcatggtggctgtgggccatggcagcgacctgcggaaggtggagggcacccaccatgtcaatgtgaaccccaacttctcgtgagacctgtggaaggggctactgggatgggggcctgggaatccttcccatccagacagtgctttgaagctttgggaagctaaagagcattgtagcaagtactttgcattttcacaataatctggttagacaggttttatccctgtctccattttacaggcaaggaaatagaggctcagagaggctatgtgacttgcccaagttcccacagccactatctggttgagcaagaactggaattcaggatactaagtgtcaaaagaccacacattgaccctctggtcctacctattccgaagatatcaagagagcttggccatccctgggccatcctccatccactatctcctagagagtaaccttcccccatcctccatccattcattatgttaccctctgtgttccgggccactgtgccaaggatcttcacacagattttctcaattgaggaggttgcatttcagctaggtctcaatgggtctggtttgaatgtgagcgaatgagaaggtaaccatggagggccaggtgcagtggctcacgcctgtaattccaacactttgggaggcggaggtgggtagatcacttgaggttaggagttcaagaccagtctggccaacatattgaaaccccttctctactaaaaaaaaatacaaaaattagctgggcgtggtggcccatgcttgtaatcccagctacttgggtggctgaggcatgagaatcacttgaacccgggaggcaagccaagatcgcaccactgcactccagcctgggcaatagagtgagactctgcctttaaaaaaaaaaaagcgacaccagttgacctgagtggaagggactgtgaataatgagatttagaaaaagacagactagcccgtggaagatttgaaaggtcaggtgtgaaagtgtagcctttatccaggaggttcctcttaggaatcttggatagattttaaggaacagaatgtcagggcagatttatatttttagatccctctagcagttggtggaaggatggcttgggattgggagtaaaaatggaggcagagagacccataaggagactgtgaagaccaggtaaccgatgctgaggcttgaacctgggcacaagggaacgtgcgatggaggccacacaggtagaactcaccaaagattggatttcctggcctgggaagtctgtgcctcttaaccagcaggaaggcccaaggtccaggcagagacttggccggcaggagggcatgagatccggggctgaggagggtcaatgagggctgtggccaccccccttcctctccaggaactactataatgtctccagggatcctgtggtcatcaacaaagtcttcaaggactggaagcctgggggtgtcatcagctgcaggaactgtggggaggtaagagcttaggccacgtcccaggccccagagtcctcagccccagtcttcagaggccctcagggagccctcactaggacacgggagacagtcccaccccatggcctccagtctgaagagggaggtccagcccctccctaagggagcccacagtctgtgacatctcagrtgggaggaaaaggccctgtattcagggaattccaacttgaggagagaagcccagtctgaggccagagacccagaccctaccctctctgtcycacctccaggtctggggtctgcagatgatctacaagtcagtgaagctgccagtgctcaaagtccgcagcatgctgctggagacccctcaggggcggatccaggccaaaaagtggtcccgcgtgcccttctccgtgcctgactttgacttcctgcagcattgtgccgagaacttgtcggacctctccctggactgaccacctcattgctgcagtgcccggtttgggctgtagggggcgggagagtctgcagcagactccaggcccctccttcctgaatcatcagctgtgggcatcaggcccaccagccacacaggagtcctgggcaccctggcttaggctcccgcaatgggaaaacaaccggagggccagagcttagtccagacctaccttgtacgcacatagacattttcatatgcactggatggagttagggaaactgaggcaaaagaatttgccatactgtactcagaatcacgacattccttccctaccaaggccacttctattttttgaggctcctcataaaaataaatgaaaaaatgggatagaaaatgtgtggtgtcttaattttgttggaatataattggtagaaaataaactgcttgtatagtgtgcaattgggtacttttttaaaattgttttattttttgacatggagtttcactcttgttgcccaggctggagtacagtcacacgatcttggctcactgcaacctccacctcctgagttcaagcgattctcctgcctcagcctcccaagtagctgggattacaggtgcccgccaccatgcccagctaatttcttgtatttttagtagagatgggatttcaccatgttggccaggtagttctcaaactcctgacctcaggcgatctgcctgcctcagcctcccaaagtgctgagattacaagcgtgagccaccatccctggcctggatacattttaacatgcatatcctccacgatcaagataatgaacatagccatcaccctcaaaatgtcctgtttcttccagtggaattttcaaagaacaacaaaagtttcctggttccccattgaaatccatacctctcacccttccccatccaatgacctgctttgtaatttttagtgttaaaagtgtttggcttttttgagacagtctcactctgtcgcccaggctggagtgcagtggcgcgatctcagctcactgcaacctctgccttcagggctcaagtgatcctcctgcctcagcctcccaagtagctgggattacaggtgcctgccaccatgcctggctaatttttgtatttttggtagagacagggtttcgccatgttgcccaacaggctggtctcaaacacctgagctcaggtgatccacccacctcggcctcttaaagtactgggattacatgcatgagccactgggcccggcctttttttttttgtttttgttcttattttgtttttgagacagggactcgctctgtcgcccaagctagagtaccgtagtacaatcatggctcacttcagcctcaacctcccaggcttaagcaatccccccacctcaacctccctggtacctgggactacagatgtataccaccacacctaatttttggggggtagaggggcagtgtacagacaagttctcactatgttgcctaggctgatctccaactactgggctcaggtgatcctcccaaagtgctgggatcacaggtatgagccactgtgcctgacctagtgttaaaagttttaggccaggcgcattttctcacgcttgtaatcccagcactttgggaggccgaggtgggcagatcacctggggtcaggggttggagacaagcctggccatttcggtgaaaccccatctctactaaaaattacaaaaattagcctcacatagtggcaggcccctgtaattccagctactcaggaggctgaggcaggagactcacttgaacctgggagacggagtttgcagtgagccgagatcatgccactgcactgcagcctggacaacacagtaagactccatctcaaaaataaaaaaataaaagaagttttaaacactcctctttaatagccctcctaagccttattcataaagggtatcaacagtctaaacttgaggcccatcaagagtgtgagggcttcctgctccccctaccccataatagcttccaaccccgatattcccctctccaccttcccttaaccctcagatcatctcccctaggctggggaaaggctgagatccagggtttgaggggtgggctcaggtaggcacgggggtggggaaaattacaaaggcctaaattttctgttctcattttaacaagaaagaaaaagaaaggcaagatctaggttgcttcatcagggaaagggctatttctgtagtacaaggcccagcaggcaggagacaccttcaagaggaagggagggggctagggcagagatttgagagcaggatggcagtccttcctgccgtccaacctccttccctcctgctacattcttggttctgtccccaggtagatgagaaatgcaccctgtcttctcccagcattttcttttttctgtaggcctcttgtctgattgagggctgaaattcccgttcccgtctttttggctaccatctcccatagacagtgtacttctctttcccaaggcccccctcttcctcctctcaaagtgtccttggccctggatccaggagtctccttcctcctccctcctgtcccatctccagctgccttcccggggggagagttgcccatccgctccccactttgccttcagttagtatactgcctgccagcaacgtgccttttacaggtcaataaaattagcgactgggggcagagggagggggcagkggctcaggggtgctaagctcaaaggccttgaatgtggctagactcacggagtcaggacgcctgtcattccagggctaaacagtgacagctgggggacctgggctggcgctgggggcggaggaggggctgtgtggcagggagggagatgggctgaggataaagatggtctggttgcctaatggccccctcagcggcctaaacccctacacagctgagccctggagagggcacccttactttagaggagtgtcccgtctcacacccaaccctgccaggcccgaagagctcagatggaaggggactcaggccaggagaggtttctgagctttcttcttcgtgtgaggggtctttatatgaagtcacccgctccagggcatctgggcgaggctgtctgaagcggggaattcccacccaccccccgcaccccctggagtcctaacttcccagccttcagaactcgagctccgggccctccctgtggctcagatgctctcccgggacttcccacctgaatgagcccgcgcaccccaccggcggggcctcgaggaggggccggcccggctccccctcccagccccgcccctgccccgccgggccccgcccctcccagccagccccacacgcagcgttcccagccaggcgagagcaggtggccgcggcgggctccgtctctgccccgcaggtaagacggcgacgcgggctagtccacgccgaggacctcgagggcagcgcgggagaacgaggcagcctcttccacctgtccggtcctctcgcctcaaaattgggggaccccaagggacagtgaggatatccctatctcggctctgagcgccgacgttgggcatctgctgggcgggactgaactctggggcagttagagggtcctggctggttatccctgatgccaggcgggctccaaaggatggaaaagaaagagccgggcattagacacgcagctttctggagtggggcaggttggggatggtgaggacgggggtccggagtaaggaacctcgttgactgagagtgcgccatgcctcatccaagggcagcctcttccccaccctagggggtgatggcttgacccaaactgggcttctgttccgtgggctaatgaggtaaaagccgccgcatagctgagctggggcctgggattttctaatgagccccagggcacctgcatcatttatttacatctgggtacaagggggtgagcaggggattaccccgatggcctagggaacccggaaagtctgggaactcagtagatcttttctgtgtctgtgtcacagagccggctggggaaggtgatcgcagatgtggccttattgcagacaggggagcatttgcaccctcagtgttgggatttgggctgtaggaaaggggtcctgcctcccaggacctcgaggaagccttcctggaggaggaggacctgggctgacagcttgaatgtgatgctcagagctctgagccactaaggagaggcagcctttgggtcttggtgctgggttgaagtagagcagaggaccctggattatagaacaaagggaagtcaggacattgctgtctgggtccagctgggaccccagggaccttcctgagatcatcgcaagcctttggacagacacgggtgacaatggggggaggggggcttccttgtctgtctagattccccattccattgcctcatttcaccacacaaaccatcagaggcagaagttcgttctcatatccgaccttcatcccttctgggtctgtgccagcttcttgcttctgggaggccatgtgctctagtggaaagagtgggggctttggggtcagttagagctgagttctgacacctctacctactgcgtgaccttgaacaagtttcttaacctctttgagttcacttaatcacctgtaaaatggggataataatagaacccacctcatagagtggctgcaagggttaaatgagggtacacatgtagagcgcttagcacagtgcctggagcctggcgagggctcagaaagtaccagtgtcccctcatgtgtgggacagcaaagccgatctgcagggagtgagagcgagcaggggaggggggagtggaagggtttttttktttttttttttagctaagcttggctagaaagagtgcccttcactgcatgcccccctaccagggggaacctgccccctgctggttcctggatctctggacctctctgggctgcccagggcccctcacctcctcctcttttagtcaccttgtttgtgttgccttttgtctctgtagaggggagagagtccccccgcccccgcccaaggcagggaccagtaccagcaggagctcacttgggctgtgcctcagtggaacaagctctggcttggagacccaacctgaaaaaaatgccctcttgtcatcactgctctgccctcccacctccaggagttgggatcaagccgcactaaatttttccaggaagataaataatacgagtgactgaaagtcctgtttggggattgtccaagctgtcctccagtgaaaggacagcttcaggccctggcctgatctctaggctgccagggaaggctgagttcagtagcacccttaaacctgggcaagggagggagtgcccatgccctaagctgggggctttcaaaggctccactctggccctcctgctgccagtcctctccctgtgggatgaggcatcagcagggccgaggggatgagactgtgagtcccctccaagaccacattctccatacctgtgactctggaggtccctgcctagatggtcaccatctggctcccagcccatgccagcctcttccctgggcctgtctgcctcaggacaggttatgccaatagtgtgtgcacccctacggacagtgaagggacagctatttgcaggggctgtggatggagcaaggacatgaggctgggtgtccttatacatgcacaagagtcccttgtggtgcagacaggacccggcagcaggaaggggggtggccagggtgcgagtggagctgtctcctctgcacagagtcattctgatgtgtaaagctcaggaggcagataaatccaaatttgtatctggtcctccaggttgttaatgaaggtgtatttgtcagggtgagaggttagaacatatttcacagtttgctggcttgatttataacttttaaatatttagacatatgtctgtgggccgccatttgtccccttgccccaggccctgtgagtgttccaggtgggcctggctgggcctgtgacttcagctgccatttggttaattccttccccactctccctgtcccccagtagagtagcacccctataaaactgggcttagaacatgcttacctggaccaggacggagtttcaaggtgaaatgaagattgtcagttgtcatcaacaagcagttcccctgtgggcctcctgacctcattatccaccacaaaactgggacaattttttttttaatgtcctgtgatgcttgagagggaagggctggggaggagaggttacttctctcctgtgtgtggtgagggtgtgggtcactggaccccaggagcaaggagagagctaaatggggccgcagcagcaggagggatggaagctagcctgggggaaagccagggttggaccccaccatccctctggctgcccttctcagagggagctgcgcctgccacccgggagggcccatgtgtctatcatgtgggttctcccatgagtttggagtttgggcttgggacagg

SEQ ID NO: 93264 - DNA, 13006 bp, Homo sapiens
cttcagtcttgttagagggacagcaagagaggaacagcaaggaggccagtagatttgagcacctggagggaaggagggtgagacaaggtcagagagctaatgggcccaggtaaggacttttgcttttactctgagtgagaagggaggtgtttggagggttttgagcagaggaatgaggggatctggcttaaggtttttaaaggatcactctggctgctgtgttcagtgttgactgtaagggcaaggatggaagcagggagacctgttaggttgatgcagtaattgaagccagagagaatggtggcttagaccaggtgggtagtaagagaggcagtaagaagccgtcgtattctgagtattgctgataggatttgcttatggtttggatgtgcttatgagagaaagggtgaagcacgaccctgtggcctttggcctgagctattggaaggctttagttaaacagtgtactgagatggagaagactgagtgtgaaggtaggtggagccagttttagtcaggtttgagatgcctgttcaagtggggttatagagacgggagttgaagagaaaggtccaactggaaatagaaatttgggaagtcactaatgcaagcttgtgcaacccaaatttgtaaacttacttaaaacattatgagattgattgtatttttttttaagctcatcagctatcgttatatgtgtgccccaagacagttattccactgtggcccaggaaagccaaaagattggctacccctgcacagaagggtagtatttaaagccatgagcctatgagatctagtgtaaggaaatgagaattgagctctagggctttccacattcagatattggagagatgaataattacaaaggagaggcttttgaaggtaggaggaaaaagaagcgagtatggagtactgaaggccaagtaaagagtttttcagggagaaagtgaccaactgtgtctcctcctgctgattgacaagtcaagtaagatgaagactaggagatgaccattggatttagtaataggaaggtccttggtgaccttgcaagagcactttcaggagaatagtgaggaagaaaacctgattggtgtggtttcaagagacaacaggaggaagagcattggagactgcagtatggacagctctttggaagaggttagctgtaaatttttcatatgtcggttatttgaaagcactgtagtcgttcccatagtaaatttttatttccagcttaagctactgattaatacctactacacttggattgttttaatcaatgactggtggaaataaaatagctatcctactgctgatcataataataatgtatacttaactttctaaaccaataaagcgtgtcctttttacgtagtacatttcagagcccataaaaatgcttgggtgggctgggcgaagtggctcatgcctgtaatcccaacactttgggaggccgagactggaggatctgttgagctcaggagttcaagaccagcctggacaacatagggagagctcatctctacaaaaaactttaaaattagttgggcgtgctagcacacacctgtggtcccagctacttggaaggctgaggtggaagcatctcatgggcctgggagattgaggcttcagtgagccatgattgagccactgcatagtttcaaatgtagtaggtgtataaaaagaatgcaatttttatcttaaggcatgagttcaggttcttgtttctgccctcagcaagttaatgtccaaacccaaatacaaaataatcaaggtacgcagtaaaataccagatttacaccatcctgactggataaatgtgccttttccatagcaaatacagccatctgttgcattgtagatgtaaaatgattaaaatatttcaaagtttagggttatagctactgattttttaaatccaataattttatctaaaagataacaggtcctttagatgtggaaatcttttttttttttttttttttttttttttttttttttttttagctgaggaaaatattaagttggtgccttttgttttgctcttgtttttttctccaggaatttttcattggttggctctcctttcttgttctcattgctgtcatctcacacatcctttctaacttttttcttttgcatagcttcttaagttaggcccttccatcactgatttccttactgcttataatttggattttaaatttctattgtgtttttatttaacttatagtctttttttttttagtcccagtcctctttaatactgttttttcccccaccctgagttcttaattttttgtatgtccctgagagcacagtatttttctggatttttttcattttcttattgtaagtaattctcagtggtgtgcttttcttcatgtagatctagtgcacctctttgcttctggtgtagaattttttcactgactccatgttgactttcttttggttttttttttatcctttaaaaatgaaagaacttctgagactataatattgaatttgtcatactagtaccattctactgaaggttttttctagatttcctataaggaaaataattagagaactgggttttgtctaggcattctataaaagacactattgtgatgtttgtaaaagatttctatttaaaataactttcagtactattagaacttaagtttatggttatgtctctgtgataagtactttttttttttttttggagatggagtctcactctatcacccaggctggagtgcagtggcacaatcttggctcactgcatcaaacgattctcctgcctcagcctcctgagtagctgggaccacaggcacacaccaccacacacagctaatttttgtatttttagtggagatggggtttcatcatgttggccaggctggtctctaactcctgacctcaagtgatccacctcagcctctcaaactgctgagattacaggcatgagccactgcacctggctaagtactttttttttccttgtgtttttttgagacagggttttgctctgttgctcaggctggagtgcagtggcacaatcatggctgaatgcaccctccacctcccaggctcgagtgatcctcctgcctcagccttgaatatctgggacaacaggcacgcacgcaccaccatgcaaggtttatttttaaattttttttgtagagatggggtttcacactatgttgcccaggctggtctggaatccttaggctcaagtgatcctcttgctccagattccctaaagtgctgggactataggtgtgagtcactgcacccagccaagtactttttaaaattaaactggtaaacagacattagaattaccaatgtaaactttatatctaaaaccaaaatcaattacaaaggatcattattttccaaagtagatacttttttttagtgctgttcagtttttctgaagcttatctttgttcacaaggattgttagcacttccaccaaatcagtgtttagaaaccttaaataatttaacgtctgacttgccagtacattattagagaaacaattccaagaccaaaacatgttgaataagcaggagatatacaccaatttgattttaaaatggacagctttcctgtctctggctctctctcatgttgccttaaacacacatatgctgaagaaatcatatacagatacttgcatgcatttaataaactatccaataagtggtgcttttaataaattctgaatacaatcaattaaaagatttgtgcacattattatttaggtatggtaccaagtaaatcagaaacaaatgcaagagcacgaatggtttatttagctacctttccatattgggtcttgatgacattagatactctgctgtattttattttttaaagtaaacatattaaaactagccaaataacctatattttcttttattacattatgatgccttttttggtttgcctgagtttttttggtttttgtttgtttgtttttgagatggagttttgctctgtctcccaggctggagtgcagtggtgcaacctcagctcactgtagcttccgcctcctgggttgaagcgattctcctgtctcagcctcccaagtagctgcgactacaggtacatgccatcacacccagctaatttttgtatttttagtggagacggggtttcactatattggccaggctggtctcaaactcctgacctcaagtgatctgctgtggcctcccaaagtgctaggattacaggcatgagccaccacacccagcctgcgtaagtttaattaaaaaaacaaaaatattctgagtgtgactttgttgaaacagtttatataggcattttaactttggtggcagttttagtcctactatcagtcatcttttttccagtagcccagcattgctgctacgttaatttaaatctgcccctctgccctctcctcagtcttttggctgtattttgcccattggctgttaatgctgattttttttaaacacaacaaaaactgtggattgcttataaaagttttcccacaataggcttatttttatttcacttgtttattcagaatatcctttcaacttgtttttcggttatctccttggtcagttctagaatttaccaagctctcagtcagtgttcaatctcctgtgctgaacatgagatttcttaggcctggattcagctccttctcaaagagagttaaatatcagtgcacttcaccctttgacctttgtcttttgctgaaacatgtgccacaaaccatatttttttcctttttaggaagcaatgacagaagcatataagagtggaaatcaaatagtaatgaccacttcagattctgtgtcatttagatattttgttctaagtaacagaaaacctaatttaaactgtcttaaaaagatcctttattgatacccgtaataggaaaagcccaaggcttgacccttttatctgttctgcctcactctgtatacttgctatctatgaaatataaaaatgacaaaagcaattttaggtatctcatttatacaccatagaaaaataaagtgaatgtatttctctggcattccaagcaaagagttttattggactggtcacttgctcacctttaaataaaccacaatagctagggaatgtgatatgttacatggccttagataataaagactgacccctccaaagcatatgagcagtgaagagtagtggagttgggtaccagtggaacaggtaggaatggagtctaggtagacaggggacatctgaggaaattaaaaacacatagttgattttcagtcaaaataatatattaaattcatgtttgggcacctggcaataactgatgttaaaaaaaaaaaagcgccaaagtatagtcagaatagtaaataggataaccatctctatagagtacaagcacaaagtaatgagtgaggctgtagctgttttggaattggccaaaatggaaatcatccaatatctgatctcagacgaaaaggaattaaattacaatttgataacagaaagatagccggaaaatcactgaatacttagacattaaataacacatttctttttttttttttttttttttaagacagagtctcactctgtcacccaggctggagtgcagtggcgcgatcttggctcactgcaacctccacctcccaggttcaagctattctcctgcctcagcctcccgagtacctgggactacaggtgcacaccaccacacctggctaatttttgtatttttagtagagacggggtttcaccatgttggccaggctggtcttgaactcctgacctcaggtgatccgcccaccttggcctcccaaagtgctgggattataggtgtgagccacagcacccagcccaaaatgttttcaaaagacatatatgatgaagactgttatccaaaatacacaaagaactcttaaaactcaacaaaaagagaggtgggtatgggtgctggctgaggtcactcagtgctgaccatcctcttctcaaagccatgtctctaagacatcatggtgaaggtgaaggccagagtaaatagatttgggccatattgggcacctggtcaccagggctgcttttaactctagtaaagtggatattgtcaccatcaatgacccttcattgacctcaactacatggtctrcatgttccagtatttctacccatgrcaaattccaccacaccgtcaaggctgagaatgggaagcttgtcatcaatggaaatcccatcaccatcttccaggagcaagatcctaccaaaatcaaatgggrtgatgctgaagctgagtatgccgtggagtccactggcatcttcatgaccatagagaaggctggggctcacttaatgggggagccaaaagggtcatcatctctaccccctctgctgatgcccccatattcataatgggcatgatccctgagaagtctgaaaacagcctcaagatcatcagcaatgccttctgtaccaccaactgcttaatcccccggccaagcccatccatgacaactttggcattgtggaaggacttgtgaccacaatccatgctgccactcctgcccagaagactcgatggcctctgtgggaaactgtggcatatgtctgtggggctctccagaacatcatccctgcmtctactggtgttgccaaggctgtgggcaaggccatccccgagctgaacaggaagctcactagcatggccttccgtgtccttctgcaaacgtgttggttgtggacctgacctgccatctggagaaacctgccaaatatgatgacatcaaaaaggtggtgaagcaggcgtcagagggcccctcaagggcatcttgggstacactgaacaccaggttgtttcctctgactttaacagtgacactcactcttccactttcgatgctggggctgccattgccctcagtgaccactttgtcaagctcatttcctcgtacaacagtgaatttggctacagcaacagggtggtggcccatatggcctccaaggagtaagactgctcgacaaccagccccagtgagagcacaagaggaagaaagagaccttcagcttctgggcagtccctgccatgctcagtcccccaccacactgggaatctcccctcttcacagtttccatgcagaccccacaaagagctctatcttgtcgtgtaccatcaataaagtcctctgtactcaaaaaaaaaaaaaaagatagaaaatgaacaacctgattttaaaaatgagccaaagatcttaatggacacctcatcacagaggatatacagatggcaaataaacatatgaaaaagatgctccacgtcatatgtcatcagggaaatgcaaattaaaacaatgagatcccactacacacttactaaaatggctaactaaaatctagaacgctgacaacaccaaatgctggtgagaatgtggattaacaggaactcttattcattgctagtgggaatgccaaatggtacagctactttgggagacaatttggtggtttcttaaaaaaactaaacatactcttaccatccagcaatcatgctccttggtatttacccaaaggagtgaaaaactgtccacacaaaaacctgcatgtgggtgttcatgtcagccttattcataattgccagaacatggaagcaaccaagatgtccttcagtaggtgaacagataaactgtaatacatacagagaatgacatattatgcagtcctaaagagaaactatgaagccatgagaagatacagaaaacacgtattacgagggaaagaagccaatctgaaacagctgcataccgtatgatttcagttatatgacattctggaaaaggcaaaattatagagacaataaaaatatcaggggttgggtagagagagggatgaataggcagagcccagaaaatttttagggcagtgaacctaatctgcctgatgctgtaatgatgaatacatgtcattgtaaatttgtctaaacccatagaatgtataacaccaagagtgaaccctaatgcaaactatggactctgggtgataatgatgtgttagtgtaggatcatcagttataacagaggtaccctctggtggtggcagggtgggggaatatgggaaatctgctcagtgttgctgtgaacctaaaactggtctaaaaaataaagaccgttttaaaaaagataaagtaataaaaaatatgctcacagctcagttgtgatactagtaatgcaatttttatgcaaaattatgcttttgaagaaatcagaattctcaattttttggtgattatttaaattttcctcatttttatatggtttcttttaaaatgtttcacttttttccctratttatattagaatggcaatgtatgcttaacacttgtatttttataagtttatgagtttttaatgttctgaaatgttattttttacttcaaatgtgttgaacatttaacttgttaaaacattccaggctgggcacagtggctcacgcctgtagtcctagcactttgggaggctaaggcaggaggatcacttgagcccaggagtttgaggccagcctgggcaacatagtgagaccccatatgttttaaaaaaaattctgaactaaaaaaaaaaaaacagcattaatgctagtattccatattatataaaataagtgtgaaatacccaaattacttttttttttcatttctgggtaaatctttaaaatttttttaattaaaaaaatttcttatttctaaaaatctttgtggatacataataggtgtatatcatattgcatttctatctaatatgtacctgcttatgggaggagtcaacaaatgtttattatttctaaatattcctatttctcagacattaaaagatgttcaagaagtagtcatatgaacatgatttgatttctttttaaatgtaatatcagttttattggtaccccatttttgctatacatttttagtttagttatattttttgtccaccttcagtgaatgccttcattttcattgtcattacttaagcatttatactgacttccagactccactgaaagacttgtttgaatgcatactttacgtttggaccatccattcacttaacagaaaagatacaggttgagcacttagtgtgtaataggtaatgcgaaatactgtggatagtgtggaacaagacaactcatgccctcaaagtttactttcaaactgaggagatgtacaatacatgattaagcacataaataagaaaattatagattataataagaacacgaacaaaataagcagggtgatgtgaaaagtaatgtggggagaagtaggtgacatttgagctgagacctgagtgattctccatccagggaagtacattccagcaggaagaaaagtaagtgcacctctgaggcaggaaggaggcaagtcaggggtagagtatagagaacaagaagggggaatggttaaagatgaatttggagaggtaggcaggaacaaaattatcagggctttgtagcctgataatttatcctttattaaggattttggctgttgttttaaatacattgggctgccattgacatatttcaggtaagggaatgaaaggaaatggtttgtgtttttggaagattttttttttttctgtattgagaacggattgtagagaggcagaagtggaaatggagattagctaaggtagaaggccatgcttgggccatgggagctactaaaaatacttttagcttggaagtgatattcacaaagcatgggatgaaaaaatgtacatgatagcttaatgagattgactggggtagagggtgacagaagagagaatgagactgagagaccagttaggaagacattggaaaacttcatgtataaaattgttcgttagggcacaaattaagagtgaaagcagtgtcaataaaatggaaaaagaatttgcaagacaatgaaagacagaactgacaggcctttgtgtctgattcactgtcaggagaaaagaaagcatcaaggatttgaagccagggtttctagggagatattgttaccattggcagagaattttggagcagtgtctggagtatatgtatggagtgctggttttgttttattttattctatttttttgagacaaggtcttactctgttgcccaggctggagtgctgtggcatgatcacagctcactgcagcctcaagctcccaggctcaagccatttgaattagtctgttttcacgctgctctaaagaatttataaacaaaagaagttcagttgactcacagttcctcatggctggggaggcctcgggaaacttagaatccctgtggaaggtgaaaggtaagcaaggcacatcttacatgacaacaggaggaagagaaaatgcaggggaaactgccactattaaaaccatcagatctcatgagaactccttcagtatcatgaaaacagcatggggaaaaccgcccccatgatccagtcacctcccaccaggtccctcccttgacatgcgggaattacaatttgggatgagatttgggtggggacatagagccaaaccatatagttctgctcctggcccctcccaaatctcatgtccttttcacatttcaaaaccaatcatgccttcccaacagtcccccaaagtcttaactcattccagtattaacctaaagtccaagtccaaagtctcatctgagacaaggcaagtctcttccacctatgagtctgtaaaatcaaaagcaagttagttacttccaagatacaatgagggcacaggcattgggtaaatgctcccattccaaatgggagaaattggccaaaacaaaggggcctcaggcctcatgcaagtctgaaacccagccaggcagtcattgaatcttaaactccaaaatctcctttaactccatgtctcacatccagggtatgctgatgcaaggggtgtgctcccacggccttgagcagctttgtccctgtggctgctttcatgggctggcattaaatgcttgtggcttttccagatgcatggtgcaagctgtcagtggatctacttttctggggtctggaggacagtggcccttttctcatagctccactaggcagcactccagtggggactctgtgtgggggctccaaccctacatttcccttccacactgccccagcagaggttctccataagggctctgcccctgtagcagacttctgtctggacatccaggaatttccatatgtcctttgaaatctaggcagaggttcccaaagctcaactcctgtcttctgcacacctacaggcccaacaccacatggaagctgccaaggcttggggcccgcaccctctgaagcaatggtctgagctgtagtctggccccttttagccatggctggagccggagtggctgggacactggacaccatatcctgaggctgcagagagcagcaggggcctgatcccagcccacaaaaccattttttccctcctaggccttgtggcctgtgatgggaggggctgccatgaagatctctgacatgccttggggaaatttttcccattttcttggctattaacattctgttccttgttatttaggcaaatttctgtagcatgcttgagtttctccccagaaaatggggttttcttttctaccagtcaggctgcaaatttccaaacttttatgctctgcttcgcttttaaacagaagttccaattgcagattatctcttcgtgaacacatttgttcactttgagaaaaatcaaggccacatctttaatgctttgctgcttagaaatttcttctgccagataccctaaatcatctctctcaagttcaaagttccgcagatctctaggtcaggggcaaaatgccaccagtctttttgctaaagcatagcatgagtgacctttactccagttcccaaaaagtccctcatctctttctgagaccacctcagccttgatttcattgtccatatcactatcagcattttggtcaaaaccattcagcaagtctctaggaagttccagactttcccatatcttctgagccccccaaactgttccaacctttgcctgttacccagttccaaagtcacttccattttttcaggttatttttatagcagtgccctactcctggtactaattctctgtattagtctgttttcacactgctataaagttactacttgaggctgggtaatttataaacaaaaggtttaattgatacacagttccacatggctggggaggcttcaaggaacttagaatcatggtggaaggttatagggaagcaaggaacatcttacatggcggcaagagagaatgtgtaggggaaacgaccaattttaaaaccgtctgatcttatttatgagccctccctcactatcatgagaacagcatgggggtaaccacccccatgctccattcacctcccaccaggtcccttccttgatatgtggggactacaatttaaaatgagatttgagtgaggacacaaagccaaattaaatcactatcctcccacctcagcctcccgagtagctgggactacaggtgcacgtcaccacacctaacttttatatatgtatattttagagacaaggtctcactatgttgcccaggcttgtctcgaatgcctgggctcaagcaattctcccacctctgcctccaaaagtgctgggatttcaggcatgagtcagcacacccagcctctggagtgctggttttagatatgatattaaggccatggcaaaatatccatttgggactgttgatctgccctatgtacatactcatgtgccagtgtacaatactgttattatctccttgggcttctctgcttgttcactctgtgaagagcaccagactctatgagttgctcccattgttgcctctgaccccattcaaggcagaaatccttttacttgttaccaagatgtggaataagaaactaagaaaaaatatatagcatcttatatttgtatatttcattatagttttcaaagttctgtacaaaaatattgtgaagt

SEQ ID NO: 93265 - DNA, 84846 bp, Homo sapiens
tttctaacagagcacagatttttctctttttcctctcctgttaaaaatcacctcccaaaaatatggggaatgacaaacaaaaaatgagatccttctttgaggaaacgagattatatccccacatatctgaaaacatctgaaaacagatgaaagcatggcaacagccttatcagagaggagaaagacgacactgaaatgcctgcaaatgagaatctggcaagtggtaagtgatcagtaccacaaaaaactcaaaagtctccaaaattggagtccctagaaatctgagagattagaggtgaggtacagactaaaaactggggtattgggtatggagagacccgacctcccccaaatccagttcctctcaatgcactaggagaaaggagattcattatctgggaaaatcaagtatgagaagtaccaaacccagagaaatgaggaaagcaaaagtttgtaataaaatgccagactaaaaataagatgactaaatgaaagtttggacggagatcccctggctcccttaagctatccagatccaagtgcaacctaatggtcaacaagtgaaggcagctatagagtaggcctagaaaccattcaaatcaggaggacagtggcttcaggaaggaggtcggggtagtgtgacaagcagggaacaatccactctggagaaatgaaatacatcatctgatagggttacctgggaaaaactgtcctgagaggctactggaaggtatggaaaagtttaaccccagaaacaaacaaacaaacaaaacaattcatcaaatgaagaacaaggcaactattactgccggaaaaatgaaaagttgtacaggaaggtaaataatgatagcatacttcttgttagggcagatagcaatatttatagtcataatttaactactgactaatgatttatctaaaattgtaatttatattaggagaattgaaaagaatacaggaaaagtacatgtgtacatacaagagatcaaatgatgtctaaaactgatgaaccaaacaacagcactacaaacaactattttaaaatgaggaggttgaacacaaacagaaagaatgatacaagttaagtagatgcatctggggaataggatgcaagatcaccaaggatgaggcagggaatacggtttctcactagaagcctttatgctattagacttttgcttatgtttgtatactacttagtatagattaaattgttaatttaaaaaagtaaaaaaagtaatgaagagtacatgcaaaaagtacttgtagtttagtcaaacttacctagaagaaccaacttctgcagagtctcagaatgatccacatagtctcgaagtgtgaatgaagctggtggcaatggagggtctgcaataatctgaatagcctcttcctctgaaattggctgcattggagacaatggaggcaattcatccagttctttgaaagagagaaacaaattagtgctctaatatgcacacttaaaactatttctgcaaagaccagctcttcccttgtttgcttctttcagtggttaaatcttgggatcattttagaattaaacatccaagtccctaatttttcaccttttaagaggtaaggttacaactatttagacagactaactactgttcctctgagattagaaatttgttggtaaatttcaaagcacacaatgcctttccttcacttaatcagtaggtgagaatgctaaaaatcacctaactttcaagtgaattttgaaacagagattgagtttaccatagcctgttaacttggctaaaagtacacatatgccaacagtctgaattgcatggattaaagtaatcatatcccgaaagtctttgttttgacccaatgccctcccttccaagttaccctcaaatacatctttaaaagggcttctatgattgtttctacaacctgcagtcctctctacaggagatgtgactctctagtacagccctgattctgaagttgtttttgtttttttaaaatcaaacgcagcatggaagacacttagaactacacattaccttaagctaaggaatcaggtctgtgatcttttgttctgttttgtgcttctcatcattaactatcctttctcatcatttatagccagcatctcctccctgccctctccccagctctctttccttcatattctacttaaccttatatcatttcattaccagcgaaatattcctagaataggacccataggaaggagaggattgactaaaaagcgaccatgagggaactctgtggagttaatataattgttttatttgttgattgcagtagttcttacacactaaatgcatatgtcaaaattcatagaactatatatcccacaagatgaattttacttgatataattataccctaataaaactaattaccactagaagaattttgttttaagaatctaaacaataaaatatttaaaaagcaaatgttttatatgtgtagctataaaataatcttacacgttagcccacaaactttttttcttaccagtaaaataaaggcatgatagaagttcatcaatagaactggtattattctttttctttcttggcacaaaatattacctgaaatgggctagcagaaggtaaacaggtagcttgttcaaatggccaaagtagggaaagggagacttttctgaaagttcagaattaccttctagaaacagctcagaatcaaagctggatatattttgtgtcttctgtgactgttcattcatggaaggaagcagactgctttgggcagaattattctcctgactacttgagctagtagactgggaactattccataaggaggaagtcctgtaagtcttaaatccccactggagaaagcaattgtcagaggatatctgaggctgagcagaaaagccatgtaacagtgttcttgctggtctagtaaaacgttttgtgagttgtgcagcattaatgaggctcctcaacttaactgagttaaaccatctgggtatctgttgggctgacaaagccatttttcttagtctacaaaggaaagatataaccgtcaaaagaagagaaatttaatttacttaaatgtttaaaacrgtattcaaacaacaaaaagataaactggaaattatttttttctaattgaaaggtgtttaaatatatatttagtctaaaatagtgagatgtttcttatgtacaggaaaagccaacaacaaggcaatctcagttacaaaccaacagacaggaacttctgagtggaaaaataaagatatactttacaatttaaaaacaaaatgcaatgacactggtgtaagaaaaatgcttaaaacaaaaatctgcaaatgttcaagtgacagcagacctcactaatctgttaatttaatcatttaaagagaataagctgatgcaaataagtgttcttgaaatttggtgtgaagggtgtttccgcagcacattgctgatcaaagtaacactgaattattcaaatgcattttatgtatataaatttgtcccaaaatgaaaaaacagaaatctactgtgtcctaaacaaatcatcaaaatattatcattgatatacagaacagtgaaagcagtttcttgcttcattctcagggctgaacactgttgattacttcacagataaagctgttcttccaaagggaattgaacaaaaccagttttgtcaagttttgtttcactgtaggaaaggagaaaaaagccttcaaaaagaaaaggtcaaaactagtaaacaaaaccaagtgacagaaataaataagcaaccagcaattaatacctgtatattttgactgaaaaagtagttttcaaaaatatttttatcaggaaaggctagtgctatgttaaactccaggaatatgaagggattttatatttagccagctaattagaaaggtaaatttgatgcatataatcttacgttaaataacattatccatataaaacacaggatggagtcaggatataagaaatgctcaataaatgttagccattattattggttacacaaccaaatacaaaaattctgctgaattaattgctgcctacaactttatactttgtttttctgcatactggaattcagcttgttttatgctctaaattagaccaaatacttgagggtctaatcttttcttggagatctgtagttttgggaagtttgctgaaagagattttacaaaagtgaaagtttcctttcattctgcaattatttattattattattattattattttttttgagacggagtttcgcccttgttgcccaggctggagtacaacggcaccatcttggctcactgcaacctctgcctcccaggttcaagtgattctcctgcctcagcctcccgagtagctgggattacccacgcccgctactatgcccggctaattttttgtgtttttagtagagacggggtttcaccatcttggccaggctggcctcgaactccttacctcaggtgatccacccagcttcccaaagtgctgggattacaggcgtgagccactgcgctcggcccattctgcgatgattttagaaaagaagtaagtattcacaataccctgctgggataggtggtttctgttagattttggtgggaaatgggactccaaatgtgccaagttttccctcaaacctacaacattcattctctgcacggtagtcataagggcactaaattgaaagtcagaagacctcggttgtgctaccttgacaaggctgtttctggcagcagtctaacaaaagcagcagtctagcccatgatgtggggggtgggggtggggtcaataactattcttcaaataatgcttttttaaaaggctaggggtacaataagatgattcttaaggcccctatcagctctaacattttttgacgtctaagcacttcatcctacttcaaactcctgaaatcccaaattcatcctgaagcctttccacactcaataccacttaaacatcaggaagactcactttcaaatttcaccccgtcattaaaagatctttgtgcatacaactaatgtttatccttgcatttttatttacaagtgcactatcttctccacatcctttcattgctgcctacacatcttaacaattgattaactgttcatgcacgagagcagagctgggtctcatccctggatccatccttccggggactattctccactttcccagagccttgtactgctctaatgtttgcggaatggaaataaatcaatggcaagtacagttaactcacttgcttacacagtatgcaaaagcgggtaggggatgtgcagatgtgtataaaagccctgtaaggtggtaacctgaagtcttctaacaaggtcctttcatcaggaaaattacagaaaacccttaaagaaactgaagtctcttaacaattcatatatactgttctcaatgagtgcctagtgcttcgctagaaaaaggcactgaaatagagttcaagatttctacctacgaaatgctataaatgaaatcaggagagaaagggaggttatgggggcagcttcctaataaagggtctctcaatacttcccaggccattttagcccacttcagttccccaaacttgcgcaggaaggcagagccccctcctgaggcttctcacactgcgctaattarccagcatggttgagttttcactacatcagccagggaaaaacacaaaacaaaaccaatcaccctctactgggccgcgaaaacctaaaggcccttgaggccctggggcgcggtctggacgcgggtgcgccggaacctgaaccctcgccaggagcgcgatcctcgtgctggggcagctcctgctttacctgtggcgaggcctgcttcccgtagcgggtgaccccgggaccgaccaactcgctgggccgcacgtcccgtcccgccgcgccgcacgccggctcctcagcccgccctacacagcgcagccgcgctcccgggcccacgtgggccgcgcccggagtgggcgagaccatgtgccgggttacgcggggagacagcgggctacgtgctctgaaaagagccagccaggggccccggctacccttctccggctcgctmttcctctgaagtcctgtggacttggagtctgaaaattcctcgagtggtagagatgcctcagctaggatgacagcgtggggacggccggcggcgtcccctgccccaggccgcggtggcggcgccgcgaccccgccctctcgcgcctgtccttccctctgctcccagcctttgctgggcgccagacccggctttgccgtccggctattagcctactgtggctagtcacccccggggtcccggccttctcgggctggggccgccgccaccgcggcaggacggggaggcgggccatggcgtcctgcgtggggagccggaccctaagcaaggatgatgtgaactacaaaatgcatttccggatgatcaacgagcagcaagtggaggacatcaccattgacttcttctaccggccgcataccatcaccctgctcagcttcaccatcgtcagcctcatgtacttcgcctttaccaggtggggcggcccagccgagcggggggcgcgtccaagggctagggaagaggcgggagggagggtggcggggaggggggcccggcatggctctgggtgaggaagtgggctggctgctccacgcacacgcactggcagcccgccgcccacgcggcccctccgcccgcccggtgtctcacagtacgctagcctgctcccctacccctcagtgccccttctccatacagcgcctccggttacacggggaacgcacgcgagtcacctagcacgatcgccccctcacccaccgcactcagcatcgctccacacaacatcacgacgcgggcccctcctctgcactgctccagccttcgtccctacccagcacaccgcatgaatcatgtcgtatgcaccactttcagcacacaccgctacacatacaaagcaccccaatccacagcgcctgcaggcaccatacacaggcccaggacacaacctagatcccttcctgtggaactccggtattcggcactatccgtaacgcacaaaaaatgcacatgtgtgctgcatacacggtctttcctgtgcagcacttcccgtatgcattgcacacaagtcatccagcataacacttcccccagcctcaaacactaccatctgtaccacggcacaaactgccactctaaacacacacctcacagcggacctttcctttccagcacagcccaatacccatcatctgtgtacatggctgcacagacaccagcccgccacacatcacgcggtgcataccctgctcactcattacctaacatacgtgctgaaatgtgatcttgtccagcaattttaatggtgcctggggtatagtaactgctgtgtgttaaatgaaacacataaacctcacacagcataacacaactctcttattccctggaaaacatacacacacattctaatatataccggttcataggagctgcccagcccaaatcttgaacacacctcatgttaactctggcactgcgcctgtggctcctcattcctaacctagagaactaattcatccttggttcataaggaggtacacaccgtggttcctacttagaatgatttatactttctgaatgaacctctttaaagaaagggaagtcacacctctctcaccattatggcttaaaaggccaacttagagtagagtagtttttgagccacacttttggtttcaaaactggctgtgtgtccttaattaagttgcataaccttgctctgagcctcaggggccacactcgtaaaatggggatgaaatatctacttatatagggttatgaaaattaaatgaatgtgtgtgaatgcatttagcagagtccctggagcacaatgtacaattcatgtcagttacttctctcccagtatttttatccaacaatcaaggttctctgtcagggtcagcagaacatgtgtagggatatatatattgggtagtcacaaggattgagagaacttctagtatttgggagggggagcagttaacggatactaaatgtattgtgacatatgtgacagcgctgtacaacataaagggaattgtcttctacacagtcgtttgcatacacacacacaagtgccggtggtgcctcccttaggaataactgcagtttttcaaatcctcataaaactaatatcctcccacatcacacttgttccttacctctgggattcatttgactcttggttcttgttatgtaagtgtttatccatttgaaagaatctacctaaaggtataaagcttaagtaacaattgcttactctttaatgattgagggatcttgccactattactataaaatctgctaaagctgtgcagcaggtgaagaccagacctttccacagtacctgaccagacatatttctagctttggagagaaatgaatcatgtccctaactatggttactttcaaatacttcattatgttgcctgattttatcacttaatagctgtgtggccacataattttgctaggcctcagtttccttatctgtatgtaaaatgaaaatatcaatacattaatctgtcgggattatttgtcatgaggattaaattcatctttttagataatctgtttagctcagtgcatggcaagtattaagtgcttaataaacattagtggttattacgatgtgatttcattgaatgctactgtcttctaatttatatttattattgaacgaggatgtagtatgctctgtaattgagaaggataaaagcactggaaaaatggacattagataacatacatacctgtttgatgttaacttcagtttaacttcatcttaggtgtgggcttgaaataatgaaattagtgagggagtttctctggaaattagaaaaataattatggtattttgttttaaataatgagaagcaagaatgagccatttgtttcagcctttcatttttaatattattctaggtcctttcaaaataggtttctcttcctcttttctgatataaaaagtcacaatcttctgaaatttccttttacatcatattctgtcaaggcagtcaataaattgcagcagtgaaagtataagaaatgaatacgaattttaacagcttgtccaaaataatagaagaaccataatctgaacttcagactgtagtctcatccaaaaatgttaacaattttatttcttccactaatttcataaagagacagaaatcacataatgaagaactaattaataacaagtttcactttatataaaatcataagcaccattaatagaattcgtacttactaaatcttactcattttttgtaatgatttgtgacttaagtggggcattacaatgatagctctatattcctccataaagacggaaagtaacgacttcttaaatgaaaatgtatcctatgttcttttgtaatgattaactccagtgccttattatttattttataagattttagttggacaattgttcagtgcaattctttcagtaaaacttaaaagatatgtcttaaagtttgttttgcaaagactagttgtctaagagaacgaggagataggattcttttgggatgtcatataaccagtatgtgagaaacagtacttgggtactgtcacatgcttcagagatccagcaagaatttaaaattacagaggattagataccttgcactgaagtctgagacaagtttggatttgtcaagtagttcttttgttagatggcccttaggtcaattccctgttaaaccatagtatttaaatatctcctgtctttatcaccatcattaaaaataaagttagatactacctaatcattttcctatttgaaaaagctcatttccagcctggacaacatggtgtaaccctatctctacaaacaaacaaaacaaaacaaaacaaaacaaaacaaaacaaaaattagctgggcgtggtggcatgcacctggaggctgaagtaagacgatcacctgagcctaggaggcagaggttgcagtgagctgaatcacgccaccatactccagcctccaccctactcactcgacagaatgagaccctgtctcaaaagaaaaccaaaaacttattttcccacattttagaataagtaggctgggtgcaatggcttacgccggtaatcctagcactttgggaagccaaggtgggaggattgcttgaggccaagagtccaagaccaacctggctaacatagcaagaccccatctctattaaaaaataaatagtatttttataaataaatgcttacgcatatgtcttagaagtttgttagcaaagtagggcaaggaaaacttttgtctcaagctcagagtataataattacctataagataccctcatatttactctgcattcaggggttggtaaacttggaaatattgaatgcctttagtttaaaaaactcaagctttagatttagaaaacaccagaatctattaattcacattcaaagaagcccacctctccttaagaggcacctgccattaaacagtagaatcagcctttgttagcacttgtccaacaaaaattgttacttacctagaagacrttgcctttctgcggatttgtgtacttaagtgatcatcaatttgtctatgcttcatttctcctcgatttagaactaaggagacaggcaaggacagggaaatggacagactgattgattgactgattgatttgttaataatggtttttacttaatttcccttattggctttggaactccagttcacygtcatatcattggggcatacttgtggccacctgtattatattgcttatggatacttgctagcmttccctgttctttccctcttgaccacataaattcccattagaaaatgtcccctgatactgctgattcagttgtctttatcctgtttcctttatatacatcatgttccttctctcccagcaacaaaagccctgcatgcccttgttggctgacactagcaatgttaaatgctcatctatagtgattatgggctaggattaaaccagccctggaggtgaacattgtgttaggttgcacctgaggtccagttatcaatgattgttaacatttcttttccctggttaccatttgaatcaaattttttattgaacttaatgttttacattttttcttatactgatttccagagttttatgtccataatacgatttctaatttgttaaagggggaaatgtgccatatatttctctggggtctactgcagtgaatgggcacttgggtgacttaaatatttatttggcttagatgatgcctcagcccacagagattatatacctaggaactgctgcctttcagactcctctttagtaagcaaccttaattcaagttcatctgttctgaataaactgtgtttagcattttagatgtagttctattaccagatgtaacacaatttatcttgtgacataattcctattgccccagatttctgtagagaagttacagtttttcagtcttaactaatcccagaacgaggactagtccggtcagcctgcactgcttcctcagccctggcatcccatttaattcaattaattcaattcaacagttcatagtcctcattgcctctagcccaggtttctcccaacctggagttcaccatctcatttatcttcagcaggtctgattgggcctttatagctttcgggactgttctctttccgttcccaagcctttgctcagcaaactcccaaccctttgggatagctgactctcaggccctggcttcccctccctccagtgctgcccctgtgatctttttagacaaaatcatggtcccatctttccctgtttaaaattctcgtttatctaataaatactttaaaacatatcacctttctcctgctttacttgataacttagctgtaattcttcacaaggattgtgactttccataaaacgaaattagtatggtatgaaagataacaccaaagctggttgacatcggtatttcagtagatgcctgtcacctataggaaagtactagctggactccagcgtcctttgtaatggagtaagtctactttcccacctctatccctccctccatacacagcacacccaacacccaacacccagcaggccccggcagctcacgtgtcccatacctaggcagggctgccatctctcagactggaaggcacctcccgccacctcctgcccacacatgacaccacccttggcatccttcacaatccatttggatggttcccttccaagatacctttctcaattgttccaagaagcacagaggaagaaatgtttatatccttccaaatacttgttattattgtatctaacatgtcataatattagtttctgtatcagcttcttgaggccagttatctgagtcatcccaggatagacatccagtaaatgctgaatgaatggaatgcatgaaatcatttattcaataagaacttaaaatttatcaccattcttttcctttagttgatgtctcacccataattcttaacaaggatcataactttctataaaatagatgaatgtggtattaaagataatacctaagctacttaacattggtctaccatgtaacctgggattaaactttttattgggagagatgatccttaaacagtgactcatctaaacatgaacctataggtctttatttaaggactcatattaaaagtaatgagggagaagatgggagggggagagggacaattaacctagaagccttaggaatcataataaaggttagatattcctggctgcctgaccccagggagaaagacttgtctaaaagattgtaggcaagtgaatggactttgctttggtttcctgaagttaccacccctctggtcaaattcctgtactcaaatattaaattgagacagaatcggagtcagagtccagaaattctttggagtgcaaactttttttttttttttttttaaactcagggctttcctgatacttcctgctgttaagactttgtctctttgggtagttccctatcctagctgaaacaatgctctgcagaagaagccaaggtgtttgaaaacttgattgggattttagatatttgctgatggtctcaatagccctctgtagccaacactctgcaaggggagagggaagtcgctgccagtggaccctgtgggtcaggctgagactcccccctcacgttacctgagtcactggcctactctgtcatatcatcttgctcattcttgccacctactatggcaggtggatgcctgctgtgtgtcagggcattgtgccaggcactagagctaccttggggaaatgaggtgggacttgtgccctggggagctttcttattttaatctgtacatttggtattttcacaatatgtggtcagtgctatgctggagcacctcctaagtttagcagagagcgaggaagactttgcctccctaagcttgtctgtttgtgtccttattggagaatgcataatagcaatcttgacctacagccagcattccagaagccctcatacctacttccactctgcctctatttgtgtgtgactgtgggcaagataaaccaagagcttaattttcctcatccttcaaacaaagataatattggctctgccttcccccacagaactgtggaactgttaaataaaacaccagctgtgaaagttctttggagtgttcagggcactgcagactggggcattttgttgttagtagctgcagtagacccaggaaagaagtcaaggcggtgtcacagcatcacaatggaaagctttaagtcttcatatttgttgttgctgtgaacaagcaacatgtcttagttgagcaagtacccttaggccaggaagagtcaagatgaggattgggcagcccagaccacaagtcatgatctttcctgagaagcaggaaccacactgcagcctcacaaagccgtaggagacaattacaatcccaccaaggggccaatcacaggtgaatacccaggcttttttgaggtttgtcagagacagttcctacatatgaaaaacatttccttcagggcaaggctatactaagataatgtctcattgtccttttttatcttgatccactcaagaataagggccatgtctctttatctcagacctcaaagagtccctacccaatgataggcattaactagaagaaggaatgagtggacgtaaatgaagggcattcaaacgttgtgaactcatgatagtaacggacactttctctgtgccaggcactgttttaagtgctttacatgttttaagttatttaatcctcacacaaccctatgaggtagaactattaccatcctctgtttactgaggaggaaactggggcactgagaggttaagtaatctgcccaaggtcacacaggctggtggtctggccccagcctgtaccagtcactgcactgtatggtctcctgtaggggaaatagcttgtactttggggccagaccctatcagtaaaatgcagattatgatcatttcctgctatagagtgttacaaagattcagagagctaacatgcaaagccactagaatatagtggctgtccatggatactagatcttgtccctcatttggggtccactcatgtggactctgcagccaagttctrtttcatgattaactatggaaacttcagcatgtggttaaatctctggattattcggggttcagagaggagggactcacaccagaccttatagaatggccctgtgtgctcaggttgccctgtggccagaggggagtttggcatcctcacctgtcaggcattctgttctttttgtgcaccaccaccacagactggtaaggggctgttctaaatgaggtggggacaccctctctgctctcgaaactcacagtagagtgtgacattggggcctttagtctgataggactcacatggcttcgtaaactcactctcctatcccctaatctttgattgcagaagtttgatcttcccatactgcatattttcagtttatccaaagacctcactgtctttcattaatacattttttcctaattagacaaatataaaactgccaacttttcagaaccacctgctattttattccgtttaatcaacattttcccacctctgaaactaggccatccatttgatcctctttttctaataaaattgctcaaaatttacaaaactgccatttcattggttttacaacctaatatattacccatttagttataaatttagtgctgatgtaccttttcaagcattttgattggtagataattttaaatagagactaatttactgatttgccatggccatttatttgtggttaataacccattaattaaaattttagttaatgtttttaaagagaatgatgtattcacgtcrcttgaagtccaagatacatcaaagggtatgtggtgaatacctctctccatacttctccccagcccctcatttttcctctttggagaaaaccagtgtcaccatttttttgggtggatttccagtgacatcctgtgcaagcataagcataaattataagctacatacccatacacattccccaccttgttttgcacaaatagttgcttattatacctactattctgcaatttgctttatttacttaatgatatcttttaaattattatgaatcagttgattcttaaaaagcttccttgtttttttaaatggctgcccagcttcccatcacaagactggaccataatttctttactcggtctctttttggtggacatttagattgcttccaactttttaagaatacatgtaatgccatgtgaacaatctgggatatatgtcatttttgcatgaatgagagtttatctaaaggataaatacccgaaagtaaaattgctgagtcacagagcatatgcatttgtagacttaaaataatgccaaattgccctccataaaggtgatttatttatactgctaccagcaatgtatgagcatgcctattttcctgtttcttcatatcctccccagctcagtcattaaagttttacctttatcaataaggtagattttaaaaacagtttctattttaacttaccatgagtgaggctgaccatcttttcacttctgagagccttagattttttactctgtgaacaaacccttcatatcctttgcccgtttttcaataaggtagacttttaaaacggtcactatttttaacttaccatgagtgaggttgaccatcttttcacttctgagagccttagattttttactctctgaacaaactcttcatatgctttgcccatttttctatttagatttttttactttgtgaacaaacttcatatcttttgcccgtttttctatttgtttttctgtgttaatttgttcttcctgttagttgattttggggaaaatgctttgcatattaaggaaattagtcttctgtcttgatatgagttataaatttttttcccccaagtttacctcttttccttcgattttgttactgatttctttgccatgtgaatttaccacttcatgattgttgattgttttgttttgttttgaggttcatttatttttttaattctccaatttcttccagtattttttaaaattttttgaatctttaattttaattttttgaatcttccagaatatatttattataaagtatgagttacagaatgaaccttcttttcccatgcaacagttgttaatttcagctttgcttttattttgtaacctacatattgtgtgtcctgtcaatgtcttttataccaaccctgtgcctctaacataagtcaggctgatttaggatgacagatcattttttcatgagatagcttggcttsggggaacaatcattgtcttcagtgtctagcagacctggttttgaatgccagcttagcaatgtcttacctacacaacctcagacaagttacttaatctttctgaacttttgcaacctcattttgtaaaatgtggttgataatacttccatttygcaaacttgtgatcattagggataatgtttataaactgcctggtcagtgcctggcacacagtagatagataaatgggagctattaatgttgtcatcatcattcccgatgtcaattatgtgatgtcagtctgaatgaggacattgtgtgccctcagtgtgcagccattcttaagtaaaaactggtgttcctggaaattggatgttgagcctccctacctaagccagaaggcatcacaggtaccctagtaaagatcaggctggcattttgagggccacatttataacctctgggcagatattcagttgttaggtgtctattaaaagtgcacttcactggaaggtaaagtgtgtctgattatatagtctggttttataatcaggtctgtgaaattaacagtcagcattagtttgttagtgccgtttggacacataatgatctaagaattattgtatgatctgtataaatctcttatttcagaacctatgttcaatcctgtcatacatctrgcagtcccccagtttttagaacatggaaatcttccttcctctaggttttctatttggatctgaaagtaaatgctcaatgttgtttttctattttcagggatgactctgttccagaagacaacatctggagaggcatcctctctgttattttcttctttcttatcatcagtgtgttagctttccccaayggtaagtaatgtcatgcattaccacatttctcctatattgtgcctttctggtttttttgagatgtgagtcatctagaagatgaagtaaagaaataatctgagttttgtgtagtggttaggggcacaggctctggaggcagactgcccattctgccacttcctagccccagagaagcctcctaagagtgctgagaatacktcagtttccttctataaaatggagasagcagacaggtacggttgtgagggttaactaaatgggtgcacgttaaacactatgaacatgactgacaaattataagctctcaataaatgtggttgtttttgttgctgtttttgttattatcagttgagtcataaaatactccattactgctgagttcttcctttttgctaaggacagggtcaatgctgtaatgagtattacttaaataagttgtcccaagtgatcttttatcaccataaactttgctgattatgcatttaggatatgaattttcatcagcaggaaaaaaagacaatgatttctgtgaattttacccccatcatgattatggagtgagtgaggcaaagcttttgtttaaaaagtaagtttggtgttctgccatgctcataattcatccctttcctccaaattcttccttaaaagttgttttcttttctcttattccctttcagtacctttccactagaatattctctacttgttcgccgtagccgtagccacttctaaacgctcactcttgtcttctattttttttttttttaacacctatgacatttggaaattgttccagtctttcttaggggttattctccatgggccggacgtactcgggttttaaatatcatgctttaagatgcatttcttttgtaaccgctcatgctattcagtaggctatcatgtgtaatataagaagctcattatgaatgttatcagatgctacctggaaatgttccatgtcaaggccttcaggcttcctaagatggtggcagtggaattttgtcctattttttgagatacgagtcatctagaagatagagtagaaaaaacagccgggtgcggcggctcatgcctgtaatcccagcactttgggaagccgaggtgggcggatcagctgaggtcaggagttcgagaccagcgtgaccaacatggagaaaccccgtctctactaaaaatacaaaattagccaggcgtggtggtgcgtgcctgtaatcccagctactcgcgaagctgaggcaggagaatcgtttgaacccgggaggcggaggttgcggtgagccaagatcacgccattgtactccagcctgggaacaagagtgaaactccatctcaaaataataataataataataatccaagttttccatcgtagttaggagcgtcactctggaggcagactcatacgtagcactgcgtttacaagaacgtagtggttttagtatgtagcagactagcataataatcatgctgataaaaccatgactctgaatctctcagagaatgaattgttctacatagccaagttatttgggagctgagtttagctctccaaccactcaagcttttaggtgaaaaagaattttttaatgaaaatctgcataccttatgcagatatgtcaaatgtagtttggcttttccatagggattgatggttctggtagtgcacaattatcacggtatgaagacaagttgtgcataatatgggtaagtcatggaataaaggggtgttgaccctgctattgaatttttaattaaaaaaaaaaattttagagatggagtcttgctgtgttacccaggctggagtgcaatagctattcacaagtgtggttatagggcactacatcctcaaactcctgggctcaggcaatccttccgcctcagcctcctgagcagctgggactgcagggatacatcaccacacccagctaattttttatattttttgtagatagagatggggtctcactatgttgcccagactggtcttaaactcttggcatcaggcaatcctccatcctcagctgcctgagcagctgggattcctgctatcaaatttactgaaaaaaatccctgacgtcaaacagctttttggctatttgccaactttcccttccctctcattgaattttacgttagaggagtgcttgggtcttatgtagaccctcctctccttcaagagtgccgtattgtatatgatatggcataagtggccagccaagggtgggttccctgagctctttctgtacaaaggtggcctaagaatacatctcaaagcaaggaaatggcaaactctatctcaggttacataccaacgcaaggctgaccaccaccaaagcagacatttggagcctctaaaacatgactaggtgactattcagatggtagtgacagtttattccccattcccctcagccattctaccttctgtatcccgtgatctgctgccttcttctttgtcatcactcaatgccatgaccattattggtctgtgccctctattcctacttttctcttatttctcttatgtcctctgtcctttttgttcccttatcagtcaatcagagcatgatacgtgcatatgtcctcaggaaactgatcagtgcacaggtatcaggtctgttctttaagtcttcagctttccttgacctgtgttatttgttgcttagttctcaagggttactttttcgtggctttgaaagtttctttttggctccttatgaaaaatttgctgtttctgagcccagagctgttttagaagtgtgaggattctaaaagattagtctctcaatagttgtgatttgtacaggcgtcccttctctaagtctttagcgggagctgagtattggggcttcattagctgatgtttttcttgaggtaccaaaggcactgaaggttaggggattaaatctatttgatgtaacactttgtgtgatttcttctggctttgcctctgttccccaatgaagtcctctaatcttcaaagttgacttcagctgctcaatctctcattgtgggactgtgcttttgttttgattctggaaagataaaactgaagctcggtttccttatcctggctgcatggactttgtgatacgcacaaagggaggaggagccacagagctcatctagttcagccagctcagtttaccagtgagaaggctgaaacgtgccaccatgtcccccagcctttgatgtcagcctgttcgcagggccacagytgtgcatttcccttccgcggtgctgctctggtcatatctcatattaggtccattgcaaggtgctttatctctggctttctccataatatgttttctgtctcctgctgtttctctttttttctgtcagtctctggcttgtcttttcccccatggtgggatcttagttggcctggacctagcgtgctttgcatcccacaaaggaggtgggtggtgactgagttgatgctcctctgttgctcatgtgttgtctgygactggcaggaactgacacattgatctgagccttcctactgtctcctgtttccactctatttctgccctaccatcctttcttctcctcccgggcacatacacgcgcgcacgcgcgmacrcacacacacacacacacacacacacacacaccaccattcaccaaaaggcagaccatgccaaaaataaggtttcagataggtatagaaggtataaacaaggaggatggcagttcagtgtcctgtgcaggagggattgggacattagtcagcaaagggaggacttggattctcttcaagccatgtatatatagcaaacatactgtgtttacgtcgtttgttttctaaagatctgtttattcataccttacctaagagtagtaaaactaacttttccacatgaaagaatgttattgaatattttcaaattagggatggctttggaaggtgctagtggagatggtggggagttgggagggccctgggcagggtgcccctgaggtgcgtggcctcccctattagagccctctctcaggccacaggcctccccaggagcccatgctgaacggctgtctctgtgagtggagtgtacatgccccttcacactcagtcttgtcctcttattttccattctccccacccttggcacatattctcaagtcaagtagtgaaaatgaataggaaaaatggagcccaaacttgccctctccttcacagacagttttggggaagtgcctgcagtggatagcatgtccggaaaaattttctggcaacttgaaatgcatttatccttgacctgttaaatgctgccctgcacggctgtgtataggccaaaagtggattgtgtccatttgtctcatcacgtatgtgtgagttcatgtatgttatctatgtagtagacttggtcaacttctacaggaagggagccttgtgattctttttgtagagtctaaataacaaaaaagacctttgactttctccataggattttataatagtcaggatgcttttgactgcaagtgatagaaaacgcatttcaaaatggcttaaacactaaggaaattcgytattttcttaygtaacaagacgttctgagatagggtggttggcagactggcttattcagcggctcagtgacctgtgaagacccagcttctttacccctttctgttctgccgtcttctaggctgcagtctgccctgctggccttgagacagctcctgcagtgccagccatgtagtggcaggcaatggccagcagatgaagagatcatctcttctcttgtgtctttacttgagtagagaccccttttctagcaatcctccagcacacttacatgtctttgactaggattgggccacatgtctcttctcaaccagttccaaggacagaaatttatagtgtttagaggagtaggtgttcaacagatatttgttggctagaagaatgacaggggactaggattacctctgctggtttagaatccacccctgagctatatggcagaggagtggacactcaaacaaaattttgtgtgacaatcaacagggtgagtggtaggattaggtcccagagttctttcattcagtcccataagcagatgtggagggagagggctggcagtgagagcaggggaaggagagggtctgatgtctgcatttacacttctctcctgccctcttcgcctcttcagttctcctcttcattctcttttggcttccttacaaaaatgttttaatggctaccttcatcccattatagcaactgacactcaagtgtatgtgtaattttaactataccaccctatcactggagtgaaatttagaaacctatttgagtctccagttggctggagatttctttcaacggtcgaccttctggtgtacatttcctgcttctgagaactccctttaactgttgttcatcccctttccaccttaccacgcccccmaaaccagcccagccttatctgtacttcaagtgcctggcccattattaacttctcatgaatatatgctgaattaaataataaatccacctggaaaaaagttcacagaacaagacctcttttttcccttttgttgtctgcaagagaaacaccattcagccccccyttttttttttttttttttgagacagagtctcactctgcccaggctggagtgcagtagcacaatcttggctcactgcaccctccacctcccgggctcaagcgattcttgtgcctcagcctgctgagtagctgggattacaggtgcatgccaccacgcccagctaatttttttttttttttgtatttttagtagagacaggatttcactatgctggccaggctggtctggaactcctgacctcaggtgatctgcctgcctcggcctcccaaagtgttgggattacaggcatgagccagcacacctggctgcactcagcacttttttacggtctttgaggagagtgaaaaactagtatttcttatttttcctgagtttatcattgtttcttcttctgtgtcatttgacttctctttgctaagataatgataatcatgtctccttgatgtttagaagtggtccaaaaggtcaccatcttctaaatttaaaaaaaaaaaaaaagttcctttctccttccatcctgtgtcccctccttcactactttttgtaaaaaaaaaaaattttccagcccagcgtagtggctcacgcctgtaatcccagcactttgggaggccaaggtgggtggatcacttgaggtcaggagttcaagaccagcttggctaacatggtgaaaccttgtctctactgaaaatacaaaaattagccaggtggggtggcacatgcctgtaatcccagctactcaggaggctgaggcaggagaattgcatgaacccgggaggcggaggttgtagtgagccgagattgcgccactgcactacagcttaggcaacagagcaatactccatctcaaataaataaataaataaataaataaataaattttcttttccttaggtttgaaagttgcctagagatcatttttttcaccttctcaaattttcctagaagaactctaactaataataatcaaaaagagaagctgactaagagggtctgccagggagcctctggcctgaggatacaaatgttagctgttggacaggcaatgtctgatttttattaaaatacttttatttccctaaggtgaagtcctgtgaacttaattttttctaggtataacagtttctggtgagtcaggcaatgatcttattttctaatttctgacgtagattttaaaatgctagctcttctcatgaagacattggtttctagttcttttgaaattaatcttgctcttaatataagattgaaaatgatgtattctaggccaggcacggtggctgacacctgtaatctcagcactttgggaggcggaggtgggcggatcactcgaggtcaggagtttgagaccagcctcgccaacatggtgaaaccctgtctctactaaaaatacaagaattagctgggcgtggtggcacatgcctgtaatcccagctactagggtggctgaggcaggagaatcacttgaatctgggatacaaagcctgcagtgagctgagattgaagcctgcagtgagctgagattgaagcctgcagtgagctgagatcgcgccagtgcactccagcctaggtgacagggtgagactcgtctcaaaaaaacaaaaaagaaaaataaaatgatgtattctaggtggaaggaacggtaaataaaacacatagtttttaaatgtccctcataagaaaaccaaaacccagcgttcgttgctgcaccactgccctaagaagtcttccccaattctccaacataagcaagagagtaagtaaccaaaccacagatccaaattctcccaggcagcttttatcaaatccgatataaagcacaggtaaggagtaggaactcctgtggaaagcaaccatgaggctgagcccttctaataacctcagaaccataacaatggtcagagaagaaaaggaagcctgcctttacaagaccactgagaaagtagtcaatagtctgttgggaaataagatctgtggggaaggcattgagatgacatgaatgttcacaggatgctacagatggggctcatgccgggcaggtgatgctgtggaatgcggggmtcctcctcagttgcatccccacccctggcacatacacccttaggctctgcaaaggtgacttgactggagtagccaggtgcaagtaacctagtgagcgtaagtatcaggacttataatctagaacatgccagcctcatcctcgattttttttaaaaaagtaaaatgatacttttagcaatactgctgtctgacagtaaagattgcactgttagtatataatgctactaaaatgtactttttaaaataccactttaaaaaattcagagtttcttctcaggaggcaatgggcagttatgacaaggctcacactcgcagggcggcagatttgatggttgaaatcaaacctagactgggttttgaagttagttactgaaagggtcaccttacattccagggccttatctcaccttttgtaggcaaaagttaccagtggttcccacctccctggattagggtggtccctggcttttatctctagagctatcagttccctgccctttccctggtcttgcttttcctgagcctrcttatcagttccacattatggtaaagcctgcgccatgcctttccccctgttgcatcggctctaaacactcctagcttgtttctttcccctcactctcctggttctgaaaccagtccgcgctcaaccctcagataccgtctctaaccctttcctcttcctgagcygacccagttctgtgaaagttcataggaaagtccccaggtgctcctcatgactcagcctggtgacacaggaggctctgatggaactaaggaggactccatgagctgcatgaccccgggcaggttcctctgcctcagtacccttatctgtaaagtgggagtaatgatgacacctttgtcactgagtccttatgacactgtgtgggggtgtctcattccacagcctggtgcatagtaagtgctcaggaaggtactgctgactcctgtcgttatgattgctcttgagaataacattatagaatttttaagtgctgattttgtcacaagccaaataataggtcatacagttttagaggtgaaccttataagaggaaactatacagaaaactgacgtcccattttatatctaaaaggttaatttagtgttatagataaagtaatatttacaagccaggcagccaccaaaatacagaagtcacttatggtgacaagtcaagagctatcgcctaccatgagtaaagaggagcatttggaagtgaaaataacttaaaagatgataattttagccatgagtttcccaatgacttgacaaaaggtgatggtgtcacattacctggcgggggatcctggtttataaccttcactgtgactttctgagaaagaagcagctgattttgaaaaggaatataggtagtcctcactgtctgagccctcactattagaactcagaaatcaaacagatttagatgaattttcaataaacccctaaccatctgagttctcactacctgccatccaaaacgcaggaaccaaacgcaaatgcatttggataaagcagagtctctcatgaaccaaactcaccatccgaactgccacctaggmactgatagatttgaatggtggggggtacttgtaactgattttcataataagaacttgacttatcaaaagaaagtagttaaaatatatttcaatgtggtctttttaagaatatatagatgattttagaatgaattcaggaataaaaattgcagcagaatgtttgcctcagataggattcaagattgcaagcaacagaagctgactgtgcttattaaagagcctgttaaagactaggagtggctcacagtgtcataggcttgcttggaaaccaaccatagtctgagcttccagaaacaggcaccacccacagagctgttctaaggaggaaaccaaccatattctgagcttccagaaacaggcaccacccacagagctgttctaaggaggaaaccccagcaagcatgggctatggtctgccccagtgtcacttctgcaatggattctaagggagtgccactttggatggccaccacctgcctactgcccctactggccagggctagagaaacagagagagaggagagctgtacctactccctttactgtcactagctcctgaggccaagcctggcatgattgtcactgcaaaatgagccctacctgtaaagaaggctgggaaacaagctctggtgtctctcctggggacatgggattcataaagttggaaattccgcaagtgtaggaaggctgttcaaaaggcgtgggtagacctgcatagaacaggtactcaccagaatggtgcttttccatagctgtgaggtgtaaggtcaaggctcagcttgctttcttctccctcttctgcttttttaatgaaaaaagagaaagtattggcctatcacttgtcttaagggaaagttttgtcctatgagacttttgtttcagttgtgtggaatctgcatgtgtctgaactggattgccatgtcagaggtgttttgtcagcacaggtcataatgaaaagccacatgatgtttctgtttcctctgttatttttcagtctctctctctctctctcacacacacacacacacacccacacatgtgcacacacgtacacacacgcatgcacccacatgcaaacgcacacacatgatgatgactgtgctgtccagagcctctttccctggagctcctgggcagctgggacattttacttgttaaggtacaatatgcatcacacacacttaagcctagcctgatgacccactcactattacaacattgtttccatgggaaattatgttctgacttctcaagacaaagctttataaaaaatctctgttgtggagagtggtgcctgtgatgattgtggtgacagtcgttataatgtggagaaaacatttcaaccaaactttgacctcaaagtgtttatgtagaaaaaaaaaaaaaacttttaacagtagagagctttttcttcttgttatctgtatggagatcagcagcaccttaagttttagccttctctgaaaccagttccttctaactttataatgttatttatctgcaggtccgttcactcgacctcatccagccttatggcgaatggtttttggtgagtttatattagcaatgtaaaaggatgttctatttttttaatcttttttctgcttatcactttaagacttttacttgctactctcaatagttaaaactttattctagctttttgctttttgatgttcctaatatacatgttttcttaaaattatttgacacaaaataaagtgttgaggatgacttaaattctcttacacatgaactgtttcaactccacatgcctccttatgttgttgtctcttaatgtacacaggatttgacttaagcaaatatctcttgttttcctttatgtgttttcatagtgctttttactagtgcaagcccaagaacttatgatgagcacatttgtcttgtgagcatctggaagggaatgaaaacaaagcaattcaatttcttcagttttatgaatgagaaagaacttggaaagagaaagacttctgacaaagaaccctaatttgaactaagggttagaaataagcatataaatattggatgtcttatttttacttaattttgtagtctaaatagtgaaatcacctaaaggatttaaaatgaatcttcaaaactttggatattggcttcatctgacctaaataagtcaccaaattattttaggtttggaaaatgtaatcttatgtaaaaatgtacaagaactctaagaaattgctattttgctataggctgcctatttttctttcagccttcagagcttctaggtaactcttagtctctttgaattgattggtgaacttttcactcagcagccattcactgagtgagctgtgtgacagatgctgctctgtgccctgaggccaccagggaaggccagacagacaggagcctgccctcaaggagctgcccttccacttggagacrraggacagctagtaaacaaactattacacaaatcagtaatcaaaaaaatatcagctatctggagttagtaggaagctagttaagaccaagggaggtgacaggagctggtgtctggtttagcttgaggagtgatgggaggcctgagggagtgatgccaagtctgaaactgtcatacaaagaaggatccaagcctgcaaagattctgggggaggggagcatcccaggcaagaggaaaagctgccaaaatggcccacagctagaaaccacttccaggccagtgtggccccagtatagtgcaccctgggagaagagtaggagagaagtcagagagtcatcgggcacagatgtaatcatggggactgtgggccagggtaaagagcagggcatgaagggcagggggaaatcatgggagggtttttcctagagtgacctgattccatttacattttcaaaaagatagtcctggctataacgtgcatacctcccattgattcaatagtgctgtttgaagttataagttattttcagctatttggacacatctgaattcttcctatttcaaatgatctatggtaggtagtaagcagttttatttccttcttgagagcctttgggagcatggagccctttgrtaatccgatgagacctatagatagacccattccctatgtgtgcatccatggacattgaccatgcacagctctgcatatagtgtccagggcttcacagacctcgaagcccaaccaagaactccagattgagaatccctgcaccacagattctttctgtcctaatgtaattattcaagaggatcataattattaaaaagtgtagtggggggcgtttgtggtgaaaattggtaaaaaatgggtggtgcataagtgcaaactgaaggcaattctcatatcaacttgcctaaaaaatgtgcattccctgggccctaggatgcacaattatgggctggccacataccacccgggcctcccttgaactccctgaggccaggagaggggtgcctgttagaaggtctggcactatagcgcttgcagtggatttcattccagccacggacgtgctctcctctggagtggctcactggagattagtgctgagccaagtttggatggatgctgtgatccaaggtcatttgtatcacggtctctaaatgtcccgcataaacattctaattccaatgagttcaagggaaagagaaaccacaaaacccctcgtgatcgtttctgaaatctctctaaaacgtattggacagggttttgccttctaaaagtgcattgttaacatttctttttaaaatgacacatagtgattattaggatagcaattatgagatgatagaacaataaaataatgcctacacggggtaatgtggagtgtaagtctcaaaaaagtggccctgggccacctcttgaaccttacactggtagtactgtccacacccagccttgccctcctccagtccacttagttggctttttaaaatgttacctagatcatcttatttccccacttaacttacaatcatatctgaaatgttggccgtggcctttaagccctgatggtcacttcagggccgccttgctccattcccctctctgccagtgctctagccacatacggggtcctagatatttctcttttcggaaaccgacctgcatgctgttctctacctgaatgtygcgtgcaatcctcacacccaccccgcacaccctttgcctcatgatccttcaagtctcagtctaagttagcatcagtttctcagagatggttttcttgaccactctcaatctgaattaggactgtgtatcagactgcctcatcaagggaaatcccagattataagaggagtcttgacaggctgtgctgcaatcttagtgtctggttttggcaatgccattcgagtctaatgtgtattgtgtgtgtctgactattggatctcttctaaacttcagcatgtttttgtttctctcaggactcagtgtgctctacttcctgttcctggtattcctactcttcctgaatttcgagcaggttaaatctctaatgtattggctagatccaaatcttcgatacgccacaagggaagcagatgtcatggtatgtacttgtcagtggcctcttggagaaactcgtagactctttcttgggtgtaagaggtaatagacttgacattttaaattgttccttctctgtatttcctgtgtagttacctaaaaaccaggtctctgggagggttgttgagttgcatggttgtccacaggtgatagagttcagggaaagaaaatcctctcattacgcaaaggggtctgtgaggaagaatgcacactttatcgtcagacagccttgggtgtgaattctgcctctgttacttggtagttgtgggactttgggcaaagtacttgtcagattattccatttttttgtaagttgacatagtaatacttacttgggggttattgtgaagtgaacaaagtagcattatctgtggggcctactgcgaggtctgccatggtgcccccaacaccccatgttgttgggccatgccctgggtcacggtggctgcccctgcacctgtcaatgtcactctcagcacctgcactctctggccttgatgccttgatcctgctccactgcttgccacagagaggccagtagtcatgaattagtttatttcatttgttactattatttttatcgaaccatacaaaaaaattttattcttggctaaaacgactctattttggcttttactgaagagactaattatgtgggaaaaaccaactatttttctcttcactgacggtgaacacttctgtgaccagatgtgtaggtttttcccacaccagccaattctctaactttcctgacacctggagttagcgtcagatcccactagttaagggcccagttccataagactgcccacatttcagatgccactcgcaagtccaggctgtcacctgtgcttctgaccaatcagctacaaatcaggggttcccacaatatcctccttgtgcacaatcatttgctatgatggctcacagaactcagggaaatatttaagtttgccggcttattgtaaaggacatgataaaggatacaggtgaatggccagatggagaggtacctagggtgaggtccagcagagtcctcagggcagaagcttctgtctctgtggtgttggggtacaccaccctcccagcatgtggatgtgttcactaacctggaaactctgaaccccagagttcagagatttttatggagactatcgcataggcatgatctttttttttgagacagagtctcactctgttgcctaggctggagtgcagtggcacaatctcggctcactgcagcctctgtctcccaggttcaagcgattatcctgcttcagcctcccgaatagctaggattacaggcgcctgccactacacccggctaacttttgtatttttagtagagacggtggtctcaccacgttggccaggctggtcgcaaactcctgatctcaaatgatctgcctgcttcggcctcctagagtgctgggattacaggcatgagccaccacgcttggccttttttttttttttttttttttgagatggtgcctcactctgtcgcccaggctggagcacagtggtgtgatctcagctcactgcaaccttggcctcccaggatcaagtgattctcctgcctcagcctcctgaggaactgggattacaggcatgcaccatcacactcggctaattttgtatttttagtagagacagggttttaacgtgttggccaggctggtctcaaactcctgaccttgactgatccacacatctcagccttccaaagtgctggaattacaggtgtgagccaccactactggcccatgatcaatttttttttctttccaagacggagtctcgctctgtcacccaggctggaatgtagtggcacaatctcggctcactgtaacctccacctccctggttcaagcaattctcctgcctcagcctcccaaatagctgggactacaggcgcctgccactacgcctggctaatttttctatttttagtagagacagggtttcaccatgttggccaggctagtctcaaactcctgacctcaggtgatttgccctcccatagtgctgggattacaggtgtgagccactgcacccagacccccatgatttttaactcaatctccagtcttgctctcctttccggaggatggaaggtgggactgaaagttctaggcttctaatcatggtttggtctttctgatgatcagccccaacccaggaacttaccaagtcacctcattagaacaaaagatgctcctatcacccaggaaactccaaggaattaggagctctgtgtcagtaactggggtcaaagaacagatattagaacaaaagatgcacctggcacccctattggtcaggaaattgcaagggtttccggagctctgggctaggaactggggacaaggaccaaattatgtatttattatgaatcacaatatcacactattttatactataatgtgttcttttccaatgttttttaatcccaacatttggtacaggttaatttttttctgaaaaggagaacgggaatttgggccatagatgggtttgctttgacaaacaagaagtaacacaaagggacttcataaaaggtccaagaaataatcattcccccatggtgacattggtcaaatccttcttagagtggtatttaaagattgttatctataaattttttaagggatatgcttaaagcaaaaataagaatgccagaaattatttatcagtctygggggagaaagtctgttttggaatttttttactctaagggagagaatgacggaggttgacttcttagcctatgatgatgatgataatgcagatgacggttatgagaataagggcagttatttattatgaattgtctatgtcagacactgtgcagggctctttatattctacataagcctcgtgcatgcatgctagatgttcatatcaccattttacaggggaggagatggaagcttaaaatgcagtatctcactgaaaacacaagccgatggatctctctggcgtcaaaacctgtgcttttcatttggagtgtgctttcagtatatagttataaaaataagtgctttgatgctcacaggagccttaggaaatagaaattgggagaaagatacyccaagtgtaatattttcccaaacatctttcttgcatttttgaacaaaagtggtcacattgcaaagtaaactgacttgcaggtggatgtgcttgtgtgcctctgctgatccagttctcacagccagtaggaggagattgaatcgaatgataatgctcttgacacctggctttcttaagaatttgacatcacagggacatccagatgtcaaagttacagccccaagtagctgaacctggcttttaaactctagttttcaagtattggctaaatctttcttgccaaagtaaagcacgaggctgtgttcagcctgtagagttctaactggtgctaaaacagcctcatcttctccatctctaatcccatccctttatacttctttaaattgtcttttgcaattctaaggacctattcattagtggttcctttatgcaagacaggtctataattcctggcttcccagagtccctactctctccactccttcatgttgctacccattcctaatcttgatagaccatgatccatgcctggtatcatacattgaaactcagacttcattttcccttagaattaatattataaattaatattataaaatattatataatataaatattcataaaatatatattataaatattataaacatttataaaatattataaatcccttagaattaatattataatattataaatattataaattggatcactgaaatcccgttagaggcagttttttgtgtaattgaaaagttgctgcatttcaaaatattgattctattcaaaaatatgtctttaagcttcaatactgggttgtcttgaagcagcagtctttggctaattaatgctgacccagcttttcttctgcataagacaccatcccatgctggtgggagtgggggagagggtgggcatgttccctgtcctcttagagcttagagtctactagaaggcaaattaaacaaataattgttggctattgaaccctaagacaatttcaacagctttttasaattttattatgaaaaattttaaacctatgcaagagtagagagaatctataacttcatgtacccatcacccagtgtcagtattattgacacaggcccaaacttgttccaccttttcatcccacatcctggaatattttgaaacagttctcaggaattaaacctaaaatagatgggcttttctttttttttttttttttggcataaccactgaacagtgaacagtacgcagtgagtgttgacatttctgcagtcgcttcgtaaatgttctgtatagttgatttattcaaaataggatccagacaaggtttacacattgcatatgatatgtcttttaaatctcttttcatctgtaattcccctcatcatgtcctgaaaatttatttgtcaaagaaaccacattgcttattctatagggtttttcacatctggattttgcagctgcatttgcagtatcatcatttaacatgttctttttgtccccctatatcttctataaagtagaactcaggtgtaggggctggatgagattctagattccagatcagtttttatagtgggactgcttcatagctggtgctgcgtatcacactaggaggcacacagtgtctggtggtctcgctttttataatgttaagattggtcatggctttgtgaggtcaacatcagttttaagatgcaccatcaattataggtatgactttttggaggagaaraaaagaaacctggggctgagcatggtggctcatgcctgtaatcacagcattttgggaggccatggtgggcagatcataaggtcaggagtttgagaccagcctggtgtttgagaccatgtttgagaccaacatggtgaaaccctgtctctactaaaaatatgaaaattagctgggcgtggtggcacgcacctgtaatcccagctactcgggaggctgagacaggagaatcatttgaacccgggaggcggaggttgcagtgagccgagatggtgccactgcgctccagcctaggcaacgctgtctcaaaaaaaaaaaaaaaaaaaaaaagaaaagaaaccttatatttaaagtgctatacattgtaatatattgaaatagtcaccctaattctcaaaacaatacagtgtgaaaaagrcgtgtcatagattcaaggaagcacgatagttaaaaatggtacagtctgtgtagaggtcctgattgggggtgtggggagctgggaccagtctgagctgggaccagatcatgaggcagagggcmctgcctgaggctaggaggctgccagggctgagccagctgggatgaggagtttaggtgttattctaagtgtatgaaaaggccatggaaggtttataagcagaggagctacatgacctgtgttgatgttttaggaggtcaatcaataaatacctccatttctagttgagtttggaaacagaaacaagagttcaaaatctcagctgatttcttcctgtgaaagctcagtggagcagattgctttagacctgggctgaattaagcaagcctgtcttcccctagcccattagacaaccacaagctgcttctgcaaagcagggcctgacccacaaaaattgctgcatggctgggggagctgatgagaacctgtgctgtctgtaagcaaataatttccaaagaggacccaaaagaggttggatctctttcttcttccaaagtcagcaactgccccagagaggagtgaagagatagttgggctggagacctggcgtgtgtagtagtggagatccttctacattgggacgggcatgctacccaacccctttcttcccacctcctgccccagacacccttacacacatgcatgcacgttccgtgatctgattatgattttcaagatctctctgtagtcgtaagctagatgtgaatacctaggtgcttattatagcatcatctatactttgttatatgcctgacacattccacagttttcaaaagctattattatggaagtctaagcaagaaataatagtggcagcgagatgcataaaagaacaacctggggaggtaaagtgaataggacttggtatttggttaggtgtccagcaagcaaggcagagggtaaggccgccaagatcagcctaggaccagttgggaagtcagcagaatctgtctttacccatcttttgctcacaggcatgcacctgtccacttgaccccctttccaggcttcagctctacactgtcttcagttaaagcctgttcctcctggttcccagggttctgcctgcatgcagctctctggctgctttaaactgcaatgccctgtggcccttccaggacaaggacctcaggtcttatgaggggataattggcaaatctgttcattactaactatactgcaaatagacggattggtctttatgatttttaaaatgccttyccgcatgtcaaagcatagagctacttaatagagtgtraagtcctccagagttatctgcaagctgtgattactttaagagcagccttctaaaaacagatcttaccccttccttatctaaccctacacagtgtattccagagtaaagaagagggtggggtggttgagacatttgaggttgactggacgtggccctgctccttaacctaatatacaacctgcttcagctaagggcatttccctctgtcagcctgtgattctctgtgacaagaacgtgctgttccagagtccgggaagaaacttttcatcttattgcagggcagtttgtttcttttaaagccttatcttgacttaccctattgaattttatcctcttttctccagatttcccatttacacagcataatctcacatcatactgcttctcaaaaaatagaattcttaaaaatgtttgttcagctttgcaagttgaaatgcattttatctgagaaggaaatctgatgtgtggtgggtttcagaagagacagggaagctcttttgctctcagaaagtatcatttctggaatttaaaactattatagtttataggaatttttttcagctggctgataatagggggtgaatatttgccaactcttactactgcctgtcaaattaattttgggaagaaaggatgtgaaatgtagagattcccagtaaatgttatattatcatattgtcatgcagtcatatgataagatattaaattacttagaaatacgtataatcaaaaacaaagatattagaaatggaaccaacattctgaaaagctttgtaatttttaatatttaaattatgtagtatccgatatatttttggggaggggagttctcttttaattactgaagttgggtgcttttcttcttttttctagcataactatttaaggctttacattttcctctaaagttcaatttttacgtggtgtattttcgttatcattatgacacgttaaaaaaaattcctattatgatttcttctttaatccatgatacttagaaatgtgtgtttaaatttccaaatctattgggaatcttttatttgtgctttagttactggctttaatattgttgccctgtggtctgatgacatgatctatgtgataccacttctttaggatatgttgagcctttgtaaaattattttgcttctcattttaatgcagcttttgcaattcagagcaaagcagttttgatttataaactcaaatacttgtctattttccctcaaggcccttaagttattaaaactttctcatttgttactgagcaggacttatttgttgtcaagttcatatctattctttttatttaccggcagaatcctggaagcaagttgatttctagagtttcactaattattctcttttttattttaaatagsagtatgctgtgaactgccatgtgatcacctgggagaggattatcagccactttgatatttttgcatttggacatttctggggctgggccatgaaggccttgctgatccgtagttacggtctctgctggacaatcagtattacctgggagctgactgaggtaagaaggagggcattgggggttccccagactgtgccatgtgtgtagtttatatataggaaaaagtatgtcagttaacagtcagttaatccgttctccagcccctgtggtacaaaacagtatttaaaccatcccataagaatatttaatacttctgtttaaaaaacaagcaaatattaaaaatacctccttgttaacttaataaagtgcacctctgtcctgcaagtcttaaagagaaacaaatgaaataaagctaaagaatgaagttaaaattccaagtaagacaaataaatgggaatgaggagacctgcttagaattcaatagatcagttgacctactaactagcttccagtttgagataatagaattgtgtgttcaagtactataagagcatccagggtatttggtagctgcaaaatggattccaaatgttagctctaatatgtcagtaatcaaaagtttgttgcatttacttaataaaagagttatagtcttgaaaaaccattagcaaaatgaaattttgggaactaactcattattgttctattattatgaatcattcccagtgaacagaattcgtccacatgcgcagtatacttctccatgctcatcattgtcctgaccctaacttagagacgtgtgccaactagatgtggcttctgttaatgtgcctctcactgttctggaggccagaagtccaagatcaaagcgtcggcaggactggttccccctggggccttttggagcatttttttcaggctccttctctatctttgtggtttgctggcagtcgtggtccytgggcttgttgatgcatgaccccttcctggtcatgtggcattctccctgtgcgtgtctgagccttcatggtgttcttttttttttttttttttttttttttgcgacagagtcttgctctcgcccaggctggagtgcagtggcacgatctcagctcactgcaagctccgcctcctgggttcacgccattctcctgcctcagcctcccgagtagctggaactacaggcgtgtgccaccacgcccagctaatttttggtatttttagtaaagacggggtctcaccatgttagccaggatggtctcaatctcctgtccttgtgatctgcccacctcagcctcccaaagtgctgggattacaggcgtgagccactgtgcccagccccatgtgttctttttcataaggacacaagagcattcccttttataaggacacaagtcatattggattagcagctcactgtactgcctatgatctcatcttaacaaagtacctctccaatgactatctccaaataagctcaaattctgagatattggaggttagggcttcaacataggagttttgagaggacacaattcaaccgatccataatagtgcccaacactttacatatgccttctaagtcctcacaacaaaccgggaaaggcggtgcatataggttctcactgtacaggtgggggatctggagtgcacagccttgcttccttaggtgagttaggattggattccagatgtgaagcccacgttcctgcccttataccacattccacctctgaattccaagtgtctttggaacccagccgctgcataggcttgtgtcaggcacctggcccttgtcggcctcgcttgcttcccccttgcactgcagactgggcatctgctgtaccttctttccctgcttcccagtgcctgtggtcaccaggccctatagagttctgtagagtcttctaagcacccagtcgtccattgacgtctcttcagacctctgctcccacctgtctctaatccatggtcatctctgtcagaattgcttgtctcttcactatttattgccaaatgatcctctttagaccccaccagaccaaggctctttcctactcagagctctttagtgtttgtccattactctgtttttttttgagacggagtcttgctttgttgcccaggctggaatgcagtggtgcgatcttggctcactgcaacctccacctcctgggctcaagcgattctcttgcctcagcctcccaagtagctgagattacaggcgtgtgccaccacacccagctaactttttatttttagtagagatggggtttcgccatgttggccaggctggtctctaactcctgacctcaggtgatccacctgcctcagcctcccaaagtgctgakattacaggtgtgaaccaccgtaccaggcctccattactcttaaaatagaatccaaacttccaaccctgcctacgaggctccaggttcaccggcccctgcctgcagcctcagcctcatcatgcctcatttttgccctcagtgctgcagccgcctctgctgtcttccccaccacagagtcctacctgctgctcctccctctcttcttgcccttcacctgctaacaagctgtctccagagctcagctctggaaggctttccctgcccctccagtaactgtgctccaccttcatacagctggaaatagaacacctcgccactctcctttgaaatgctcctcacgtgttagacactcgataagtgtctcttctgctaatccttgtgcctcaagagggcagggcccatgcctatgtattcccagacccaaggactttgccttatacatggcagatgctccacaaatctgtagtgaatgaaagaatgcagccccctcctccttgggcttgggtctatcgggggcccatctcacccccagaacctggtaccttccaggaaagttccttaggctggaggatgtcctccacatcccactttctcttgcatagttttctttcagcaaatatgtgtcattgacttctgctgaagtttctcccttccctctctaagggcaagagttaaggctccatctcgtggcttggaacctgggaatacacttcaagggtagtaccaggcccctggggttaagaatgcagccacaagccatcacatgcagcagctactctgtagcttcttgacagcaggttcattaagaacaaaaaattcctcatatttataatttgtttatagcttacaaaatgctttcatgaatactgttttatctttgcagtatttattatattacttcaaaggtttgtaattacaggcttgtctctttccagagaactcccaggcattgtcttagtaatttcatctttttacattgggccttcacactcagtgggcatgctgttctgaacacagtggatatgccctttgttttggacaaaacaaattgatttctagagaacttctgttccacccttgatcttactgtttccccttcctggaatgcccgcatcttcatctccatctcatgaaatcagtcattcttgtccttaacgttccccctccaatatgtctttcttgtagaagccctctccaggaaagttccagaggccaaaagaaccttcagcctcagtcagaatgaatgtttttttccaccatactccatttatgtcaccattgtaacactttcctcagtctaccatattttatggttctggttatctggataaacatctgatcccagcactttgggaggctgaggcaggtggatcatgaggtcaggagttcgagaccagcctggccaacatggtaaaactctggctcaactgaaaatacaaaaattagccgggcatggtggtgtgtgcttataatcccagctacttgggaggctgaggcaggagaattgcttgaacccgggaggcagaggttgcagtgagccgagatcgcaccactgcactccagcctgggcaacagagcaagactctgtctcagaaaaaaaaaaaaaaaatacaacatctgacacctgtccttgaaatcaagacccttgacttccttttctctcaccaccttgcacatcatgggcacttaataaaagattgtcattattgtgaatcagttggtgtgagatttcctattaagctgtcatgcttcctacatcgtgtcatcaagagctaactgttcttttacaacttactcactgttttacctaaatatctaggggatatttttgaaatgcacaacttgaattctcaagctgctaattttgagaattatgacaatgctttgttgtcagggttggaaacttttctccttttcccctcccagatccttgtcatgttgtcattagccaaggtaattaattggtagtatttttcaagagagaccattctttctttaaaagccctgtgtcaaaaagagaagagctgtttggatatgtgctgtttgtttgcaaaccatctgcaatataaaaaacaagaaacagattgcagaacctgttactgttggttattttctgtacattaggaaaaaatgaaatgtcaacaacttcttctaaaataatgtattgttaaaaaggaaatctatctatctgcatggtaccccagttttgtttatttttccaaccatgggctcttgtgtttctcagctcttcttcatgcatctcctccccaattttgccgagtgctggtgggatcaagtcattctggacatcctgttgtgcaatggcggtggcatttggctgggcatggtcgtttgccggtttttagagatgaggacttaccactgggcaagcttcaagtgagttgccttctttttggatattagtcacagtttttcatgatatatatttaattgttttggtaggaatccattttagtatgatctttgatgataaggaataaattccatgttaataactgaaactcataaatgattataaacctgatttcaagcatttgtccagaaaatgctcaatcatttatgattttctctctctcaccctatgtattcagggggtcctaacaccatcctcctaattcaaaagatttctgaaatccacccccactcttttttatcccgactgcctcagccttcattcagactcccatccctggatcaattcatctctgtttccaggttaagtcctccagtccttcccacaccatkgcttgagtgatctttttaagaacatcagattcatcatgtcattsccctgtgatggcttctcatggtctttggtcatggtcaatacatccattaccccagtagggagatcctttctctacaccctcccaggcaaccgagagtctgtttgtgcacacgctcccctctcttcacctgagatttggcctgtgtacccataggccagcctgatcatccttttctttgctgacttagctcacttgccacccaggaagttctctgaatagttttaagttgcataccccactatgcttccagtagaggacagtcataccgccggcattgctttatcctgctttgttaaacttgcttctcattttgcagcacgaatcatgccattgataaggaagaataatggtactgataatgaaagttgtggttgcttcaattgtgtttaaaactttgtttactctatataacaaaatagcattttcccacatcattaaatattcttctaaaacatgattttaaagggcttctttgtacttcaacatatggataaaccatgtagtatttaaccagttccattttatggtcctttagttgtttcaaagtttttgctttcataaagaagactggagtgatcattcttggacatatatcttagtgtgcatcgccttttttttggtaaataaattcttagaaatagagtgtaccaatttgtaatctcacctataatatatatgtatatccatttcactatttccttgaacttcatttttaaacctttgtcaaatttatcacacataaaattgtgtgatactggatttctatcaatttctattggatttaccctcttttatttgtgctttctacagattaagctaattaacactttgccataaatgtgactttattttccattttgtcaccccctttttttttgtttgttttattgagatggagtcttgctctgtcacccaggctgcagtgcagtggtacaatctcggctcgctgcagcctccgcctctcaagtagctgggacttcaggcgcgtgccaccacgcctggctagtttttgtttttagtagagatggggtttcaccatgttggccaggctggtctcgaactcctgacctcaggtgatcacccgcctcagcatctcaaagtgttgggattacaggcgtgagccactgtgcccagcctgtcatccccttttaaactagtttgtggtggattttttatttaaacatcaaaaatactgttaatctttttgtttaggtaaatattaaccagtattttcttctagttcttttgtttttttgtttgtttgtttttgttttttttgagatggagtttcactcttgttgcccaggctggaatgcaatggcacaatctcggctcactgcaacctccgcctcccaggttcaagcgattttcctgcctcagcctcccgagtagctgggattagccaccacgcccggctaacttttttttttgtattttaggagaaacggggtttctctgtgttggtcaggctggtctcgaacttctgacctcaggtgatccgcccgcctcagcctcccaaagttctgggattacaggcgtgagcaccgtgcccagcctttcttctagttctttagtggttttacttgttttaagtatttaatctgtctcaaatttattttggtatatgatgtgaggaggagatttcacaatgtttttgccattggttaaccagttttccccatcccttttattactaaacctttctttggtcactgacttgcaaggacactttttaatatatttaattttaattctaatttttatgtatttgtttttttgagacagagtcttgctctgtcacccaggctggagtgcagtggtgcaatctcaactcactgcagtctccacttcccgggtttaagcagttctcctgcatcagcctccccagtgcctgtaatccccaggtgggattacaggcatgcaccaccacacccagctaatttttgtattgttagtagagacagggtttctccatgttggccaggctagtctcgaactcccaacctcaggtgatctgccttactcggcctcccaaagtgctgggattacaggtatgagccaccatgcccagccactttttaatatatttaaggcagcatttaacctaataaaaatagtagccatgcttcaagtattgctccaagcaagcttcacaagcaatatctcatttgagccttgaatcagtcctgagggtagacactgttattctcttcagtttaggaatgatgtgatactgaggcttaggtttagtaatttgcctaaggacacacagctagcaagcagctgagtctgaatttgcaccaggatgtctgctttccttgttgttgttgttgttgtttttgaggcatagtctcactctgtcgcctaggctggagtgcagtggcacaatcttggctcactgcaacctctgtctcccaggttcaagtgattctcctgcctcagcctcccaaatagctgggactgcaggcacccgccaccacacctggctaatttttgtatttttagtagagacagggtttcaccatgttggccaggctgatctcaaactcctgacctcaagtgatctgccggcctcagcctcccaaagtgctgggattagaggcatgagccaccatgcctggcctcaggatgtctgctttcttgaacactgctacagtatacttccttgttttcttatgtttattcttgaaatttgacttcagaatcattttgtcaagttcccacgacataaacccaactaataaacaacaacaaaaaatcctattggtggtttttttaaagtaatattaaatgtataaatgaatacagattaagttgaattaacctctttgctgtattaaatattctgattcttgatcacgctgcatctctctttattcccattttcttctcagtctttctatgcactttgctatttttacagtacaagtcttttgtagttcttgtttatttttggatagtctctattttttgctgccagtgtgcygcagatcttcttgctgtgatgttttctcaatacgagtttgttggtggataggtgggtggatgaaggaacagccctggtttcctatcactctccctgctcccacccactagaacggaaggcctgactggttggtgcttgtgcctccaaccacttagcacaatgttggagacgtmaaagttcatgatataaatatttgtggaattaaagactctttaccagttattaaatagtatttattataccttgggttttggctctcctggactagtacagggagggctggaatctgcacccactcctcatgctgagtgtgccagccacttgctgtctctgggccttaatgtctgcatttgtaaactgtaggactgtttagttctttcatgggtgtgtgaaacttttaattgagtgatttcgaggatgcaaatgaagaaaggttaaatatcactgttcatcaacccaaaatgtttactgctctggggaagaaatagggtaaagaagtgttgtgggtgatgcaagaatatggagtgtgtgcagttttacatgggagacaagcagtgggagaacagtctccttgctgccctgtgcctgtcatcaatgagattcctcattgagtgtgcttctgtcacctgctttacctgtatagagagacctttgagacacaattcaaataaaaagcagtctctttgtcctgagcatttattataaaaatcatcagtgcacaggatttttttcttgtgctttgttttccccctgccttatctctggattttcactggagccattctcttcttacagggacattcataccaccaccgggaagatcaagagagctgttctgcagttcactcctgctagctggacctatgttcgatggtttgaccccaaatcttcttttcagagagtagctggagtgtaccttttcatgatcatctggcaggtattttttcagatgcccagaagttgggaggaaaacaaaaactaaaataaaaactttttaggaatttagagttaacattagtttacattgcttttcagctccatactttacaagatataatattctgcagctggcatgtagaataattaagcaaagtgatgttgttatgcctaaggtcttgcctcattttgaagacagttttaaaatatggatctttgaattacaaattagaaacagattagattccgtgaaataatttgtgtctagcatccatcatccaatgagttaggcattggattgctttttagaatgatcattttcaagaccaaaggaacaaatgagaaggcttttcttacattcctaattcagtgtttattggttaaaattgttcctcagctgttaccactttggktaatctgtagggtgctaaatgagtgctggggaattggagccttttgctgagtcctccagagtgttgtcctccgtggagagaagctgtatttccaagtggcccacttcacgacggaagtgattctgacagcccagggtcttggcaaaagattatcaagcatctgtgtttctgagagacagcaattttttctgatgctcctggccccaggttgtttcacaacttttggaaagtagccaagggaaaccagcttttgcctgaagaggatctttcagagtcatcagaaattatgttttggacacataaacacaaaatactcccaacataaggaaaaaattagcagatgtcacttttaggacagaygatcttccttgttcacacagagacaatgcccatcgcaataaatgaagtttatgcatacagaagtgtacgtgaatagttaagtaagtaatcwctgtggtttggagaggtcagtatctttaaaaacaggactgtagatggattgggattaagctttgccttatcaggcccaatgtcacggaaagcagaagctttcttttattacaaggaggaatgattggatgtgtcaargagagtagtatagtgccgttaggatggaaccacctggtggtatgcgatggagcacactgttcccatgagtgtgagcactgcgctgggatcagctttccatatgtgatattaattagactattttttattttgtgtccttgaagtcagtgctatgggaaaacaacatgcattttgtggaattgtaatgaacctgccagtctatgtactgtgttctcctagcacagtgaccgttccataatctccaccccttgtttgctacctggagctgggctctaggcagagagcagccaygtcccagccacaagatattttgtgctactcatcatgatgaactgcatgaggatgctaacctcagggaaaagtactactgctcccagctgaaacttggaccaacccttcatacctacttttaaggactgcctttggtagaggatctgctctgtcccaggcgtgtgctgcacgagtccatcgtcatctctcagatgtgtctccagcttctttttttgctttttttttgagatggagttttactcttgtcacccaagttggagtgcaatggcgtgatctcggcccactgcaacctgcaacctctgccttccaggttcaagcaattctcctgtctcagcctcctgagtagctgggattacaggcgcccaccaccatgcctgtttgtatttttagtagagatgagatttcaccatgttggccaggctggtctcaaacaacttacctcaggcgatctgcccgcctcgggcttccaaagtgctggggttacaggcatgagccaccgtgcatggcctcaagcctcttttgattgttaaagagcttacttatctacatttggaattctgttagacctggcctgatttctgtaaggcagcataggtgttctgtggcacaggtttgctttcatgacttctgtatgctcaaagcatttctctcccgactatcccagtggatcacatgtgtgagctgagtaacaatcatacaaaccaggaaacatgacaaatagctgataatcctgttcccctatgtgcccatccaccacccctgccacctctccctgggcctccagttgctccctgcccataatgtactggctgttaactagtttgaatagcaatccttggaagaccacatctattctctgaaaatgctttgaacataccaattatttctarttgtagaatgtctatttaaggaatagaggattttgaattagcatgaggtaccaggttgactaatttctccgtctttttcagctgactgagttgaataccttcttcttgaagcatatctttgtgttccaagccagtcatccattaagttggggtagaattctctttattggtggcatcacagctcccacagtgaggtaattctgcacaagcctgactgtcatatgagaacattaacttgctttagattgtcctgtttagcataaggaaagtcatataaactagcagattttccatgaaaataccatcgtaaagaattgtacatccagaatatgacgaaaatgttttgttctcagatgtcagtaacattaaccagacatttaaaaagagaagcacttgatgaacaccacaccaatagtactatccattattatcagattcctttacagtcttggactgccgatctttttttctcctataacatcatattagaaaaaaataacagcatagtgatgctgagttttttaaaaatgagattactggaaaaatgcaaatgtttttatggtagaactgaagtcataaatgacattattttttgaatgagacttttagctttttcagacccaattaatttaatttccttttaaaaaggcccttcctgtagtcctccaggacaactgagataagcttgggtgttcccgccattattcccctggattaatgtggggccctagaggtgaggcttattcagacaccatccctcaagtagactgggcccagtgcagttcaaagcaagcattttcatttgtttcatttttcctatttagaaatggcatttgagttttataactaatacggaatactggcattaatgagtagcaacaccaaagatctgccaaaggtacaaatataatttaagcagttaaaagagttagcttttcagaagctgtaagattgtttatttcattatttttaatgtgcttgcaaaccccataagcagcgggcctcacttgccaaggacagtagatctataccttggtcaaacagaccttccagccagcacctcttcttgtcatcattcaatattaccaaaaaaaaaaaaaaaaaaaaaaaaaacctccagatcctggattcaacaaatcaagtaagacatgtccaagtcctgaggagttaagcctaacattcccatctgttctttttgttatgaccaaaatggaaaagaagagtaagccagcagccctttgaaacttcgtagattagtggtctattgcagtcattatctcataaatcctgttttttcttaatggtttagagtccccatttaaaatgtaatttaatttgagactttacaatttttttcaggaaagatttaccgcagctctttcataaaattaagagcaatcaataaagtcagtaagaatggaaagaattttcttcttagaacaaaatagcaaatcgtatatgatttatcatgaaatttcagtactaaacattccaaaataaaaactagacactaaaaatccaacgttttgaacttttgagagatcctyaaaattttacaatgccctatggatttctccacaactctctttgtttaaaaaatcagacacttcctgtgcccttacactgtttgaggcagttcccatgtaaggagtttctttgacaagttactcggaaagatggatgtgctgctaatggattttaacacagccaccccatttagcaaatgttaggtcccgagaggagagagagtttagaggcttcagtgtaaatcctaacatctccagcttcttccttttttattagactttcacacgaatctgctttgagaagatatttgagtgaacatgcttttaatctgatactataaagtacaatataaggaaatgggtccagttagagtgtaaagtagctaaaatgatcaagacgtgttaggtcatgacaatatgaagttagaggaaaagctacattctttataattagaattcttcactctggtctttggggtgagacracagtagtttatggatgagcttcaggtattcgtgaatcctctgaactttaatgcaaagtgttatgcctttctttcatcaaatcctcaaagagtcagtgaccccaaaaagatgatgagttcctggttcaggtgctactgctgaaggggtagattgagtttcaggggtacttacaagactccaagccatgctgtcccacacagaggccactcaccacgtgtggctattgagcactagggatgtggtcactccacaatgaaatgtgccgtgcatggaaactgcacaccagactttgaagagttggggccaaaacagaatataaaatacctcattataatgttttaatatatttgtttaaatattagtttaacatattaataaaatggattttgtatgttcctttttacttttttaacatgtctactggagaatttaaaattgcatttatggcttgcattatatttctaccggatggtgctgttctgagcctttcaacaccatgtcattgcctgttttttttctgaacttgtcagtaacattccaagtcattggcattcaatggcagtgagatatagctggggtcccattccagtttctgaaagccaaaaatctgtatattttttgcctggttacaatcagcaacctttgtcctggagagaaccagaggagacaaccaatggacagtactgctcactctctggagtcacctccatggagctagacatggaaacacccacctggggttcctttgcagcgctgtggaagtcttaccactgaatccagactgactttgtcaataatctggctctttttagtggtttttttttttttttttttttttttttaggctagtcaagtgaagcagtgggagtggaaaaggaacaaagaaatctgtaaatggttgcgatcagttagttgtaaacaccccggcactcagaccagacaagaatctggctctttaaatgatgctcccctgcctccagcctaacccaaacgctgaatctcttacaggaatgttttaacaggcactggctttctcttctcttgaacagaactagaccaggcagcctgacatgggacaaggagggacgttttttactttgtcaaagtgatttaattatgtgctgacttgctggtcttccagcagctctcaatgaattccaactttgttctttcagacagtactacgcttacctcaccgacacacagtgcaagcgcgtaggaacacaatgctgggtgtttgggtgagtaatctgttattgtggagatttaaaaaccacttaagccctaawtttatttgggtatttcttgaccctgtgttaagagcctttcagtataatttttctatgaagrcaggtggactagattttatatatctatatctatatctatatatacatagatatatcttttcatctttaatattcccttttctgatttaagttaagaatagttacttggcaaattataaaacaagagtatagaaatggctctcttattttggccgggtgcagtggctcatgcctgtaatcctatcactttgggagcccgaggtgggcggatcacttgagcccaggaattcgagactaacctggtcaacatggcgaaaccctgtctctactaaaagtacaaaaattagctggttgaggctgaggcaggagaatcgcttgaacccgggaggctgaggtttcagtgagccaaagtcacgccactgcactgcactccagcctgggcgatagagtgagactccatgttaaaaaacaaacagacaaaaagaaatggatctctctctttttttttttttttgagatggagtctcactctgtcccaggctggagggcagtggcatgatctcggctcactgcaacctctgccttctgggctcaagtgattctcctgcctcagcctcccaagtagctgggattacaggtgcgcaccaccacaccctactaagttttgtattttcagtagagacggggtttcaccgtgttggtcaggctggtttctaactctgacctcatgatctgacccccttggcctcccaaagtgctgggattacaggcatgagccaccgcacccggccttggctctctttttttttttttwaataaattaggaaatcagatggtatttcccacaaacaactctgagactttgttttatgaaatacattagagagaaaatggattggttgcattccttctggatgtatcttgagtttggaatgccatcctgtcatgggctgacccacaccccayattattgtcacatcaaaagggccccttggaacagctgcttgctatatactgaagtataattttattgttccaaagagtactaacatacagcagcatggtcacaatggtcttgttatggattcaaatgttatatctttttttttttctttttgagacggagtgttctgtcgccaggctggagtacagtggcgtgatctcggctcactgcaacctccgcctcccaggttcaagcgattctcctgcctcagtcccccaagtagctgggactacaggcgcgtgccaccacacccagctaatttttgtatttttagtagagatggggtttcaccatgttggccaggatggtctcgatttcttgaacctcgtgatccacccaccttctgcctcccaaagtgctgggattacaggcttgagccactgcgcccggccttaaatgttatattttaatttattatttaactgatgagaaagagaccttaggttatctagtttaacctcttgctgttaaatgtgagaccctcttgaatatctcaagtaagttgtttttctacttaacatcagcaacaatttaccatcccatttagtgactgaaattccagagacatccagcaaatctatacrtgaagttcaatccccaaggtggcttagcttcaagacctaatcgaggttctaaatggagtatgagagtataaagaaaaattgaggaaaacccattatagagaagaaattacttttcacagatttttaaacaggacattcttccaattaaaaagtaatacatgcacaatgataaaaattcagaaaaggatctagaaggaactaaagatcacccaaagaagtcaaccatttagagataatcattgttaatattttaatgtcattcctttccatttttctgtgtatgtgtgtgtgtgtttccagctgtcatctagattctgaagggtgacatagttttaaaggctaaaaatgttgatactcmggttagatttaggcaggttcctcccgacccttagaagactaagggccattgtcatttgtttctcwtaggttctatggtgtaagctgattttcttacccaaagtggtttgttgtaaaaggtgataagatggatttggtttcctttgttcatgatatagcaggagggagaattcacacatctcccagatttctgacagcgcagaggtggcgctcccgcttcatgtgtgagggccctgtgtactggaagaagggatgtgggcccctccttctaaargattgtccaaggaggaaatggtctttccttttcctgcatttgagctcttctstcccactcacacattctttccacgtgcattttgctttcatatttaaaagtccttagcaaggtcctattattctgctgtggagtggattttttttccacagaattgtatcgattyacgtgttgagggaaataagtgggtcagagagagaggtcgcatcatgacaaagtttctttctaattggacagccatgaaacaccatccccacggtgggagaaacggcaaaggtaaactccactatggcggctcacgcctgtaatctcagcaatccaggaggctgaggtgggaggatcgcttgacgcccggagtttgagactagcctgggtaacatagcgagacgttgtctccacaaaaagttttttaagttaaccaggcatgatggcacatgcctgtagtctgctactgtggaggctgaggcaggaggatcacttgaacccaggatgtcaaggaggtcaagcctgcattgagctatgattgtgcctctgcactcccacccggatgacagagcaagaccctgtctctctctttttttttttttttaaaaaaaaaaggaaaaaagtaaacaatgccaaagagtggtaaacactgccccagaaagttgtgccttatttgaaagtgattaaaatatactgaaatgcaaaggagagatcactgggcttagtgtgctttactgagaattgagaactcccggaacagtgtgataccgagattgaagactcttgtgagaaccagtgagctatgctgaaaaataataaagccctcctcataaatcacacccagtggatcctcctgtgtgcgtgaacagccgtgagagctgccccctgcacagtccactgccagccagggaaggtgaaacaggagccacagcctcctgctctcctgaccccggaggccacccacttccttcctctgccccagctctacctccctgccattttgtcattatttcctctcctatcaaaacagaaaacactgaagtgtgtggtttcctttaatcactaatagctgctttatagctttcttttcactaattttggaatgatctcagactttggtaaggtggagaaatgagagggagcagtgccttaaatagtgactttctgaatgttgccttttgggaggtagaaaggggaaggcaaaggtcaaataggatcacccgcctggggttctttcccagcactccaccctttttctcctgaagagggtactttctcttctataaagatggtatcctcaaaatgtttttatgaattacttgctattgtagctaaatacatgtcatccctaacggttgtgccatagactgagcttttaaaccttttatacgaaaggtgttgcactcagcagagagagggcgccatccagcaagggaatgggatccctaacagagagaaagcagccgtgtggaaaggtcggctgtttctctatttagatgtcacatgatgttccttcagctyggtgggagttttggggccagactgatgtgaacaaattctccaggtgtggggtttatgtcatctttgtcttttccccattccaccctgattagaattgagcttctctgcctcaaaaagagagtattggcccagtttaaatagaagcagtgttttatcgcctggtcctgggaggaaggtggccaagcgtcggctgaacagcagtgcacagttgcttttcctcttcctgggagtgcatggggtgggccctcatgggagagtgagcctaccctgcctgagggcccagggctgcatcctgcctcccagaggcagccagagctgctcctcacccgaccagtttcctcgctgcctgtgatcccacctctgctaatgtgtccatcacaataagttcccacctctgctgctctccaaggtcagctccaaaccagccagtcctttcctcatcctcttcttggatcttctgcacaktatctgccttcttgaaactgtcctctttcctctgcaatatctgtcctgtatttcctctcacttttctgttttcagttccctttgctggcttcccattctacccctctctcctccttacaatttctcataattgtggttttgttcttttgttcttccaggcccatagttcaggctttctttctttttaaattttatttcttttgagacagggtcttgctgtgttgcccaggctggagttgagtggcagtgatcacagctcactgcagccttgacctcccagactcaagcaatcctcccacatcagcctcctaagtagctgggactataggcacacaccacaatgtccagctaattatattttagtttttgtagagacagkgtttcaccatgttgcccaggctggtcttgaactcctggactcaagcagtcctcccaccttgacctctcaaagtgatgggattacaggcattggccacggcacgcagcctagactgtctgtcttaagggtagatgcaactatgagcatgagcttccttctagggagagggtgcaaacacaggggaacagatgttgggagggggggtmccttcccagcacaggggagtcaccgccgtcctgctggtatagctttatagccagttccccttctcctcgtgactgtgtctgttcatcctccctttatcttgccacaccccaccccctgcactcaagtgcacctccactgacatctcagaagctctgacagtagttacatttgagatggagtctcactctgtcgcccaggctggagtgcagtggtgccatctcggctcactgcaagctccgcctcccgggttcatgccgttctcctgcctcagcgtcctgagtagctgggactacaggtgcccgtcacctcgcctggctaattttttgtatttttagtagagacggggtttcaccatgttagccaggatggtctcgatctcctgacctcgtgatccgcccacctcagcctcccaaagtgctgggattacaggcgtgagccaccacrcctggcctacaaagcttttttttagcagccgatcccctttcttcaaatggcatcttgccccaaatcctactaagtatctaaacgagtaagcagaacagttctgagtttgccayccaagacccgcttctccccttccctccttgtgccggggattctttggaagttagaaagttgacakkagcacaataggaattgtatctattgtttatgccacacttagctcttgcttcctccaaaaaggtgtctttgcccaccctaatcagaactagaagctcactcctgaacttggaggacccttcctggcatcctgtgtgattgtgtggtcattgagttaacatggatacacatctcatttccactattggaggctgggccctggctgccaggagagggggtctcccacactctcagccatccagggattgcttgtgcagccatggagcagtgcgtgtgggatgcagcagccaggtacccggcctccatgtccatggcattcctgtggcatcctcagaatccacgtgcaggcttgttggcaagccaaaatctcttcttctgcttctcaagtttggctcatacacccagctcacacacacgagcctagagctttcatgccccagattcctacaacaaccctgccaccatgcctgttccactcaactcaccgaagagctcctgactctgggctctacattaacatcatcttttttcccacattgtggaactggctccacaagtcgggggtgctgggagtatgtgcaccagtaaccagccctaggtcaggaatctctagtgcctgctcccagcagaagcacctcaggctgcccaaatgtttatttgccttttaaccctgctaaaccaagatacaggatggtggatggcatcaaagggagtggaggccctgactgaattccattaagccacaatttgtccacctagcttagcctgggaaagatcagagagatttaaattgaactgagtaaagggacctattgctgagctgtgcggaggaaaccccagcacccctgggggtgaggaagtaggaggaggtatgtgttctcacactggcaggcttaatacaggctcccgctgtgctgaagcctccagcctcagccctaaactagccactctttgagtcttggtagaaaagtaatgtcagccttctggaagggtgctgttgattggaactccctcyagtgggccagaggtaatggtgggggcgatggctggtggttaaaggagcccatgtgatcgttgggttcctaccacttctcaccatctccacagccctgacccgggtccccatgtctggatgagtacagtagcctccctgcttctgctcttgtcttctcacagagttctgttcagccagcagaaggttctcgaatgttcatcaccatgctgttcacaatagcaaagacatggaatccacctagtgcccatcagtggtggactggataaagcaaatgtggtacatagacaccatggaataatacacagccataaaaaagaatgggatcatgtcctttgtagcaacatgggtgcagctggaggccataatcctaagcaggaaaagaaaaccaaaaaccgcatatgctcacttaaaagtgggagctaaacattgagtacacatggacataaacatcagagtaatagacactgctgactactagggagggaggaagcggggcatgggtgggaaaactacttgctgggtgctacgctcactacctgggtccaatatacccatgtagcattcctacacatgtaccccctgtatgtaaaataaaagctgaaaaaaattttaaaaaaacattaagcaaactggccaggcgaagtggctcactcctgtaatcccaagcactttgggaggccaaggtgggcggatcacgaggtcaggaggtcaagaccatcctggccaacatggtgaaactccatctctactaaaaatacaaaaaattagccaggtgtggtggcacacgcctgtagtcccagctactcagtaggctgaggcaggagaatcacttgaacccaggaggtagaggttgcagtgagctgagattgcaccactgcactctagcctgggtgacagagtgagactccgtctaaatatatatatatatatgtatgtgtatatatatatgtgtctatatatatgtgtgtatatatatatgtgtgtgtgtgtrtatatatatatggagagagagagagacagagagagagaagactgtattaaaccctctgctctagaccctctaggatcccctcagactaaaagccaagcctacgggtggccttccaggtccatgttaccctgacctcaactcagccctttcccctgattcctggcccttccttgtgcctttcccatgcccaggcctcagtctgggactctccacacttatgtaatcccatagccggccccctcacctcctcctagccaccttctcatgagatgtgcccacacacacggacaatggcttagctaagactcctcagcacattggcacaaatcatatccttaagttgctaactcaaaagcactggtcttcagaaaaacttcaggttgaccaggtgcagtggctcatacctgtaatcctagcactttgggaagctgaggtgggtggatcacttgagctcaggagttcgagaccaatcagggtaacacggtaaaaccccgtctctacaaaaaatacaaaaattagctgggcgtagtgccgtgagcctgtagtcccggctactcgggaggctgaggtagaagaattgcttgagcctgggaagtggaggttgccatgagccaagattgtgccactgcattccagcctgggcartggagtcagggccggtctcaaaaaattaaaacaaaaaaacagaaaaaactttaggtcattatgaagccagtgattgggttctggccagtattttcttaaaatgaaacagaatagaaaaatatcagaataaagatgcaaattgtcttatgaagcttttgtttcagtgtgtrtgtgtgtgtgtacacgcatgcgtatactggatcacagtgaaaattgtgtttcttgctatggttcttaatgggtcttagatcacaaaagtttgagaaacacagctttagtcggccaatcagcatgcttttaaaagggccctcaggctggctcatgcctgtaatcccagcactttgggaggctgaggtgggtggatcatttgagatgaggagttggtgaccagcctggccaacatggtgaaaccccgcctctactaaaaatacaaaaattagctgggtgtggtggcaggcgcctgtagtcccagctactcgggaggttgaggcagtagaattgcttgaaccgggaggcggaggttgcagtgagccgcgattgcaccactgcactccagyctgggtgacagagctagactctatttaaaaaaaaaaagatagagggcctcaagtctagttgaatattcagaaatctttcataataaactcagggtgttctgtccggcttatgggtagataatcacacttatgtcctgggctcaacactcccatcataggagttattmacgaagtccgagccaaagatgaaatcatcctttttatgtctcctcactgcacaggctggmataccaaacatgtaactgccacctagcgtcttaatcacagtctagactttagaagtacagtgagaaaaccttctgggttcctccactgaaatgatactttctcacatgtgacatgctttgtggagcagtgctttaaagattcaagccaaccactcttaaaccttgttttggttcgggctaggggaaaagacagccccagactctctaaagacaaattgaggagaatttctgttgatttttctgctttgctgaagtggttctaactccaggcattcagaccttcagttgtttagagccatctacacttttgatgatggcagtgaccactatgtctgccagtaagcaggggtaccaagggccttcttggccccttcttgcctttttttttttttttttttttttttttgaggcagagcctcactctgtcgcccargctggagtgcagtggtgccatcttggcttaccacaacctcctccacttctcaggctcaagtgattctcctgcctcagcctcccgagtagctgggactacaggtgtgtgccaccacgcctggctaatttttgtattattggcagagatggggttttaccatcttggtcaggctggtcttgaactcctgagttcaagtgatccgctcgcctcagcctcccaaagtgccgagatcacagacatgagccaccatgccctgccccttcttgcctttttagaaaacatctgtgtgagtacaccattcatggagtgtacagatctcatcttgagcaaggaatgcataaaatggacttgtctaaaatcagtattcatatgctgcctgggatctcatggccaactatgtcaacctcacctcatccattcttacctccaagtcctgaacctttagaaaggcctgatttttatagtcataaatgaagatacagaacacaagagtgactttttttaatgttttaaaggggaaataagtgtgtggcgtttcttaaaaaaaaacaaaaaatttgtatttagcacaatcttttacagatcaagagaaggtaaagggtttatattttcaccaaaaacgggggctatttcatctggaaattcttagaaggctgggaaggaatgtgattaatgccttcaaattattgaaagactctcttggaagggtcaaactcaccctgtgtggcagccacctagcctcttaatcacagtctagacttcagaactacagtgaaaaagccttctaggttcctccactgaaatgatgctttctcacctgcgacatgctagggtaatgttaggacccagggtaggaggtataggaggcagataccagcctgtgacaaggaaaaacttcctaactgctgaagagtttgaccagaaaaataagccaccttgcaaaggtagtagtttccctgtgcctgagagggttccagcagaggcrgcgtgatcacccacccttatggcagtggaggtgctgagttaggtgatgccagtgcccctagctattaaaatttatgagtcacratttcggtctgggaagaaggaagaggtgamaaatactttattatttccgaagtaaatgcagttggcttgaacagtgttattttgtggggtacctgctaccagtgtttgaggcagaaatcgcatgatgagttgaactttttcattcaatcatgcatattttggataaagtgtatgctctggtaagatggattaatacttamcctctgttctctgtctaattagggtcattggtttcctggaggccattgtttgcataaaatttggacaagatctcttctctaagacccaaatactctatgttgtgctttggcttctttgcgtggtaagtcactgcattttacccaaaggcattagctaaactctcatagtatcactttaaacggaggggggcaaagaaaccctcttgtgtrtcaaagttccttagaaattcataaaaagatgttctacttgtaattgtctgagactggccaccagcctaatttcaagagtaagacacagctacacagtatctgaaataggtcacctcagcagattccagtcaaacgccttcgacaggtacaccccacgtgcatttccttgactcacgagaatttgtctgcaygtgctatgcatttagggaccaccatgaaaggrcaagaaagatcacagtgcactttgctttctcatcatcatgccgcatacatcttaacctacatatcattgcacatggatttatatataaaaggacatatggtcattcataggcaataaaatatgttttggaagataattcgatcctgcaatttctgccctccaggtccacgttataacccaagcctggatatcaccttccgctctgaagggaagagcctgtagggacaccagcctaagccttggttcttttgccctggggctcttccctcacctttcaaatgaagtaagatagtacccacttacacattttgtractgccattcttcatttaaatatttgaagttattattttgaagaaaagttcttattttatatttaagcttaagatttttcacttagtctagaaaatgtattgggctttttaaataatcatagaaaatttcagacatgtgcaaatagagaggatagatggcccctcatgaacccatcatcggttatcaactcagggccaattgtgtttcctcttatgttgtactcactgccccaaccctaacttattttgaaacagatccacctttaatatttcaggatggatcactaaaagaagctcaggatactttttcggtttaatgcaaccaccctaccattatcatatctaaaaaagaattaacagtaattccttaatatcatcaaatacctaatcagtgttcaaattactaaccttttcttaaaggttgtatttgtttaacaatatatttgaatccacattcacccatcgtgattggttggcatgccttttaagtctctgaatccataggttttcctctatcgctaaccctctttccctcgtaatttatcggttgaagaaagcagcccttttgtcctatagattttcccacagtctggattttactgattttatcgtatcttgtaatttaacatatttctttgtcctctgtattttctgtaagtcggtaattggatctagaggcttaatcacatttgggtctagtttttttcttttcttttctcttttttggcaagactaacctttgtatttttaacgtgtcttttatcgcctttaacgggatctatttttagggttacttgttagaaatcctaactgtaccaaggcacagtgagcctgttctgtcctgtttcatcttgaacaataaaagggaataatgatctcctttgtatttaaactacagaattaatgcccaagtatatttttccatgtcagtgagaccagatgtaaggaatcggttagggaaatgtgtcagacatgcccagagattttcactatgctcttctcagatatgtctctggcctgtgcacctcaagtctgaattgtaataggacctgactgcagggggcagaggtgggtgccctcttcaccgggtaccagagaaccacccgcccacagggagggtgagacaggcaggactcccaggacaagacagacagccctcctcaccacagcaaatcacaggcctcccagctgcctccccaccactgccccctgggcagcagtgaccagaaaggtcttctcaggccacctacccaggcagccctctctggtccctgtcttagtccattttctgttgctataacagaataccatgggcttggtaatttacagagaaattaaatcacagtactttatttggctcacggttctgacagctgggaagtccaagagcgtggtaccagtatctggcaagggtcaccccatgatggaagggcagaagggggaagtgagcatgtaagacagcaggaggtgggccggacttacccttcttatcaggaacccactcccacgatcactaaatcactaacacgctcctgtgataacaatcccactcctgcaataatagcatcagtccatttatggggtgcactcctcatgacctaatcatgtcttaaaggccccacctcccaatatcattacattgacagctaagtwtcaacatgagttttggcagggacattcaagccatagcattccacccctgacccccgcttctcacatacgaaatacattcatttcatgccagtagtcccaaaagtcttcacttggcccagcatcaactccaaagttcagagtctcatctaaatcagatatgagtgacagtcaaggcacaattcgtcctgaggtgaattaaccccacttggacaccacygcagtttctggcctataccttccagagtggtagctcaagccacaccaaggtccacttgagccacagccaagaagaactatgccagctgtgagcctgtgaaatcacacaggtcgtctacttccacaatacaataatgggacaggcataggatagacattgcaaatctgaaagggagaaatgggcaagaaaaaagggataagcagtcccaagtaagtacagaacccaacagggaaacattacatcttaaagctggagaataatctcctttgactttatgttctgtgtcctggcctggggcaggagttgggcccccaggcctggcagctccacccctgtggctgtgccgggttcagccagtgcttcagttcttccaggcgggagttgcacactggcaaccctacagttctgtggtgttggggatgaccctgctgccactgctcctctctggtggctccaaccccacatttctccttggcattgccctagtattggctctctgcagtggcactgcccctgtggcaggtttttgcctagacttctaggcagttcgccgcatcctttgaaatctaggtggaggaagccatggcctccacagctcttgcgttttgcatacctgcagaattaacaccacatggacaccaccatgggttatagcttatccctcccagagtggtagcccaagccacaccaaggcccacttgagccacagctaaggcagccaaggagcactctgctagaatgtgggagtagagtccctaggtagccctggtcagtgagcccgtggagggctccccaggcctgtaaccgaaaaccattctgccctcttagagctctgggtctgtgatgggaggggcagccttgaagatctctgaaacgcttttgctttcagggatcttcctcacattttcttgatgaatagcacctggtttctttctttccatggtaatctctttaacagccacgtggccccacccttagtgtttggaatatgctttttcactgtttacatggccaggctttgaattttccagattattccattctgcttcccttttaattttaaattgtctttaagtcatttccttcctctggaatctcattgtatgcagtcagaagtagccacacagtagcccgaatgctttgctgcttggctgtcttccaccagatatcctagttcattgccctcaggctgcacactctagaaagccttcaggcatggacacaattcagccaaggtctttgctactgtgtgacaaggatgccctttactccactttccaatccttgctcctcatttccatttgagacctcatcagagtggccttgactgttcatattgctaccagcattctggtcgggaacgcttaagtaatctctaagaagactgaggctttccctcttttcttctgagccctcaccaggatcacccttaatgctccctttacagcaatacaggctttttctagcctgctcctccaaattctttcagcctctacccattagccagttcaaaagctgcttccatattttcaagtatttgttatagtaaccaccccactttttggtaccgattttctgtcttagtccattttctgttgctataacagaatactgcagactgggtaatttcaaaagaaaataagtttattctgctcacagttttggaggttgggaagtccaaaagtatggcaatggcatccagtgaggtcatcccatggtggaagggcagaaggcagaaacaagtgcaccagacagagagggaagtgccaaactcatcctttttatcaggaacccactcccaagataacagcctgaatccattcatgagggctttgccctcatgacctatcacctcttaaaggccccacctcctaatactgttaagttggcagttaagtttcgaggagagttttggcaaggacattcaaaccatagcagtcactcagactgtagggacccctctaatttctctttaagttttagagagactttctgttacttatttgacacttagaatatatctccttttgtgggttagcctttgtatctatgtgattgtaacttattgaggacatgcaccatttcttatgctcccattgacctctgcttcacttggtacagacctcttagtccgggcttcattcacagacagttgctgagtgctcttccgtgctgtgcctggggctctagccacacagatagatgacggtgataagatttactggtgcctactatgtgccagagaccattctaagcactgtcatgaattccacatttgatcttcacactttgagggaaggtattttattatccctcttttacagatgaggaaacaaaggcacaaagaagttcactaacttgcccaaggtcacataggtagttaagtggcagaaccaggactcaaacccagacattctctctagggaactgctcttcatcactgccytccaaggatctctgagttcagatggcaattagacatgcaaactaattatgttaatatgtgataaatactgtaaaagattgtgtgcataaggctaaaggatacttagagcaacagacatgctgggggttggtgaaggctccttrgtgatatgtgagcaggatttttaagggttgcagtgaaccgctggctttcccccagccccccaggccccagctaaaaacctggaggctgcttcctgtcctccatcactcttcgaatcagccagtcactaagatctgttaatttgacaatgcagctcaactccatctcctctccattcccactgcctctgcggctgtcaggacacccattttcttgccattctgccctccaaatccattctccatgctgctgtcaaaatgatcttccaaaattcagaactcaatctctttcccctgctaagaatcattctctctggctgggggcttgagagggcacaataacacaatctttttycccacctgagttaaaaaataagtaagagataagcaagatagaggaaagttatggggatcagagtagcatcttcattagtgagaattcacctttttcaggaaatgccggcttccttagtcaccattcaaggtgtgacttctccccagggaaggagtgaggggtggagggaagcagtgaagcttcctccacacaagaagaaacttcaagaaggaagaaggctccccaccacgaaacctcccagatgaattatgaaatctgctyktgtgttcaggaccttcatagtgggagcattccatcacatctgcccacgtgtactctattctcaggctgcacttgtctgctggtagttacctaaacaagtcatccttccagacttcttttgcccttcccacgctgttttctctgcctgatctgaaagactttccctgccttatctacatgatgaaactgataccccaaaaccaacttaaacatatgacccccatgaaatatgctctgacctccaaggcaagtagatagctccctccttgggaccagtagtgctttgtacgtaactctcagttctaaccccagtgcagtggaatttgttttttttctatctgtctcctccacactgcactccttgctcagagagaataagttgaagtcatcttttggccccactgtctcaagcaccgtgcctggtgcataggaagcactcggcagcttcgtggagaataaaggagtgagttcaagagacaaaaacttgcgacatgcaggtggctggggggcaaacatacaaagacaggaagctgtgagagtgcccagtggctcaggaaggtggtgayctgtttgaggagtgacagtgaagagttggatgaagagtaggacagggtcccctgcttaggaagggctttgtgcggctgtagttgcagccccagcarttttcaagcggggaaacaatgtggtctgatctgtgtctcatggggaaacaccatggaggctgggagagtctagagggaagatgggttggggggaagaagtacagtcagaggtgctgccaggcctagttgacaagtaactgaagctgaaccaaggcagaggcattgaagatgcagaggaagggctggatctgagagttgtttaaggaatgtgctcaacaggatgccattcctcttgtggtagctgggaggggacttgagtgccactccaaaggttctaactggtgccactgggtggccaccagtgctagcgacagattggaggatataggagaagcccattgaaaggaggaggtgaatttggttcaggggatttgggtttgaggaacctttagaatttacaggtggaagtgtcctgttttatgggaaattctaatctgtcaataacactggaaggatttggtcgttggtggaaataaaatacttgggaggagcccatgtggagggtgcagttggagtcctgggattaggttaagagctcagggaacatgcctctgggagaggagctgactgaggctgggattccttaataagaggtcaggccggggacgatgagcaggattttgaagacaggcagaatctctgattagacttacaggatgagacatgagagagggacgtcgcccgaaaagaggccctgagacaggatgattaggggtctccactgcctccctttaaagaagaacagaaacaaggtcctggcactttttaaaatattcctgacctttattataaagagcaagattgatcgcagactcaggagtagaggcgaacattattcaataagagagcttcaagttacaccatgccttctgccccactcagaaaagcaaagcccctaattactcccctggcctggtaagagagcgcacacggagcttgagattaatgcagaagcaaagatcccgggtgctggttaataagcttttccaggagcgtggttgtctgctcggccgtcattaatttgaatgctcattaccataatgtagaagccaagctggggtcctgcgccctcsttgccgccagccccgtggtcctggacagcctggctctcatcccacgtagtttcttctcgcccccccgccctttctttaaacgaagtgtgcaattgctattttaaatctgagscttgacattttcagtgggtacgtgcctagatttccacaggtgtgattgcaaacctgtaaattaccggcttccgtttgctgggacaagtgtaaaatgggcctctttgtacgcaggtgaagtagatttggcaatcacaacagaccctttgtgtgacgattgtgatgataagcacctgtcgttctccacttgcctgctgtttgccgctggagggagcggcagctgccactgcctgtcatattgggcctggggctggggaagggaagagccccgcgtgcctgccctctggtggtcagagtttgcaatgacagtctagttgagggacccgcctccccacagccctctcgtttggggaggtggaacctaacccccccagtccgctgtgtgaaacccagaatgttctgttttgctctttgtaaggggcctaacgcatacacaggcttacactctgcaaatcatttctagtccttcccactctttccatgccatgaaaatggcacacttaacgttggtatatctaagaaatctgggcaagcattagagtatgttaaaggttggaagtcattttcactttgtagttttaatgtattcattcgtggcctaattttttgatggatatgagctttttaataaatccctaacctgtaggtatatgccagtttgcacgtgggtttagtaggaaatgaaccagtggcgctgcttgtgcttctcactctctctccacgctgccactgttcctgcttccacgtaactggcacggaagaggacagctagccagagtgttgctctcctttcttttttggaactaagaaggcactgtgtatccagcagctgccaggaaatgtcgctgataaaggaactgggccaaagctcgactgcaagctgccatgatgagaattcacagcccctgccttcccgccctaccaccagactgtggctgtgcagaggagaagctgctgctgttcactgttcccatgatgcttttcgttctcagggatggatacatggatggagaaataaagctatatagacataaagccaatatttgtatcagtagccatcccttaaacccagatccgggggtttcaagagatctgagttccggctccaatgttcacctctctgagctttcattcttcttctggaaaatgaggggcaatgaaattaatggtctctgaggtgaccttttggatctaaagttatgattcttagaactaaaattatttccttgagaaggtccctccatgctctcacagctgtccccacagttggtgcamgatgagaggggtccargaaaatgacaggtgcccaggtgtccacaggaaatgcagggggagagatggaggctcaacagccaggatggcttgatgtgaatgggtttctagagtgaggaatttggaaggagctggcagttgccttgttttgttctggttgctttgcttgcagtggggaaggtgtggccggggagattcatggccctgctctaccgctcaccctccctccctcctgcctttggtatgcagtccaggcagctggagacttttcctaagctttgattttttgacatgttttgaaactttggattcttgtctgtgcttttctttccttaaattagggtataatttagggtgtgggggcaggcccagtgagtggggcaagtgtggagtagaggttgtccctgcctctgggcacccacaggccacaccctcctcattccactcagggccttaagagcatctttattttctctttgttttcctatccatataaccaagaaaaacaaagcaataaaaactggggtccactcaaaagcctggaaaagcaagggcagccctgtccagctaagctccccaccctctaccctgggagtgtttgtccgtgggccctcaggtgccgctgtgacctcttccccctagaagctgacacactgagtcctcttakcgctctcctgtgatggggaagccgggagagaatggrccctgaaaatcagaactagaacatagaatcctctctatcttcttcaacagaacccgcaaagctatcaagaaaatgcatcccaccatattgcacatctgaaaattgtctttcttgctttctgatagtagagtcacaggtagtaactgtggtctcatcataacctttgttgtcagaagctttgggtgtgcaccctccccttgaggtctgatctctgccacgtccagccgttttgtaaccggcgtccagacggcagaaatgcattgaacggtcctgcattgattcccactgaaaccctgaagttctgggaaattgaacttttttgtgcagcatcatttgtttttctcttccaggctttcaccactttcctctgtctgtacggcatgatttggtatgcagaacactatggtcaccgagaaaaggtatggaaggagaggcaggcatggccrttgtttaaaataatcaccccgggctcggcaaattcgctcagagcaygtgcctgtaaggatatggcgaggtaaacactgaggttggggcctccagtcctgccactgcagaaaccgcatgtcacaactcattccctagccattgctggccctgcttgtgacggctctgttcagtagaccaatatttttgtctaacttttgttagataaaaaaagttatgtttgtttggagaaaaaaagaaaagtgatgggaaagctgtggactggcttttggaagctgggttttctccccagctcttgaactgtgtggaggcctcttcctgtgttccggcctgtggctcttctgggcaaacgcttgccctgaccttcatttagtagatatgaggataccatagaaaatagacatgaatggctttaagacacgatggccgtctggtagacggtaatatttttttcggtaaaaataacactttcatcctttatttacaccttcagtctaaagaacttaaggcatgttgtggaagattgattctgcatcacctgtgagaggaaagaaccttgtttttatagcagagaaatataagcacagggaggttctgtcacttgccagtgatgatcccagcctgggagaggcagggatgcakcatgctcgcctttttgccctgccacttctcccagggagttcctaaaattcctgcactaagcctgtctctctccctagacctactcggagtgtgaagatggcacctacagtccagagatctcctggcatcacaggaaagggacaaaaggtatcttgttcttgttcgttgtttaaaattttactgggtccttgagatgtggaattattacctattctttgagtggagatgatataagccttgaagggtctcaggcctacccattgaatgtctcctgtcacttattaagaaacatgcaatggctgggcacggtggctcacgcctgtaatcctaacactttgggaggctgaggtgggcagatcacttgagatcaggagttcgagaccagcctggccaacatggtgacacccccgtctctacaaaaaatacagaaattagccaggtgtggtggcgggcgcctgtagtcccagctactcaggacgctgagccaggagaatcgcatgaacctggaaggcggaggttgccatgagccaagatcgtaccactgcactccagcctgggcagcagagtaagactctgtctcaaaaccacggcactccagtctcggcagcagagtaagactctgtctcaaaaaaaaaaaaagaaaagaaaagaaaaagaaacatgcaaaatgctcacaggatctgagtgaaagacttggtttgtaagaagaggctccatgtagctctgcccttcgtgagggccccacaccatttcaagcaccctgatgggaacgttcttcctcttggcttccatcatgagtgaacaggaagaactgtatatccggccaggcacagtggctcacgcctgtaaccccagcgctttgggatgccatggcaggatcatttgaggccaggtatttgagaccagcatgggcaacagagcaagaccctgtctctacaaaaatcttaaaaaattagccagatgtggtggcacatgcctgtagttacagctagtcaggagtcagagataggagggtcacttgagcccaggatcactcccatgtggaagacagaacaagtccctgcctcttaaaaaaaaaaaaaaaaaaaaaaaaaaaaaggtactgtgtatcaggaggaaaagcctttcaaaagagggggatcattttaatggcatttattcaagaggcagggcagtgtaagagattttggtcgtgtagttagggaacctccactggcctctaaggatcactttgggaatatttggggccacctggttatttcaaagaattagacttgtagaataatgacattgaggtgatttcattggacagtaattcctcgtcaatccttataagctacttgggaagcttggctgaagaaagaaaattagaaatactaaagactgaattttagctcacaaaattgctcagagaaacggtgggccaatggagaagaaagcgccctgttgcagtcattctcctaagttcttttggcatcaggctcattaaagatctcccaggggagacactaacatacactctgctgagctgctggccgcccttttggggaaagtttctcctgaaccacggaattgatcagtgagcggcccgttgtgaaatctgatagagatggacagaggggctccccagctatcttatttagaaccatgcccttacaaacaaccttggcacttacaggttctccactgaagagaattaagcagtagtagagatgtatttacttgatggaataataaaaaaagaaaaataacaaaaacagaagtcttctgagtggggaaagaatctcttagtctaagtcaaatgctccttacagtggagactgtaactctggtaactttttttttgttggcagcctcaggtggagatttcctatggggctggatcagagccctggggcagagaaccctttggcttggccgctaggccaggcaggggctgaacaaaggctcagctggagggcagaggctgcccagtgccctccatcgtgggcagcaggggcctgaattgtaaagatgttctccagatcaaatgtagagggtgtgaaatagctctgattttatagtgtcaagagtctttcctgatgtcgggtttagaaggtggtgtggagcaggtgaagggatggaaacccttggttgcagggcaggatgggcaccgcgtggtgtgtgttttaattgcccctcgtttgggcttccgtttcacttgtgctctcacttctggtcctcaccatcatgaccatgtccatcatacacaggacagatgtacacacgcttcaggaaccacccagactttggggcgctattgcgttgaaccccgcgccaccgcgtgtgctccttcagtactagttctgtgtttgagagcctcgccttcatttatgaatgaggccactagggggagtgcacgtatcagggaagracctgttccccggcaagcctagggcggtctggaaagggacagtcaccaatctccagagcccagggtgacggtgtgctctgattcctttggccaggttctgaagacagcccacccaagcatgcaggcaacaacgaaagccattcttccaggagaaggaatcggcattccaagtcaaaagtcaccaatggcgttggaaagaaatgaaaaaccctggttaatcaaagatgttccagagtgcctagaactgagagggaaatggaactcatttggaactccccgtgaggaggtygaggcgcacagggcaagcaggaagaggcgagggcacttgggggtcattatttgagatcgtaagtcttgtttcccacagacctggccgcgtcargcagatcatcgcctggggggcctttgccaacgtggggtctcttctaacttcagcacttgacatgcggtcaccggtggcagcgcggtgtgttgaagggaaacggtagctattcattcacagttgccaagagcagctccgcgcctgctggatcgtggatgcagcgtaaacatcttccttcagacgaggcattaaccccatggttaatggactggtcaccagtttttattttatttttatgaatctacctttccattgattgatttaagttcaggccacttttctgtcttttatttggttactgttgttatttgtttttaagttaggatgctttttaacagcctttagaagccgctgctgaaattgatactgggggaagggttccccttccttctagagcagaaaagggagagargtgttgtattcctgtttggtaacctcagtctcctgtaagacctcctaccacatggcgagtatacaccaatcaggagagggtagctgcctgcataggagcctcgcttccgattattcccttcccaatattattcatccagacttagccacagtgcacaaaagcaaacctgctagagaggcagtgaacaccacagcttctccccagctwggtgccttttacatcgggtttgttctccttccatggtgtgttgctgacattgtcactgagtcccatgtgaggtgctggtgagtattacctttcatctgtgccatgctctagaaccttgaccttgatagttcaccacstctgatggatccctgttttaaataaaaacgattcactttaaagcctatcaaaggtctgtctgtaaaatgctcattttcttgcatcttactggtatcttctattgattgtaagcagtctgtgtttttcaagtgactttaggataatatatatgtgttttacatagtgagaagaaaaaagaaaagatgtgtattttaaagggcttacagacatatatgtcctacttcttagactacccaagtgaccaacaggaatgaacaacatagtcattgttttttcctgtggtaatggtttccaagttggacttttttttcctctaacaagaggccagtacccagttgattagcttacagatatcaactcactgaaagtaatcttttgttccctcatttcacacagcacaaaggttcgttctgatgtttcttcttctttaaggaaatctttagccatagaagtgtcactttttttttttctgcaaaagaattccaagatgaacgggttgaatgaatcatgccagccagggtcacatcctgtcctcagggggcccagtgctcaatagtagattctgcgggagtggagaagcgtcagtggcagctccgctcacttggtgagtgagggatttggctgtgatgagcctcagctccgagctctcaaatgtcctccagccagcatctgcctgcttcccacaaaaggatagaagagaggcaaagtgcgtgtttcataaaacctgcctgcacttttataacccatcaaagaggccatttttaaacacaggtacaatttaaacatgatctttctttgcaaataaatatgttttgtttcatcctgtgttctgcttttctaagcatgacatacttgtgcccattggagaagacacctgtctcttctttctcacaccggtggtgcctcactgagtgtttccgggttcattttccgggagcactgggcctgacactttcacactcttctgactttcgccttgttgcaactgatggagcatgtgtgcttcctctgaggccagcctacaggaggcagctgtttcgcaggtggtgaattcgactttactgtggcattgtgaagagcagggtgcacaggagatgattttttctccatggctttgtaagaaacagccaggaaagttctcagatactttccatgccctttctttgagttgaaactttctatttcccttcagtcagagctctttactatagtagttacaaaaccagtgctttccatggctggccagaaccacagctgctattccttttagaagccatactgctgggtttggcctacttttttcaccgtttctatggaaataaacctcacattgatggaaatagaatgcgtgtttcagaatcatcattcaatatctgaaatgatttgattgtaaattatctcatggtccctgtttgcaaaccaccctcttaagagagaacattgttttggacctaaagcttgaagaacggtttatgtatttttctccttaagtagcattgcattgagtgttaggttcttttccctttttttcattcttggtcttcccaaagcttcttcccacatttcgtttgtgtctgtttccaccattcatagaaaccttggaaccactctcacagcaatgctaggatgtttcatggacctgttaagcattttgatgatacaagacatcctatcaatgccagtcttattttcgctaggactctgcttccacagtaagctcctaaggtgctcacccaacccaggagaaaacaaaattcattaccaaatacaacaggttcagccttcttggtcttccctcagaagccaccgtgtagcaccctggaatgatgcctctttatgccaaggcccaccctttggaattgggagggttttgggtagaatcctgcacttacagaggcccttggggtcattgagaagtggaggaggttggacacagaaggggaggctaaacacaaggtggggaagaaaaaatgtaaccattggcagccagactgaagctagccctttaaaatacggggttggggggttaacatccgctctttggaatgtgctcagtgactgctgcagagttcctgggccaccctaatgtttaccaggtgggcgttgtttatatggttcttattgttatgacaactagaaatcccacagtagactagacagtgctccctaccatttcccatttataggattgaaatcaagatgtaaggagagctggccgggcgcagggctcacgcctgtaatcccagcactttgggaggctgaggtgggtggatcgcctgaggtcaggagtttgagaccagcctgaccaatatggtgaaaccctgtctctgctgaaaatacttaaattagccgggcatggtggcaggcacctgtagtcccagctactcgggagacagagacagaagaaatgcttgaacccaggaggtggaggttccagtgagccgagatcacgccaccgcactctctaacctgggcgacagagcgagactatctcaaaaaaaaaaaaaaaaaaaaaaaaaactgtaaggcgagctaagacgtctgtctatcagtgttccattacataatacacctctttccttcacatgtgtgtgcacattctcaggattatattagagatttgattctttgcaagggtcagtatcagtaatggctgagactggtgggctgcagtcatgttgctatgccgtaagaggtttttacaacatttccccttatcacactttattctaacctgatgatgggcctatctcaggtgaagattgcaatagtttccttaattgaactttggtatttgatgcattaaataaatatggctttttaattttgctatcttctgtgaatttaaaggaattatttcattgatgtctaccaaagaagataaaaaaacagttggatgtgaaatttttttaggttgtgggaatgctacgttgtaaaaatcttccttttcttccatgttcactaaaaaatgcctttagtccatttcagaaagttcatctgtgacttggtctactctgatattccctttcttgcagcttgttaggtggaattttgaagttgcttgtcctgcaaagagatatttgttgtcacagtctaacagtgttcaagggtttgcaacatgtccaagtacctccaaggcctcacagggctaagctgaatttatccctcatgatactctgatactcataatactctggttgaagcctggtctctacctccatattcagtacacccagctggggaggcgggtgacagcaagcttcctgcctgcatttctagcaaaagggactcctaagccccagcattgttgtcctcttggagcagagagaagggtgttggcagatcccttcccctctcgtaaccccagtgaggacagtaacatcattcagaacatagaatttacccaagggttttgctttcacagctgatgcaaccaaccacccagcctctttaagtgatctgggctcacgctcgtacttgtgcctgggagttaattgctggtttttctttgttactggaatgctcaagacatcaccctggccagggtctgcaaactgtgggcaccgacagtgccctgcggtggcaggaagatttgctcagagctgtgacctcctgcccctcggagcagtcatcccagggcgtcagagcctggtgttccattgtagggtgtggcccctttctggatgctgagtaaaggagactcttgtggttttacaaaccacaggaaatgaagtttgtctgcctttaaaagaaaattggttttctaacatttgagactaaaaaaaccaaaatatttcattatcgtgtctgaagtatacacacaatagctttcattacagagtcaaattgcaggcaaggtttatgtaacaatccatactggaaatccgggctgtaagcctgactgttcccacccgcccgacaaagggctgtttgggctcaatctcatctctccaactgcatacgtcatggactgattaggtattttatgagtgcagcgtgggaaaggcttaagaaagatcttcagctttcaaaatgttagggatcctccacctctcttagagtggatgaaatccagaccaggagcaggggaataagagttcactagggccactgctaacatgacttccagacagtggcattcagaggattggagccttcaaaacacccccgtgtggggctctccgcaccccttccctctcgtccctgaatcctcccagcagccacagtaacacaagcttgcacatagagcacacggccaggaggtgcccgggggccaccggagcaacacagcctgagactctgtgccaggctcctcccctggattcttgtgcacatgtcttactcctatcagcagaccacagccccatagatcctcactggcctcagagctggcaaatggatggcaaggagctggttccctggtgaccgccacacctttgctcctcctcctcctccttggaaggagactcagatctcaggtgcttgcttgattagagatggccacacctccaagccactcttcaggtggctccaggggtggttggctggttgcgtgctctgtggacagaataactggtgttggccttcgttgtcttttgtgtcctgtgagtaggcagactccggccttgacatccctgtgtttctgtggcctgaaatcagtcgagatgccagctcttgaacagggtccccatactccacgtggattcttttcccaatgttttgacgcattctgcaaactgttggaaggcaatttctctcccctgtagcagctccctctgccctcaggaatgtgatttacaatctgatgaggccataaacctctacttttcacgtctgaaaaacagcaaagtatgggaaagaatgtaaattataaatactgaattcctatsgtcagcaataatggaatggcctgggtgggttattttttttaatatggtatgcatatggctttaatttcgaaggggttgggtcctcccccaccactgtatttcttgggagaacagataacagcaaaatgtcctgctgtgatacggtgtttttccaaaatgaaaaaatagcatctttctgatgactcactggccaaatactttgaaaggccactgtccatggagggggatgggatggtaggtgacagtgacatttccatactcaccaccctggtgatctggtgtctgtccaccccaaaataacccccaatgttctcacttagcaacctcccgccaccccactttaactttctaggaggaggttttcctatgagatttttgaaattctcttcccatctctcttatcagttgaggttctgctccctaactgggaacagacttctgattgccaccatgagcaggaaagacagccacaaagccgagaggctgtgcaggtttgagttttcattccagcggtgggtcagcgcctggcttagatttcacacgctgggcagcagcagccctgcgctttgctgaggtgggaaagagccaccaatcacggggtgaattcctgctgctgttctcagaccacagaagccaatgtgtggtattgctgtgctggtgttcagcacttttccccttaaaccctcgctcgtcccagttcaaaacgatgggtgaaagctgaaaaaacacccagggcccaaagttcccaaactcctgttttaacagcccacgcctgccggagcatctatgacaaagtgaacggagctgtgtttttcttggtgtggtccgttaagtatgctgacggtggaggagtgtgcatgagaataggatgcctgaaatcgcaaacatatccacccacagaaacacataatctcacaaacacctattcactcaacactcaccctttgtgtcttcctgccgctttctctggactacatttgagtcacaaaatcccaggctcagcttgagtgcaatcacaaatgtatccacctacagaaacgcataatctcacagatacctattcactcacatactcaccctttgtgtcttcccgtcgctttctctggactgcatttgagtcacaaaatgccaggctcagcttgagtgcaaggctagccagacca

SEQ ID NO: 93266 - DNA, 77192 bp, Homo sapiens
tttgtatttttagtagagatggggtttcactatgttggccaggctggtctcaaactcctcacctcaggtgatccacccgcctcagcctcccaaagtgctgggattacaggcgtgagccacccggcccaatatgaaaccttttaaactaattgcactgaagtcctgcatgactctttcaccaagaattttcgatttgcaggtttcctacaactatatccctgcatacttgtcgaataatagacttgtgattttactcctatgttcatctccttgatgtctgctccatggtgagtccgctgagattccttttttgtttttttgagatggagtctcgctctgtcgtccaggctggaatgcagtggctcaatctcggctcactgcaagctccgcctcctgggttcacgccattctcctgcctcagcctcctgagtagctggaactgcaggcgcccaccaccacaaccaggtaattttttgtgtttttagtagagacggggtttcaccatgttagccaggatggtcttgatctcctgaccttgtgatccgccagcctcggcctaccaaagggctgggattacaggcgtgagccaccgcgcccggccgagcacagtttcactagcaggagaaaaagagctttcagacaagcaaacaggaagagttgctgcagatgtggaaggaacataagggaaaagtagcgcaatgttgcctttaggtttttgaagcatgagcaaaccaccacattggatgagcaaatggcaatgctatgataaagcaaagatgaagagttggcagaaatgtatactttattgtaaaaaaaaaaataacaaaatcaatgaataatgtaaatgaatttgggcataaatgctaaactgcttacacaaatggctgttattagagttttccacagccaagcatatttaaacatttagtaatgttgcaccatttatagttgggctccatgtgaatagttttcctgataccacccactgtgttataatcataatctcaatcatcttatgtgtatgacactcactttaaaacacaaaggaggatctggttctgaggaagccagttttggcctcctaggctgtggggattgcatgtaagatggtgatagcttgatcaacttcctctctaaggaggaagcagggttgggggacaggcccaggcttcaggtcgtagaactgagaaaaggaaaaatgtccagcaaactacttgagatcctccaaatgcaattcaagaaatacttatcaagcatctattgtgtatgatttacaacaaaagaaacgatgtccttgctgaattggaggttatagtccacagcaggggtacgacctcctccatgcctttttttgggcaaagggtccctttggtgaatcctgtggatttcttctcagaataacatttaaaaatacataaagctcattaagattataaaggaaaaccaattataattaaagacagttatgaaacaagtacatttgtgatatgcttctttttttttttgagacagagtctcactctgtcacccaggccagagtgcaatggcatggtctcggctcactgcaacctccgactcccaggttcaggtgattctcccgcctcagcctcccgagtagctgggactacaggcacgtgcctccacacctggctaatttttgtatttagtagagacggggtttcactaggttggccaggctggtctcaaactcctgacctcgtgatccacccgcctcagcctcccaaagtgctgggattacaggcatgagccaccacgcccagcctatgcttctttattaatgcatgaaataacaagatctagtgatgagtataataattataataatttcaaaagagtggtgagtataaatgacatctaaagagattgtgatgcttggtaaagactgggaatctctgctctaagcaacttgtgacctcgcagttccctgattgtttgggctcccttgcagctaggggtgatcatgtgatttcctcacccaactttttctacattacatttaatattgtttttatttaaaactatatattggggaatgatttgcattactaagagactctaaaactcttcatgtggctctggagaaagatgttacgattcccattttgcagaacaaaccaaggctcagatagcttagttactagctcaagtcacacagctagttcgtagcagagcacattatgatggtactcagggtttatgacacattatgtttatgatggtaaacagcagttttcaaagttgtgactcttgttgggctttctttaatggtttagtattttaagcaaataaagcatacaacaaagttaaccttcaaatctgttctggggtgtctccatactttttttttttttgctcttggtgattgaaagtatgaatgatatggaattatcagcccacctaaatgactgagctttgtatttgtttttgggtcaaccaagggaaggtgagaaggaagtcaagcaagccaagaaactgttctcatgcctttctgtagttgcttgtattcacaggacaagggtccctaaatgtcttcagttttttatccttagcatggttcccattttagaagctgaggtctcagactcccttctgcttacataaggggtgtcaggcaatggagtgtgattaaagaaaatttaatttttttataagtcacttcaataatacttcctgcggactgtatgatctcacgctgataataaaggggacagtggaaatgtgagatatacatatgttctcccaacatgcaaaagtgaggaaattaatttactttacatctgcctccattatcctgtgccagagggtctcaaacattgatgcgcataaaaatcatctgcaggtcaggtgcggtggctcacgcctgtaatcccagcactttgggaggctgaggcgggaggatcacttgaggtcaggagtttgtgaccagcctgaccaacatggtgaaaccccgtctctactaaaaatacaaaaattagccaggcgtggtggtgggtgcctgcaatcccagctactcgggaggctgaggcaggagaatcacttgaacctgggaggcggaggttgcactgaaccgagattgcactactgcactccagcctgggcgtcagagtgagactccgtctcaaaaaaaaaaaaaaaaaatcatctggggagctattttaaaattcacctttctgagccttgtccccagagtccctgatttgtaggcatgagtggacctgggaatctctatcccagaatcccagatgattcggatgctggtggtctattcaccatgctgtaagaaacaccattctcacacaaacttgatgagtaggttttaaaaatctgaattgcagaggcggagccgccaccctgccgcgactttcagtctccgaccatggcctcacgctggtggcggtgtgcccggctcccccggccttgcagggcctccagggccgcgcgccgctgccggcgcccgcgctcaggctcataggcggaagggattcggcttgtctcagataccctattttagtcttgtgaagcgcttaacatctgcctgtccaaatgtatacagtatatcacggttttatcacacaaccccggacagtaaaacacacagtggtgagaaatatacagatcaccgatcctttcaaattcggttgcagagacttgaaaggtctgtatgaggacattagaaaggaactgctcatatcaacaacagaacttcaggaaatgtctgagtactactttgatggaaaaggaaaagcctttcgaccaattattggggtgctaatggcccgagcatgtaatatccatcataacaactcccgatccgatgtccaattttcacaagctgattgctgagaaggttctaggcggcgtctgttaaaaagcattgctgtctgttaatttgacatgtgcaagccagccaccgcgccatagccttaattgcagaaatgatccacactgctagtctggttcacgatgacgttattgacgatacaagttctcgaagaggaaaacacacagttaataagatctggggtgaaaagaagatacggttttttggttttttaaaatctctcttaccgaatcacatgctttttggaccgcgtttgctttttcagatttgtcttattaaaaagtaaaatatgcttgctcaaaaaacaaaaaaacccgaattgcaattaagtctttgtttctgccgtccttatgacggcctggacaattgtcctattactaaatttgcccttttctataaaacattgacagcccctaacctgaatagcactctgttgggtctaagcttaaattgtctgcccaaaccattttacaccaaagtaggaaataggtttaagttcttttaggacattcggattaaaaaaaaaatatatatatatatatatatcctaaggtaagtattagaatacctctattacacttttgtttctcgtttggagaattaacatggcagcatcgtctaatttgatagctggaggagtcatgtccactttccccatcggcctgttaaacccctatcattcattcttgactcatcctgtgtctttgtgaagcctttcttggtaaacctatgcacaaggaagaccctttatgtcgtcaccagcccttgtgcatgtttcaattgtagtacctatcatcttgtactgcgattgcctaatttatttttgtatctccagttctacatacagtacctggcaaacagtaggcgctcaataactgcgaaatgaacaagtccatgtcaagagactaggctgggagttttaatatcaatgccgactgagaaacaaaatacggaaatgtcaagggctggtataaaaataatctctaatagcacaaaatcctcctgaagggaacacctgtcccactttctcacgttgctttccaggttcttccgacaccccaatttcccgcccactcttctccctccggggtacaggtcaggcaggtatcccagctcggcggctctgataggtcggcgatgatttcattgttagggaacatccgggcctttcccctccccgcaacacctccccagagcccggccttcccagtttcccactctcgcstgcgccccacccgcggctgaagcaaaacaaccgcctctcccctgcccacttcttgtcctcgtctgagtcgtcccttcccgtctccacgccgaagagaggcgtttagatcctccaatgagggcctaggaggactttcttagccaatcagtagccaagcccctgcaattccgggtgggaccaggcgtccacacctatagctggactgctcrttggtcccttatggcgcttcttttacgcgaggcttagaggtcaaatacaagggggcacggtcctcacagaacggaaaggatccgtacagactctccgggtttgaccgttttctaggacgaaccaatcgctttccagatacttccccgccttttgcgcgttcatttgaaaaaagccggtgtgacggacttggaaattggctgtgactgacccgcaagaaagccagtgactgggggttcggatcacgagttggaccaataagaaaagacaatcgctggggccggggctttgctaggaggagcgcaggtgggcgttatttgattgacggagggctctacttatggctggtagcgggggctggtccctgacgttcgggaggtaggacctagcggaggcggggccgaataaagtaaatggtaataaagggttgggtctcacttagtgggcggtgtttgatggacagctgaccttgcctattgaaagtagccactgatgcccaatgggaaattagaaacccagaggcggggccgggtgggcggggtaaacgaagtacggaggtgccgagggagcagcacggggagggggagcggtgattgacaagactcccagcaaaccgggggccgtgagagggcgcgcggcatcccagtgggtggcagctggaggcggggcaccctgaggggcggggaaggactagggtgcggggagggggttgcaaaaggagccgagcggcttctgctcaatggcggaaaagccgccggtgctctgacggcctcgttcccctagcagttgcgggggagtttcctgccggcgcggctggagtctctgattctcagggttcggtggttggaagatgctccagagagacgaggctgcggcggaggaggtggcggcggccgaatcggcaacggcgctagggtggagagaaggcggcakcggcggcggcggcggcgtgaggggccgggcggtgtaaacagccccggaggcggcggtcgagaccccgagggggaagcggcggctgagtcagggtcgcgcctccgttggaaacttgggctgagtaccgcggcgggcgcgagcgaggcgccctagacatcttctccctcccttgcctcaggtaaggccgcccggcaccccgccggaggggaagcggctgaccggccgcgccgccgaggccccgggccctgggcaggttttcgcggtgctgccgagccgcggccggggcctctgtccttccgaatcctcgctgctttccctgctgccgcggagcctaggcaggggaacgccgggcctggctctcgggtataggccccttccccggccgccgcctccgctgggctgaggtctgggagaggcgcagggagagaatgggagtttgctggaacgcctggaagctgactgattctctcttccctccgcttcagtctgcaagcatctctttcacacgaaagcactggggctaccccaagccttggcgcttctcttcctggtgcatgccctgtttgaaaacactatcttttaccattcgtttcctcatcagcttctgccctactctgcgctccacttcacttccttgttaaatcgtctttctctgctgtctatgcgttctaccctcgccttccctccttagtggctttaaattgtgtgtttctcttttcttcgtaccccggcatctcttgcctgtcttccctagcaccatccttttcggatgtcattcctaacagtgaagttcttaattgaaactgccrcttattgtcagtaccccaaatctaccggagccccattaagagtatagactgactagccatatgtggtaaatcagtttttcatagtttaagcctaacaaccttgaaaaaattgtattattaaacgtaaagtgtgaaaataacaccgaaaataattttttaaatgaaggactcagtgagtgttggaaatagttatttcttcattttttaaacttgcatgacctctcatatcagatttagcagatctgggacgtttgcccatcttattcggcaaaaaaagtgcttcttaggcgtttgatagcagcccaaattcatcaatattcaatttcttctaagaacaacttgaaaacttttttaaaaagagacgttaataactgggaagttgttttgatagtcacagttaaagagcttttaaaataggctccacatgtttaatgtatcaaaataaagttggcaggcatgttgtaaaaggattatttaggaatttgagtagtcttagtgttatgtagctattttaggaaaaacattctttttctgttaacaaacgtttacaactacggtgatgtgagaattactgaggcttactgtgggattaacacaggaactgtctttatttgagctactgcatggatgaagaagtggtaaattgttcagagtagacagtgtaagtcacagtatgttctaggagatggagaaacatgccatggacgctgaatgttaatagatgttatttcatttactttctctgttgtgcaatagcaaagttcctattgttggcctacttttaaatggggcatttctaagtaaatagtgagacaagttattctaattattatgatagtcttttccaagtgtacaggccttttaaaaatatagttgaagtaatggtaattttttaaggaaatgtttttgtaggtctgccaaatggacagtgtgttgttctaatcgaaattttaaaattaagtatttagaacagaatattttagtccacacattttcagggataatctttattttgtgcttcttctctcaatgccttctttgtctttttttttgtcttaatggttgttgtgttttcgcctcttcatttgtttttgctctcatgaagtcttacaacagtttctgcagtggttctttttgttgctgtatattagcacgagtatttttatttgagctttcatactgtaagatttccccagtttctagtacattatcctctggatttgttgaagtgattgttctctttgaagtgaccagcagagctttcaacaccgttttcttacactgggtgtctgatttctgtgaagactctaggaataggtgaaaggcctttcaatttagtcatgtcagtaaatactgttttatgttagtaattcacctaattactaaattccttaagattacatcatctgaaggaatagtgtagtgtccaagtaactgtgcttctaagaacagctgattcacaggttgacagggtcagaaaaagtggctcttgttgaaagttatcttttctataacaaacattttttatggaatcttttgaattaaaatatgatgctgattatgtcttggcagtcttggaagcttagaattggccacggtatcacttagtgattgtggtgattcattaaaaagaggctatataggccaggtgcggtggctcatgcctgtaatctcagcactttgggaggctgaggcgtgtggatcacttgaggttaggagttcatgaccagcctggccaacatggtgaaacaccatctctactgaaaatacaaaaattagccaggtgcggtggcgcgtgcttgtaatcccagctactcaggaggatgaggcaggagaatcacttggactcacgaggtggaggttgcagtgagccgagattgtgccactgcactctagcctgggtgccagagtaagactctgtctcaaaaaaaaaaaaaaagctgtatttcatgaatatttttatatgtaactattttaaagtattttgtgacattacctagcatagaaagtagttaagtagtataattctaactctcgcttttaaaaatgcaacatacagtattttatattttctgtgaaatatgcctttcacaattcactgattttagtaaaaattagcaaacaaataactggtggcatcagaataataaaagtttgtttaatccaaaattataatagcaaaatttattcaagtaatagcataaaatgtgaaatcatgattatggtaagataattttcaggagtatgatattcctgaattttcagttattcttcacactgtacctgatttctttttgtttttcccttgctgaattaatttcagaattggaatgaaatggaatactgctattatattagcagctttaaagttttattgtaaaatgtatcgtatattagcagaattgatggttaagtgtactgacatttcactatgctatactcaaacattgatggtgaaatagagttttgggaactatttaatttttgtagtttgtagttggctgtcataaaatttgcagaatgacagaactgatcatcagcttctagtggctgatctaacaagaacaggtgaagaaaaaggtacatgagcttcataatgtgtattttttctttgtttttgttggtgtttacttacatcaatacattgagttaaaaaaatgggttttcatcttttggattaatttaagtatgctaaagccattttagaatctttacaagtaaaatgtttctaggccgggcacagtggctcactcctgtcccaacattttgggaggctgaggcagatggattgtttgagaccagcctgggcaacatagcaagaccctgtctctacaaaaaataaagttagctgggcttggtggtgtgtgcacctgtagttagctgcttgggaggctgaggtgggaggatcgcttgagccagggaggtcaaagctgcagcgagctgtgattgcaccagtttgctccagcctggatgacagagtgaaaccacgcctctattttttaaaaaattctgatgtgacttaatctctttgtgtccatttgatttgagatgattgacacttttgaacatttccatccatattccttttcttaaagactacctagaagactaacaagcgtggccaggcgtggtggctcacgcccataatcccagcactttgggaagccaaggcaggcagatcacttgagaacagcctggcctggccaacgtggtaaaacccagtccctactaaaaatacagaatttagccaggtgtactggccggccaaaaaagactaacagaccagatactggaatcagcgttatggtgaaaagaaccctttactaaattcttgatgatgttacaaaattttccaaaagtgtaatctatatagtgtatttatttctcagagtatttaaagattttgagatttagtttttagtaacatataacatcctaggaaacataaatactgtacaataacttatatactttttttctttttagttttcttttttcatttcttttttgcccctcgagatctcatacttcgtagttttccttcaaattacagggtgctttatttctcccctttggtttaactttaataacaaccataaacactttacttctgaattaatggtaaaccatgacacagaagagtgcttaaatacatttttttctttttgttttactataactaatcacatctacaatatcttgttattgcttggcataacatataccttttataataatactcttcatggccgggcacagtggctcatgcctgtaatcccagtactttgggagcccgaggttggtgaatcacttgaggtcaggagttcgagactagcctggccaacatgatgaaaccctgtctttaccaaaaaatacaaaaattagccgggtgtggtggcacatgcctgtagtcccagctaccccggaggctgtggtggagaattgcttgtacccgagaggtgaaggttgtagtaagccaagatcacgccactgcactccagaytgggcgaaagagtgagaccctgtctcgaaacaaaaataataatactctttgtaataacttgtttaacctcaagaaccttgtagcttaatcaattgtagtattttaatttgttagttcatatattatacatttgacatggtttataacatttaaaacacactttactaatttaaaacttttgatttatcacacagtttaatattaacttgtaaatataaaatggattcaaacttttctcttggagaatgtttaagtatcatcagtattctattttttagctttaaattgattcatttcttgaaaattaaaaatcttaaagtttagaaacataacacttcttggaaaattgttttgcatccttgtgaacaaaagaagatccagttaaatccgatctcatacttagaggagacagacaaactttggaagccatgtattgactattaaggaacttgtctttctcttagagatggtaccaattactggtagtgatatagggaggataagacytgtctctaggattgctgtgattattgtctacgtagaatggccttcacttcagaatcagttgtgaatgaaaagtacatttgtgtgctagaaataggaaaaaaccttgtcttttatagaaaacttttaaaatgcagttatgttatcaggtagattcaaacgtataatatacaagaaaataaaacaaatgaataagtgttgtttgccagagaagaagcagttctgatcaataatatgtagagtaatttgtaagagtttgaaggcttgcgaagcgcttttaagcytgagagtaatgtcaactcatttttaaatctaatcgcattttattttcttgattgtaggtatcaagagcactcctcgcattgaaaagggctggttactggatgttcttatgagtaggagaatctagaagtgtcagcatgggtgtttaacctatttgggcagtgtttttccttttccttgttctgactaaagcatttatctctgaggtggggaaatggcattttctgttgaacacaggtggcctttcttagtcccttaaaaagaggacatgactgggcctggtggctcacgcctataatcctagcactttgggaggccgaggtgggcggattgtctgagctcaggagttcgagaccagcctggcagcacggtgaaaccccatctctactaaaatacagaaaattagctgggtgtggcggcatgtgcctgtaatcctagctactcaggaggctgagacaggagaatcgcttgaacccaggaggtggaggttcaacccagctgaaatcgcgccactgcattccagcctgggcaaaagtgagactccgtctcaaaaaaaacaaaagtgggggtgggggaacataattaattcaaagcactccaaatgttaagattatataggagatttygttgagctttgggaggctttctgcttttatttactctgagctaccaacccactgagaagtaaagaattcagaacagtctaatagtatttagtctgtaaccctccagccaattcttatgttcactgagtgccttctgtgtgcaaaggcccccatttcatgccagtatctgaacaaaacagacaaaatcccaaatccttgtcgttgacgatcttgcattctgttaaccagcaactcacagtttacattacagctgaactccttatgtggctggcttaaaaacttgagtggaagatttggggtgtgtgtgttttgtacactaaacttaaaagctgtgattagagctttactatttttaacaaaaggaaaggaagaggttttctgtaattggataaaaactagactgaaaagaggaaagaggaaatattgttgtgccttagagaaagacattggtttgagattttttttttttttttttgagacggagtctcactctgtcacccaggctggagtgcagtggtatgatctcggctcactgcaacctccgcctcccaggttcagacaattctcctgcctcagtctcccgagtagctgggatcacaggcatgcaccaccacacctggctaatttttgtacttttagtagagatggggtttcactatgttggtcatgctggtctggaactcctgacctcatgatccacctgcctcggcctccccaagtgctgggattacaggcgtgagtcascatgccctgcctggtttaagattaaaagatgacccaaagagagaaaaagagatccctgcattagacagacatgagggaaatttggggccttcaggtgtttccatttactgtacatccttggatagatgagttcctggaaaggaggatgggagtaaaggtggaacaataggagaagggtgaacaggattttttaagtctgatttaaataattgggatatacctataaaatatatgttgtcatttatgtttaaaaagctttctgttcttacgtgagtatagctgaaggattagtggttgaccaatagtgcctggtactgatttgtaatggctacttttgtgctcttagcaaagatggctaatggagccaatttgtctcttggtttattgtgcacaacttggtctatatatttatcactgcttctccttccatagctttgttgtattacttaacgtcgtgcctttgttttttctgcatgtgagatgggcgtattgcacttagatgtgtgaagcaggtgcttaatttttgctttctgttctttctattgctttcctactgaaccagtttggtaaagaggcctcttcttcagtttatacaaacattgcaaacttaagcataaaagatctttcatctttttgttcttattttaatgcttggtggtcttgtgctttcatttatgagtcagtttcatttgatcttcattgctaaagtgaatcaagattgatttttttaattttaaagcaaatcaaccaactggctggggtgcagtggtgcaatctcggctcattgcagccgccacctcccagttcaagcgattctcctgcctcagcctcccaagtagctgggattacaggcctgsggcaccacgcccagctaattttgtatttttcgtagagacggggtttcaccatgttggccaagctggtctcaaactcctgacctcaggtgatctgcccgcctcagccttccaaagtgctgggattacaggcatgagccaccgtgcccggcctagtttcatttttaatgtatttttgtaattctgttactttatcaaaatgctgatatgcaagagaacttgaatttttggaatatattaaatttagtactgtaattcagaccagattcattaagttgttcaacatttggccatctatcttagatttaaaaataaccaaaaacaaccttacttgaatttaaaaaaattatctcttgtaactggttttgtttatataatctaacattttattaagtctttggtggttgctagtcctaaacttaaggaaattgagtttgtttctattcatctgttctggagtgtttggaattgcaatgtgaaagtgaaataacctttttttttttttttttgagacggagttttgctcttgttgcccaggctggagtgtagtggcatgatctcggctcactgcagcctccgccttcaggttttaagtaattctcctgtctcagcctcgtgagtagctgagattacaggcacgtgccaccacgctcagctaatttttgtatttttagtagagacaggggtctcaccatgttggccaggctggtctcgaactcctgacctcaagatctgcccgcctcggcctcccaaagtgctgggattacagacatgagccaccgcgcccggcctacatgtatgtatttctaaatagcatatagtactgttttaagaggtgtatgtacatgaccatatacagaattttttttttttttacaatttgttcttgtcacttaatatttttgcagttctttttttgttctagtcccttttttccatagtattgcatatatattgcatagtattccattgtatgattagaacagttctttttttttttttttttttaataagacagtccggctctgttgctcaggcaagagtgcagtggctcaatcttggctcactgcagccttgccctcccaggctccagtgatcctcccacctcagcctcccaaatacctggaactacaggcgtgcaccaacacatctggctaatttttgtgttttttttgtagagatgaggtttcaccatgctgcccaggctggcctctaatccctgagctcaagtgatccacctcctttggcctcctaaagtgttgtgattacaggcgtgagccaccacaggcagctagaacacattttgtctagtcttttttggaaggacatttggattatttttgtaattttaatcaatggtctaaaaccatttacatgccatatatatatgcgagaatttctctagggagtaaaatggctgaactgtaggccatccttatcttatagccctaactagatatttccaaaattctctccaatgttgctatactaatttatactcctaccagtggtgtattttatatatgtatatatatatatatatatatattttttttttagacagagtttcgctcttgtcacccaggctggagtgcaatgatgcaatcttggctcattgcaacctccacttcctgggttcaagcgatactcctgtttcagcctcctgaagtagctgggattacaggcacctgccaccacacccagctaatttttttgtatttttagtagagatggggtttcaccatgttggccagggtggtctgaactcctgacctcaggtgatcctcccgccatggcctcccaaagtgctgggattacaggcatgagccaccatgcccagccaaaagtttctgttgttttaattcagtgctgtcctatataaatgtaaggtaatttaaatttttctagtagccacattaataaaaaagacataggcaaagttaattttagtaatgtattttatttaatccagtatttccaaaatgattcaatatataaacaatgaagttaattagatattttgcattcttttaaaaaatattaaatggtgtgattgggctgtgtccccacccaagtctcatcttgaattcccaggtgttctgagagggaccccatgggaggtaattgaatcatggggacaggtctttcctgtgctgttctcatgataatgagtaagtctcatgagatctgatggttttataatggagagcttccctacacaagctctctctttgcctgctgccatctatgtaagatgtgacctgcttctccttgccttcagcagtgatcatgaggcctccctggccacatagaactgaaagtccattaaacctctctttcttttgtaaattgcacagtcttgggtatgtctttatctgcagtgtgaaaaagtactaataaattaaatatttaaaatccattgtgtattttacacttacagcaaatctctattagcattagcctcatttaacattcctactagccccgagtggttagtggctactataccaaacagcaaagctctgtgttcttgtctgtgtttgatattgagagtctctctctctctcttttttttaatctaaggagagagaaatggtgttttattttgactttaattttscatcttcctattagttttcctaatgacaaaatcttacaggcataaatatggaattactttgccgttggaatgcaggtgtttattttgttaattgtgtttaagagtttttagatattagatattagatttagatgttagtgtgtctataaaatgatggtgctaattaaagactttaacctggccgggcatggtggctcatgcctgtaatcccagcactttgggaggccgaggcgggtggatcacctgaggtcagaagttcaagaccagcctggtcaacatggtgaaactccgtctctactaaatatacaaaaattagccaggtgtggtggtgggtgcctgtaatcccagctactcaggaggctgaggcaggagaatcgcttgaacccgggaggcagaggttgcagtgagccgagatcctaccattgcaccacagcctgggcaacaagagcgaaacttcgttccaaaaaaaaaaaaaaaaaaagactttaacctcaagtcaactctaaaatattccccaaaatgtgtatttggattgaaatgaatgcttggaaggacagtacttgaatggcaataataggggtaggaacaaggcaattgcttaatacttaagggaaacaatcctttgtatgtatttcttttccttcatatatttctccctttgttttgcttaatcttgatctttctttcctcacttaggaagagttggctgaatggatctgatctagagccaaagatgttctcaaaaagggctacagggatagactgactttgggagttggggatactctatgcccatcatcaggaaacaaaccaagtaatataaattcattagtgtgtcgtctgtccacagtaagtaggtgtaattggctaggtgatttaaatgaatcagcagaaataaaattgctggaaatcaaggactgcttgtacttartaaatgttgcagtggataatagaggttaatcagcattccaatagatttttaggtctctgccaatttaatatttctgggaatgttgaaaaatttaactaggacattctttcttgaagaaggatctttttaaattacttttgtttttttttgagatggtgtctcactctgttgtccaggctagagtgcaggagtgtgatcatatctcactgcagccttaaacttctgggctcaagctatccttctgcctcagcttctcgaggagctaggactacaggcgtggggcaccatacctggctaagaagtgtcttttaagttaacacatattttatttagtacctactagatgccaaggtcacgaattagggtgggaaaggagctaagaagagcaaaaatgttaaaaggaatccaaatgattttataggagtggtgagatggtggtaggaagagttgggatgacatcaaggtggaagaagtgttttgttttgttttggagacagggacttgctcttttgcccaggctggagtgcagatcacagctcactgcagcctcgatctcctaggttcaagcagtcgtcctaccccagcctcccaagcagccgggaccacggatgtgtgtcaccatacctggctaatttttaaattgtttgtatagacagagtctcactatgttgcccaagctgattggtctccgactcctgtgctcaagtgatcttcccattttggcctccagaagtgctgggattacaggcatgaggcaccatacccagcctaggaaatattatttcacaggcaccttgaaggatttggctagctaaataaagtagaaaaaactgactgtgaggtgggaatgaccatgatgaagttgagctgtgtagagcctaggcatgacaaattagagaaggttcttgataagggtgtaaaaaaccactgcatcttttagggacatttaaggtgtgttttagggaaatsaagctcatgataatctgtaggtggattagaggaagatggggttgaagtcagggagatccactaggaagaagttagataatcaatgcattatgtgatgatgctaaaattaggatggtagggtgagagagacactgaaaaacaagattgatggaacatagtgatttaatggtggttgaatatatatcaaaagatttatggcttctgtcctggattaatactagaggaatgctgttactaatacaaataggtgggtaggcatatgaaggtggcttgggtgcagagatgaagtttttgattatgttatatttgaagagagatgtagcataaccaagstttgtgtttaaaatctagactaaaattcatctgaagtcagtgtagacatagcttaagccatgagattgcatcagagggcagatactgtgttttgggttgaaggttaattattatcttgggaccccacttccctttttcagagggtacagaaaaaagaataaagaataaagaaaaaagaataaagtttttttgatttgagagtgttttgaaagtcaacacaactgttaagagtttccagaatcgaggcgttaccaatagtttgaaatgccacaaagtaccttattttgagaagcttcttcttacgactgatagttggctaattctaccacacaggacatcagtgtttgagctgtttggtcaggaatattggtgttttgggttctgaaatggctgtatgttatatcgtgagaaacattctctatggacgatactccagacatatgggaaatactagtaatttcttttttttcttaatttttatttatttatttttttgacacagagttttgctcttgttgcccaggctggagtgcaatgacatgatcttggctcatcgccacctccgcctcctgggttcaagtgattctcctgcctcagcctcctgagtagctgggattacaggcatgcaccaccatgcctggctaattttttgtatttttagtagagatggggtttctccatgttggtcaggctggtctcaaactccccacctcaggtgatccacctgcctcggcctcccaaagtactgggattacaggagtgaaccacagtgcctggccaatactagtaatttataattactttgttcttgattacctaatatttaagttttctaattgtgatttgcttttctttttttacttttctctttagtttgttttgaaataataggttacaggtttcctctgtttagtaggcactttttcctagttatgctttctttgactctaggggctttatttttcatactttttttctttcttataattactttgtgtagaattggaccgtgatgttttcctgaacttttaggaaggtagggtatgtgtggatttttttgtaatttagattttcttcttagcagtttttctttagtgtagagcttcgtctaacaagggagcatttatttcagagtttatgggatctagattgctccagcactatcagatcttgttgtatattggtccctttgcatgaccccagcagttgggtcttgcagaattccctttcagttttagctgttactagattatcctgtcacacttttcagtgagyagctattggtgatgttggagtttctctcatctcaggawcttcagaagcctgttttccttttgcttccttttgcacaaatgctaataccacttgggtcttataacagtttgtagtttatgggggaataatacctttgttgttggattgctttgtctgggggaggatattaaaaacctctgctgtgaccaccactaccatcttagactgtcccatgtgcatgttcttaactactgtgttgtattacttgccaagtgacattcgatgaaatcagaccatttagatgaggaatatccacattttgccttgaacattcttcccgtgtggttttggaaacaaatatctgcacagagtaggataagtaagacagaataataggcatttaactggatggagagtcagtctccagaatcaagtacagctggatactgggataaggtttacataagttgttaggtaggcctgaatgacctaaaaccagaggaagccaaaaggcctgcctcctcatcaccacccagtaaagcctaaagcttcagcttctttattacataagtacattgaagggcataccagtgagccccaggaggaagggagagaattagccagagagctttttgacccaactttgagcctgaggatgagatttggctttggaattggactgcatgatttggtatcttagtttttttttcttctttttttcaagacagagtctcgctcagtcgcccaggctggagtgcagtggcgcgatctcggctcactgcaagctccgccttccgggttcacaccattctcctgcctcagcctccagagtagctgggactacaggcatccgccaccgtgcctggctaattttttgtgtctttattagagatggggtttcaccgtgttagccagtatggtctcgatctcctgacctcgtgatccgcccgcctcggcctcccaaagtgctgggattacaggcgtgagccactgtgcctggcctagttcttagttttaccacttgatagttgtgtgtctttggcaagttcttaacctcattgtatgtttccttatttgtaatgtagtgattataatagtaccttcctcataggattattgtgaggattaaatgagttcatgcctgtaaatacgttgaaacaattcttagcacacagaaaatgtctgctgctctaataggtatccagtggttgttctttttgataggacattgacctgttagcagcatttgacgcagtttatcacttcctcctctgtaagcacatttttctttgttgtcaggggtaccacactgttggttttcctcccacaactctggttgctgattctcagtaatttttactgcattttttttcgtctcttgacctttaaatgttggagtgctcaagaacttagttctttagtgtcttctctttttaaattatatttactctgttctcaaggggtttaagtggagatttaattatcatataaatgcccccgaatttatgtcttcattcttgatcccactcctgaatgctttatttctagatccaccttcctgcagtatctccactggacatrtaatagacatctctaactgaacatgttcaaaactgactacttgatagattatgcctcccttcttctcccctaagttgctgttggcacagactaaatcagggattcttaagctggagcccacagacccacatagggatctatcagtaaaattcaggagaatcatgtttttattttcactaatctctaactgaattttaacattttcttcaattatcaatgtagtatagcaatacttttttacttgtcttctttagaagtcagatatttctatatcactttatagttgttgcaggtatcttaaaatattattaaactcaccactacttcagaattatgacacttattagaccggccactagatactgttgtgttagtgaagaagacatgtattactatgccaagttttaaaaaatattttgataatgactttaatattattgggttttatagtaatcctaattattgtatacattttatgcttacctggcttctaaactgttttgcctgtttttacatttcatttaaatggaatcatacattgtatactctttgatttctagtttctttcagcattgttaatgagattcatctaagttcctgcctatagttgtgtcttgtagaatttggaaaagcatgacaagtgacgttaaattaattcctcttgtatgataccttgccctatgttgagaactgctactttaaagttgattaagtggtaattttctgtttttgatatagcctgaataaatacttttcataggtctgcatgtagtttggtttttagagcacactgtatgtattcagtgtgatagattttttttctcagattaaatttgcgactaaagcaaaataccactgtcaacaaagctatttccattttatgaactatatttttcttgttgaaaggcttggagaggggtaagttacactgttgtcctgagtttgaaatttctagctgagcttttgatttaggacaagaaaatctaaattattcttgtatctggggtctctcacttatgatttcagagaatctgatttactgaataaatttgttttcataatcttgctctaatgtagagctatagtttccagcttttggagaattattgaaagtgactagcctatttttatcagtaacatctccttgccattggacctgggtgtggtcaatgccaatgttattcagcaattataatgaaaactgtaaaatatctcttaaacaattattcaagcccttttgaatgtcagttatgattttgaaaatctgaagtgaatgccactgatactacagttcatcagaattgatttggaagaggggaggacttaaataatttaattctgatgatactaagaattggaagaaaggatgtgagctacatgttctgtttctgtgagtttactgatgggtggagttgtttttcttttgcttctcattcaagcagtataggatttgatgcaggtgtttgtgaatgagtatgttctgtaaggtcctggaatggtgttattagtatgtgacttttcaagcatctctttgaacttaagctggttattagattttattactactatcatttattttagcaatgttttataataatgaaagccattaatctacacattgtctaggaacaggctggaagtgaagagtacttggctatatcatagaaatatttcttggtaacactttggagtatatgtggcatcagttaaattttgaagatagaagcacattattttaaatatttcatgtgtacaagctttttttcttttgagacagggtcttgctctgtcatcgaggctggaacgcagtcatatcatctcagctcactgcaccctccacctcctgggctcaagcaatcctcccgcctcagcctcccaggtagctggggctacaggcgcacaccaccgtgcccagttaatttttgaagtttttttttttatagagacagggtctcactatgttgcccaggctggtctcaaactgctggactcaggcaatccacccgcctgagcctcccaaactgctgggattattggcgtgagccattgtgcctggcctgatttttaactaaaaggtttatacaactatttaatgatttttcatttagacattatcatttgattttctgctatggaatgtcaaaggaattttctgtggtctagttttgttgatgagaagtctcgtgctatttggattcttctttttgtgtagatgactttctagctctactcttacccccaaaagcttaaataaaatttaattgtagtacaaaaagcacataatacaacataaccatcttaaccatttttaagtgtacagttcctatcaggccatggttgctgcaaaaaagaaaaataagcatacactgcagtagtgttaagtatattcacattattgtgcaacaaatctccagaactttttcatcttgcaaaactgaaactctatgcccattaaacaacagcttcccctttccccttctacctccagtccatggtaactatcactctgctttctttttctatgaatttgactgttttagataccccatgtaagtggaatcatgtagtatttgtctttttgtgactgacatgttgtccatgttgtagcatgtgacggtatttgcttcactttttttaaggctgaagaataattcattctgtgtatatactacattttgtttatccattcgtttgtcattggacatttgggttgcttctacctcttggctgttatgcataatatgggtactacgatcatgggtgtacaaatagaaatgtctctttgagatcccactgtcatttttttggatacatacacagaagtggcattgctggatcatatggttgttttatttataattttttgaagaagcgccatactgcttccaaaagcttttaagtttcttttaattcttggccatctgaaagtccataatgatctgtctaaacatgggatctctcccctactctgcctctccgccaagcagtaggctttgagtctgagtatttgtatcttccctcagctctgaaaaattatttttgttttattgtttctttgataatttcatttcttctcaatttctggaatatttggtccagcattgcatttcctggattgaacctctgtgatgttcacctttactttttttttgaaatggagtcttgctctgtcgcccaggctggagtgcagtggtgcgatcttggctgactgcaagctccgcctcccgggttcacgccattctcctgcctcatcctccctagtagctgggacttacaggtgcccgccaccatgcccggctaactttttgtatttttattagagacggggtttcaccatgttagccaggatggtctcaatctcctgacctcgccatctgcccacctcggcctcccaaggtgctaggattacaggcgtgagacaccgcacccagccttcacctttaaattttttaatttgatacacagtccaggagattgctttggcttactttaactttcaaaaaccatcaagaatttttgggttttgtttgtttgtttgtttttaagaagggggatggattgaggcagtcatgtttaaatctgaaaagcagtttttttgtactatgttccatttgttaacatcctgttattctatggaagccagatgaagtatctttttgaatctgaggattctgatttctgatttaaaagaagaagtcttctttgatttagttttttccttctcttctcccagtgtttatcatggctttagtgctgctgagtttctttctttctttctttttttttttttttttttgagacagggtcttgctttgttgctcaggctggaatacaacagtacgatcatggctcactgcagcctcaacctcccaggcttaagcagtccacccatctcagcctcctgaattggctgggatcacaggcacgcgccagcatgactggttaattttttaatctttcgtagagttgggacttgctgtgttccctgggctggtcttcaactcctggcctcaagtgatcctcctgcctcagccttccaaagtgctaggattacaggcatgagccactatgcccagtttgcctgcctgcctgcctgctttccttccttccttccttccttctttccttccttccttccttccttctttccttccttccttccttccctccttccctccccttcccactcccctccccctccccctacctcctccccctcccgctcttttctttcttttactgggatcacatagcaacagaggaagcaagatagagaggggaggtgccaatttgggttttttgttgttgttgtttttcccccaagcacttcagccttgatcttctgggctaaggtaatcttcccacttcagtctcccrggtagctgggactacaggcatgccgccaccacacctggctaatctttttgtattttttatggagatgaggtttcaccatattgcccaggctggtcttgaactcctgggctcaagtagtccacctacttcagcctcccaaagtggtgggattacaggtgtgagccaccatgcccagccagctgcctttgtttcttcacatgcctcattatccttagctgtttatacttatccttaaatatgaatagagaattcatcttaagtttcttgagaaaagacagaacacttctgctttttgtctgtatgagaggagactggggtcgatggttctctataacttagtttcaccctcattcttacttgcaggcatgatcctattttactacatctgtgaacgtactatgagttctcaaactgtctaggattccctccgcagttctaacttgctaagctgctggtccttccattcttttttatttttatttatttattgattttcgagagcctctgttgccaggctggagtgcaatggcgcgatctcagctcactgcaacctctgcctgccaggttcaagcaattctcctgcctcagcctcccaagtagctgggattacaggtgcctgccaccacgcctggctaattttttgtatttttagtagagatggggtttcgccatgttggccaggctggtctcgaactcctgacctcagtttatccacctgccttggcctcccaaagtgctgggattacaggcatgagccactgtagcctgcccattgttttttattaatcactgcttctatctgctttatggcttccaaaggcttttgatatctctacccattgatggcatacctcttgcccccatttcctgctcttaatttttcattgcttcgtgttttacacctttttaaaatttttcctttactaacattttgatggcatgttgggagggattagagataaatggctttgttccacctgtcttgaactagaaacacttttatcatgtggattatatcgtgtgaatgtgaatgttttcattacaaaaatatttcacaaaagattaagctaccattgggcattgtggacagatcattatttgatactagtagagtggacagatcattatttgatactagtagagaaatttgagtttatttgattttttttttttttttttttgagaccgtcttgccctgttgcccaggctggagtgcaatggcccaatctcagctcactgcaacctctgcccccaggttcaagcaagtctcctgcctcagcctctcgagtagctgggactataggtgcccgccaccacatccagctagtttttttgtgtatttttagtagagatggagtttcaccatgttggccaggctggtctcaaactcttgaagtcacgtgatctgcccgtctcagcctcccaaagtgttgggattacaggcgtgagccactgtgcctggccaagtatatttgattttgagaaaatattgaaacttactctcatgtctttttttcctgtatcactttttgaagcttttctcccctttgcttgttcttactttttaaggcatttttttccatttcttttgaaagtaattttaaagaactctaaaaaaatttagtaggcagatacatttaaatgagttgatcttttatttgtaagcgttagaccaggcgtctgttaaaacagaagtgacatttattttggctaaacagtttctgttctacatatgtgtttacattgcattttcacactccataaattgaacagcgcaagtacccatatttttgttgactaagttttactgtaatatttatcaaggaaatgggtatttaatgaccatttaataataaaataaattgtacaattattgtgttgaaataagattttactgagacatgaactgttgttatatcagtgtgtgcagcttatttgaatagtcttgcagcatgaacatttttgcttcttaacataaggatccatgttctcatcactaagatttaacagacattaacattttgctgtttgcttcaaattgatctcagaggcatgttaaccaactttaaatattgccacttcactatttccctagaagtaagtactatcaagttggtcttagtagttttagtgtttatacaactcaagcatgtttttaaatacttttgccacatattcatgtatgtaaactaatctgttgctttgtaaattttatttgtttttgtttttgtttttttgacacggagtctcgttctgttgcccaggctggagtgcagtggagtgatctcggctcactgcaacctctgcatcccaggttcaagctattctcctgcctcagcctgccgaacagctgagattacaggtgcccgccactatgcctggttaatttttttctatttttagtagagatggggtttcaccatgttggccaggctggtgtcgaactcctgaccttatgattcgcctgcctcagcctcccaaagtgctgggattacaggcgtgagccaccgctcccagcttctgctttgtaagttttataactttgcataatggcatcacactgtatgtatcattttccagctactttgttttgatttactcatggtgatacaagttaatgtagtctatacttttaaattctgtagagatttacattgtatcagcattattgtatgcttctgcttgtatatatgtgaaaatttctctgggtggatactctataaccaacaattctccaggaaattatatgcatttttattctaccaaatatcactctggagatttctcatgctgtttgggttcctaattctttatgtgtgacttattttttccccttttttccctctgggaaatgttaggttttatctttatcaccagtgttttgaaatttcagttgctttttgtgtctctgtatgtgtgtgtggttggttctactttcagtcctgacacttagggtgtttagttctctttccttttcttgttctttctctaatagctgttagtttcaggactgatcctgcagctttcttagttttattctttactactttgagtctgtttggtttttgtgaaggggaggggtctgggggattttacttttgattttttttttttcagtttgattttctaaacttttattgacaattttctgtcattttaattatttttattttatgttatgttatgttatgttatggtattgtattgtattgtattgtattgtattgtattgtattgtattdagatggagtttcgctctgtcgcccaggctggagtgcagtggcacgatctcggctcactgcaacctccatctcctggattcaagcgattttcctgtctcagcctcccgagtagctgggattacagcccacaaaccatgcccggctaatttttgtattttcagtagagatggggtttcgccatgttggccagggtggtctcaaactcctgacctcaggtgatttgcctgcctcggcctcccaaagtactgggattacaggtgtgagtcactgtgcctggcctgtcatttttatttttaaaatgttttctttaacttgacattataatcttacatatgtattaggtataaaatgatgttataacatatgtatgcagtgtaaaatgattgaatcaagctaatgaacatatctatcaccttacataattattatttatttcacctgtctaaccacaactttctatcctttgaccaacatctccccattttgcaccaccctcccagcctctggtaactaccattctactctctgcttctatgagtttgattgttttagatgtcacatgcaagtgagaatatacaatatttgtctttctattcctggcttcttttacttagcataatatcctccaggttcatccatgttgttgtaaatgacagaatttccttctttttttaaggctgaacagtattccattgtgtatatatacaccacattttctttatccattcattcattgatggacacttaggttgattgcataacttggttttggtaaataatgccacagtgaacatgggagtgccgatacttcttccacatactgaattcagttccttagggttatatacccagaagtgggattgctggatcatatggtaattctggttttagttttttgaggaatagatagttgtccagaattactgtaataatttacataaccaccatcagtgtacaaaggttcacttttctccatatccttaccaatacctgttatcttttcctaatagccattctgacaggtgtgagatgatatgtcattgtgcctttaatttgcatttccctgatgattagtgaggttgagcattttttcacatatctattggccatttgtatgccattttaatttcaaaaagcacttttctttcctctgaatttttttattttgaaaaaaatttttttagagacatgttgtcactctgttacccaggctgaagtacagtggcccatcactacagtcttgaactcctgggctaaggcagtcctcccgctgtagcttccctagtagctaggactacatgtgcttgctactgtacccagctaattaaaattttttttcttttttttttttttttttttgagagacagagtctcgctccattgcccaggctggagtgcagtgctacgatctcagctcactgtaacctctgtctcycaggttcaagtgatcctgctgcytcagccccccagtagctgggattacaggcacgtgccaccatgcccggctaatttttgtaattttagtagagatggggttttaccgtgttggccaggctggtctcgaactcctgacgtaaggtgatccacccgcctcggcctcccacagtgctgggattacaggcgtgagccactgtgcccagcataaaaaatttttttttatagagacagagtctcactttgttgtccaggctggtctcgagctactggcctcaagcaatcctcctaccttgaactcccaaagccctggggttgcaggcatgaactactgcatcacccagcctggttttgtttatttgtttgtttgtttgtttgtttttaatatctttttggttcatgaatagaatacttttttatttctcttaaggatttttttttccctagtccttgcatggttttttccttctgattcctttttctttgtttgatttattttgcttttcatgttgtatgtttcctttcagtatctggtaatctttggatagctcctcatatttaagtgtaaccctgacagccttgacagggatgtcatttgataggcctcgctgtgggatgattgtggagaccaagcattttatggagtattcctgtgtgtaagtaatctgtgggtactttctctgggactagtgaatttcctcagagagcaatagagctgttgcctgcttgtggtttccttgatttctgggagttggtaaagaaggctgagcaggccgggcgtgttggctcatgcctgtaatcccagcactttgggaggccgaggcgggcggatcacgatgtcaggagatcgagaccttcctagctaacacggtgaaaccccgtctctactaaaaatagaaaaaattagccaggcgtggtggcgggcgcctgtagtcccagctacttgggaggctgaggcaggagaatggtgtgaacctgggaggcggagcttgcagtgagccgagatcgcgctactgcactccagcctgggcgacagaggaagactccatctcaaaaaaaagaagaaggctgagcaggctgagcatatcagcattcattatgcaaatttatagtttatatcactggttttctgtaaggcttcttgctctggtcctcagctaaatctgctgtctctaaacccagagtctctatagttcactctttgcaagatagacctccagtcttttgcttttttttttttttttttgagacggaatcttactctgtcacccaggctggagtgcggtggcgcaatcactgcagcctccacctctcaggttcaagtgatcttcctgcttcagcctcctaagtagctgggatgacaggcgcttgccaccacaccagggctaatttttgtatttttagtagagacagggtttcaccatattggccaggctgatctcaaactcctgacctcaggtgatctgcccgtctcggcctcccaaagtgctgggattacaggcgtgagccaccccacctggccttttctttctttctttttttttttttcaagagacagggactcactgtgtcgctcaggctagagtatagtggcatgatcatagttcactacagcctcaatctcttgggctcaagtgatcctcctgcctcagcctcccaagtagctggtgctgcaggcatacgccaccatgctaggctaatatttttccccaattttttttggtagagatagggtcttgctatgttgcccaggcggtcttgaactcctggcctccagtgatcctcccagctaggcgtcccaaagtgcttggattccaggcatgagccaccatgcccagcccagacatgtattaaaactaccaaacaggccaggtgtggtggctcacacctgtaattccagcacttttgatgtgggaggattgctggacgccaggagttcaaggctgcagtgggctatgattgtaccactgcactccaacatgggtgacagagcaagatcctgtctctaaaaataaaaaatacatgtctgcaacctatttagtaatcttctcctttgagtggtggggtctacgttcctttgtcttcaatctgaacaagacttagtgactttcttgtaaccaataatgcagcagaagtgacttctgagggtgggtcagaaaataccatgtagctctgcctgggaaaccaggtgacatgtaagaagcctgaccgtgttgaaatcctcaaactggagaggccacatacagaagatactccttgggacagtctcagctaaattcctagccagcatccctcatcagctgcctatcatgttaagtgagctttcaggtgaccttctccccagccagtatttgtatgcagtaatatgagaaaacccaagtgagaactgtccacttgaacccttacaattaatgagccaatactgatacattgttaactaaagcccataaagcccattctttatttgcattttcttagttttaacctaatgtcctttttctatccaagatcccattaaggatgtaccacgttacatttagtcatcatgtctccttaggcccctgttggctgtggcagtttctcaggctttccttgttttttatcgccttgaaaattttgaggagtactggtcagatattttgtaggatatccttctattggagtttctctaatgcttttcttatgattagactggggttattatggattttgttttggaggaagaccactgaggtaaagtgcctttctcattagattatgccaagaatataaaccgttgatgtcaagtttgattacctggctgaggtagtgtttgtcagatttctccactgtagagttattctmtccctcgttttcattttgtactttttgaaaagaaaataactgcccaatccacccttatggggtgggaagttgtgcttgacctatttgaaggtggaagatctacataaactgtctggcattcttctgcattaaaggtttgtctggtatccccattcatttacgtattcagtcctttatttttatcagcaaagactcatgaatgtttgtactatgggttataatccaatattacgttattttgttgctcagattgtttatccattaaaaaagaaaatgatctgtcatagaccaagagtggttataacatctcagaaatagaatcactggatcggaatttccaattattatataatcttggtatttttaggatacatttctaagccaccttagcatgtttggcaaaatcacaggtggagagattttccatagccagtctaccttgcttgtactacactgtacttggaatgacttaactgaggcttaccttttagttttcattttttaaataaacttttaatgttgaaataatttcagatttacagaaaagtttgcaaaggtagtacagagtcttccccatctaccccctacccagtttccactaacgttaactttttttttgagacagggtcttgctgtgtcacctgtcataccactggagtgcagtggtataatcagggctcactgcagcctcaacctcccaggctcaggagatctcccaccccagcctcctgagtaacccaggctacagccgtgcgccaccatgtctggctaatttttaattttttgtagaaatggagtctcattatgttgtccaggctgatctcgaactcctgggcccaagtgattctcctaccttggcctcccaaagtgttgagattacaggcatgagctaccacacttggccactaatgttaactttttgcatttactgtagtgcgtttatcaaaaactaaaaaaaactaacattactcttctgttaactaaactctagtctttggatttcaccagtttttctagtaattctgtttatctgtgtcagtatccagtcagggatatgacattgagttgccttttgagcccctgaacatttatataactattatttattttttaaaaggaagaaaaaagcttgcgatacattagccactgaagcccagagtttgagaatgcaagatttaggctagtcttaataggttcgatttctgattagccacttagttgtgttgtctggataccctaggtatcccagttttctcaaggtaaaatgagaatataaatagtgctaaccttactaagttgttattagaattaaatgatatagtgtatatcagtatcttagtgtagtgcctgacatatagaactcattaaaaaatgaggcattgttatcgctatttatgttacttttctagtcgaaagagcaacttactagccttcagaaacctttgggaaaaattttatccatgagcctgaagcatccctaacaccaccgcattttctttgataggaagcagatgggattgacagattgtgctgttcttaagccacgcttgccaatgtccatgtgccccctctaaaaaagtgtgccaagtgcagtaaggaggagaattttgaagtatttggtcgtcttttcttgaagttttatgattttttgtttgtttgtttttgagacggagtcttgctctgttgcccaggctagagtacagtggcacgatcccggctcaccacaacctctgcctcccaggttcaagcaattctcctgtctcagccccccgagtagctgggatcacaggcacccaccaccatgcccggccaatttttgtatttttaatagagacgaggtttcaccatgttgaccaggctggtctcaaactctttgcctcaagtgatccgcccgcctcagcctcccaaagtgttgggattacaggcatgagccaccgcacccagcctgaagattttttattaaaggtttccctgataattgtttgcttttttgatatttgtttttctaaagagtagaatttaaataagttaatgtttgtgaagcatttaagacagagcctaccacagaacaggcactacagaagtatttgcttgttccttggtccctcaaataagataaaagcgtaacataatgtgcctctgttacaaaaatgaaacgaaataataagaggtacgagggccattaactctctcagattacttccctggttgtctctgcaggggcttggtttcggaccagacctatgtgcagtctgccccatcatgctcttaagactgttgaagattcttacttttggtcatagggctggtaaaagtgcaggtagtgtctggcatttgtaattactagggaataaagggagaatgaattagtttaagcagttttttcactacgtattttgcagttgaaaatttcattacaatcacaagtatcccatatatggctactaggaagaaatggtcmtggccgggcgtggtggctcatgcctgtgatcctagcactttgggaggccgaggtgggcagatcacaaggtcaggagttcaagaccaatctggccaacatagtgaaaccccatctctactaaaaatacaaaaaattagctgggtatggtggcgcgtgcctgtaaccccagctacccgggaggctgaggcaggagagtggtgtgaacctgggaggcggaggttgcagtgagccgagattgtgccgttgcactccagcctgggcgataaagcgagattccatctcaaaaaaaaaaaagagccgggtgtggtggcacgtgcctgtagatctcaaaaaaaaaaaaaataaaaawaaaaaaaaaaaaaattgagccaggtatggtggcacgtgcctgtagtcccagctacttgggtggctgaagcaggagaatggcttgtgaacctgggaggcagaggttacagtgagatggcaccattcaacagagtgagactgtatcccctcaccccccaaaaaagaaagaaaagtgatttagtaaatacagccaacaattctgtttcatttgcatttaagtatcttttaaagttgcctttcagatgaaatagcctatacaagcaagcatataaaaatgtacttagaactaggctttaaaatcattgtatcacagagaattaaaccagcatgttcaaaagtaatcaagcatattctgttacattgctctcagtacaaaatatgacattctactgatagaatgaaaaataatttttacatgattttaatcttatcctttcaggactctttttctataaatacatttgtaatttattaatacagtatcacatataacccaggaaaattataaaactggtatgtaacttataaatatttacatatatatatcgagtggttcatcagatttttttaaatggsgatatgtaattttattgtaaagttcaataatgatcatacctggaaaaaatctcacaaagatacgtagacccaaatggaggtaaattgatctagaccagtgtctctcaaaactttaaatcaccagcatgcttttttgatgattccatctaagatctattgaaaaaaatccttaggtgtgggaatagggctatggagtctgcattttgagcagatataacagcaaacattttatggtgtttattgtgttttaagtgctgttttaagcactttacattgactcattcttcacagcagccctatgaggtataggtacaggtgactaagaaatttgcccaaggtcacctagttagagtgtagggttagcattgtatgtagaaaacataccagagaattcttttgcatacttttgggaaccattactctaagtctaatctaagtcatttgaaattgggaaagctttattctataaaatagtaaagttgggtaggcggggagagggtgatgcatagtagtactttccaattctaaggattttaagtctttgtcagtcaacactgggtagctacttcatggattttaagttcagcaaagtgaagtccattttttagcaccatgttaaaggtatgtttttaacagaatcraagtaatgataaggttttcagttttatagatatatagtaaaagtgataaaaccaaatgtgtgtagaatggagatttttatgttttaattgaattttggggttgtctttaggttcactgggaggagaaatcttgatttcaatacttgcttttgaaagtcttctaaagtatattagtataccttcctaccttgatttattgaacaagatgactcactgttttgaatattctcattgtccagtcttctgtaaacttacatgtcgaaccctagactcaccttgtaaattaaatcagaatgaaattattaatgaagttttatttcttgttttttcctttctcctagaacagtggtctcaacgtggctgcacatacaagtcaccagagaggcttttaaaagatgatatctgtgtcccatccctagggattctgatttaattggtctgattattcttacgcgctagggctgagaaaccactgttytgtaggatgtaggggaggaaatttcttgggcttttgttgttgctcccgtaaattaggataatactaaaaaaaatacttgagstargagttactagactatagagggaatattgtacatacattttctgtcaaatttaaacatttaacacctgcattttttatttcagatttattgctraacatgggtgcatttttggataaacccaaaactgaaaaacataatgctcatggtgctgggaatggtttacgttatggcctgagcagcatgcaaggatggagagtggaaatggaagatgcacacacagctgttgtaggtattcctcacggcttggaagactggtcattttttgcagtttatgatggtcatgctggatcccgagtggcaaattactgctcaacacatttattagaacacatcactactaacgaagactttagggcagctggaaaatcaggatctgctcttgagctttcagtggaaaatgttaagaatggtatcagaactggatttttgaaaattgatgaatacatgcgtaacttttcagacctcagaaacgggatggacaggagtggttcaactgcagtgggagttatgatttcacctaagcatatctactttatcaactgtggtgattcacgtgctgttctgtrtaggaatggasaagtctgcttttctacccaggatcacaaaccttgcaatccaagggaaaaggagcgaatccaaaatgcaggaggcagcgtgatgatacaacgtgttaatggttcattagcagtatctcgtgctctgggggactatgattacaagtgtgttgatggcaagggcccaacagaacaacttgtttctccagagcctgaggtttatgaaattttaagagcagaagaggatgaatttatcatcttggcttgtgatgggatctgggatgttatgagtaatgaggagctctgtgaatatgttaaatctaggcttgaggtatctgatgacctggaaaatgtgtgcaattgggtagtggacacttgtttacacaaggtatgtaaacttttttgtcattaaaataacatgttaattttgaaaagttacggtaggtaaagttaagctaacttaaaattttaaaacttttaatattttcacagaagctgtatattttgaagtactttaccagaaatgaaaccattgttttctttgccatccttgtttgtcccagccttctaatttgaaaattaagcttgataaatttgaggcatttgttgtcatttaagtacttcatagcttgttgctgtagcaaaagcatttacacagagtgactttttcttgacattggcagtaaccatcttatgcctgattatgaagcagcttgataaaatatgtatatagtagaattctgtactagatattactaaaagatcaagagccatgtgaaatattggaagatgtactagatgcctagcctgtataaaatttagtcctgagcctcctagcagtgaagacaaaaactgaaataaaaatatgggttgtatatttctcattgtcttctaaaagcagctcttatctggcaatacaatctaaaaaggatttacatgtggctctctaagtaatacatgacttggatagtatcttttgtagaagataaaattcttttcatatagatgtttttattatttctgattaaaaaccaaaggcttctataaaacataatcttgtgaaaaattcctgtggaacactaaagtttatttagatttgtaattttgtatgaatcattgcttgatacagtaatagaaaaaaagtccagagtaatagataattggcaatcctttgaatatctttaaaatactcagttgtttcaagtgggtttttgacagcatctatatataattcaattaaaatttgagttatctggccagtgtctggagtgtgtaagtatttgactgaaaagataccaaggtaaaactgacctttagttacatgaaataaataaagggtttgacttatttattctgtctagattagaaccactgtatctccctactccaaaatgtactgtggaaggtatgggcataaccagaaagtttttcagaaaggatctctgggtctctggaaatgcccagattttggttaaataccgatttctttttaatagaatggaaagaggcagttttaaaaacagaagatttaaaggccgttcttgtcagtggacagcctttttctgaaaggattttaatgatggtacctctagctcctctgatttttatttttaacacactgtatctttttacttctggatgagttaagtaaagaagtattgatggttgtcagtgatcaaatagtaagtgggtctaaaattatgtatttgtctttgaactctaaatgaagcaattctgacctgtagatttttgagacaagcataggcatatgtttgttgcctgactagctaatgaaaacagcattttccccaattataaaaaaaaggtatatacttactattggaaaaaaaatccagatgatgaagaaaatatagagaaacacccaaaattttgccatccaccctaagtcagctactttcattgttgtggtgtatattgttccagtcttttctgcctgcctgtgagtgtgtgtatttttataaaaccgagatgattatacttgttattctacagcctgccttttccaacaatatattgtagagagatctccatgcctataagtattgatctgtatcatttttcttggctgcgtagtattttattgaaagaatgaggttgtgagggaatagccaaaaaatctattaggtctgtaatttggactaaggaaagaagtttgtgttagtagattaactcacttatccattgaaaggatgctagtttttgagaattttgactcgacccttctgaatgaggtttaaatatttctggtggtatatcttcacttgctagcttttatcaatttagagtgattaaatgttcatgttgatggtgttaaaagattctagatggcatcctagaatctcagaaatgaggaatgataataacagacaagaagttggggcccatgattcattcaatgttaatggaagctgaccatcatagttccttctaatggagctgcattcaaattgaaatcagtttggaggtttgaattgaaacaaaacagacttaaaattatttttgaacctttgaaagttacttatggaaaccttcatttctgtttaacttcgtaattttgtctttccatttatttgtattgtaaaagcaagggttagcaataagatcaaatataattactttgaatttactcagaaaaattgtaagttaaaaattcatggaaagcacttagcgattgcacagtagttacctgctgtaagaggagaggaaacattaataagtagatgtttccctgataagagatttaaatgaagtcctagttttttctaacacctccatcacttgtcatactttcataatttataagcacttttatcttaactcattaaatcttgggaggttatcataatcataatcgtggtagtattagtaaattattgctttctgtaagccaaacactattctaaatactttacatattttaactcatgtaattttcacaaccatatgaggtagttaagatgacgaggtcaggagatcgagaccatcctggctaacgcagtgaaaccccgtctctattaaaaaatagaaaaaatcggccgggcgttgtggtgggcgcttgtagtcccagctactcaggaggctgaggcaggagaatgacttgaacccgggaggcagagcttgcagtgagccgagatcacgccactgcactccagtctgggtgacagagcgagactccgtctcaaaaaaaaaaaaaaaaaaaaaaaaaagataagcatttttcagggttgccagttaatattaatctgtaagtgttgtatgactgtggtcaggtattatcctatttaaattaggtatttaactcgaggggagaatgggagctaagaaagcaaccctcccattttatttgcaatgctggcatttatggtgtttactgccaactaatttcgggttgcttaaaatatgtaactgccacgtgcatagcttttcataacttgtaaatgatacatacttattaatcctcatagtaactttctgaggtgaacaaaataaaaagtttttttaatttgcaagtaaggaaatggaggttgtttgatattaaaagatatccataagtcatatacttggtgagtattgaggctgagactagttttctgactcaagtttagtatttttgttaacaatatttcccagaagggcctgataaaataaagaagagtgggtgtgggtgtgggtgtgggtgtgtgtgtgtgtgtgtgtgtgtgtaagtgtctgtctgtttcggttttcatggtctgagaaatttttccccaagggaaacattaagactaaattttttttgtaacaaatacagagatgtttgaagtaaagtgattccccttgatgtttctgctttccagtctcatctcacttagggaaccactgctcatggtttgctgtatatctttccaaatggttctctgtgattattgatagaaatgtataaacgtaaaataggattttttctttttttgtattttatagaaaaagatcatgctatgtttgttactttgtcacctgttttgtttttcttaaattataaaagtcggtattcttttaaattgttcttttaaaacattatttgattttccaaaatttcatttatataccatctaccagaagcctatttattttaaaacatgagatagtacctcatagttggataaaattgagggaaattatcattttccaaaggcaacatcattctatattaatttatataacatagaaaatgtaaccccctcaataattgtttagttctaaactcaggagaattgcttgaacctgggatgcagaggttgcagtgagctgagatcgcgccattgcactccagcctgggcgacagagtgagactccgtgtcaaaaaaacaaaaacaaacaaaaaactgtatcagattgttttctgtttaagtttagatgcccttatttatggcaggggcactggcgtctttgatctggtactatgattattaagagtgttaactgctgtgctgttgtaaaaagtaaaaagaacatgtaataatcaatttttatatgcagagctaatttctttagttatccaaactggatttagaaaaaaaaatgttttatttatggacttagtgaaaactttatactgattatacaaggatgttttgtctctaaaaaacaatggcacaaaggaaaggaccttttctgttgctgtataacagctactgaaacatattcatacttggtgtttaggggaaagccatctttacatagaaatagaagcaagccaggcaaggtggctaagaagcaacatcactgaaatcacacatgcctgagatgtaaatataaattatttcccttaaatgtctttggagaaccataaatttattggaactctctttcaattaattttccaaaagtatttatattttataacttacaaaaatcgaatggaaattagataaggaaatgttccacaatgctcatgttgttgttaccaaaaactcaaaagggttaaaagaaattagatttctaaaagtgtaaggtgttaattccgtttatgcataaaattgctttataaagtgtaattatgcttgattctttttttgttgttgtgttttagaaagggtgtctcactgtgttgcccgggctagtctcaaactcctggccttaaatgatcctcctgcctcagcctcccaaactgcggggattacaggcagccaccatgcccagctgtttgattcttgaatatccatggtgtactttaaaattatttttaattaaaaatttttgcttgaactgcccttatgacatttatacaagtatattcatataaccaaacacatacagtatttctaatataaaagttttggtgggtttcattaaggaatgaattaatttggccaatttggaaatggtttttccagataaccgggaatctaatgaaatactcaagttggttccttgttccaaagcacaacaatctgtgacaagttaatttattttgaagtcttctgaagacccaaccttcactgccttcaaactttactcccattgaattaggaggtgaaggcagaagttattcaaggccacctgtcttttgggctgtgtcatgtaggttctgaaaggcataagtctgaaccgagccatgcctgcctagattctagtcataataactgaaaagactagaaagggtgtggtcttggtttctttcacttgagttggcaaatttggcaaacactatcagacaaaatagcctaccacctccactgactttgttttttagagtgaacagaaaaagaaagtttgaaaaaaatcgttattccaagaacagtttcatctgctcctgctcttagaaactcagttaaagtaatatacctttagaaaaagtaatgagaacgtatttttaattgattgcacataatctcatggtactagagtagtatatatgatatgctttttttttttttgagagagagtcttgctctgttgcccaggctagagtgcagtggtgtcatcacggctcactgcaatctccacttcccaggcttaagcgatccttccaccttagcctcccgagtagctgggacctgggactacaggtgtgtgccactaagcccagttaatttttgtgttttttgaagagacaaggttttgccatgatgcccaggctggtctggaactcttgggctaaaatagtctgctcaccgaggcctcccgaagtgctgggattatagccatgagtcacagtgcctggctttatgctttttttttttttttttttggagacagtctcactctgttgcccaggctggagtacagtggtgcaatctcagctcactgcaacctccacctcccgggttcaagtgattctcctgcctcagcctcctgagtagctggtattacaggtgcgcgccaccacgcctggataatttttgtatatttgtgtagagatggggtttcaccatgttagtcaggctggtcttgaacccctcaccttgtgatctgccctcctcagcctcccaaagtgctgggattacaggcgtgagccaccgtgcccagtgtatgcttcctttttaacataggtaatttgtgatggtgtggttaaaagggagaaataaaatatgtccttaaattagctattttagccactttataaagattctgaaactacttgcgactatatagcaatctgatgtcttttcttttaaaagttatcacatgactacagttggatctcagttgtccagttacagtcccccctgttactgtgccctctgaatagtttcttgtattaatagttgtggggctgggcgcggtggctcatgcctataatcccagcactttgggaggctgaggtgggtggatcacctgaggtcagaagttcaagaccagcctggtcaacatggtgaaaccccatctctactaaatataaaaaaattagccgggcctggtggccgtcacctgtaatgccagctactcaggaggctgaggcaggagaattgcttgaacctgggaggcggaggttgcagtgagccaagattgcgccattgtgctccagcctgggcaacaagagcgaaactttgtctcaaatagtaataataataattgtttagtttagtattttgggtattctgccgaataacaattttcagctatgttaaattcatggagtcgtagcattgctctgaggcagtttaaaagctaagctggaaaacatttgcatatgtgtttgggaggatccattgtggacttaagccagtttgggaatagacaatcttgagtgggaaatagtttagaagatttaatatgtattgaagatatcttcatttctcagactggaatggctgtgggtaataatagttcaccagaattaaaaatacagaaatgcttacagatatacccatacctagacaccttgtttcttcaagttgtgtttttagtaattcattggaataaaaatgaatgtgttaaacataaacgttctggatgattaaataaactataattgcttaaagtattttgaagtaaataatagttgattgtagaaatacaattttttttsttttttttctttaatacacagggaagtcgagataacatgagtattgtactagtttgcttttcaaatgctcccaaggtctcagatgaagcggtgaaaaaagattcagagttggataagcacttggaatcacgggttgaaggtaagacaaatgctttttaaaaatatagacaggccaggcacggtagctcatgcctgtaatcctagcacttttgtcgcctgggcgacacaccaaggctctgtctcaaaaaaaaaaaaatttagagagggaaagtattctttttgtttatcaaatgattattttaaaatttcctggtcaggcgcagtggctcacacctgtaatcccagcactttggcaggctgaggcgggcagatcatgaggtcagatcgacaccatcctggctacacggtgaaaccccgtctctgctaaaaatacagaaaattagccgggcatggtggcacacacctgtagtcccagctactcgggaggctgaggcaggagcattgcttgaatctgggaggtggaggttgcagtgagccgagattgcaccactgcactccagcctgggcaacagagtgagactccgtctccaaaaaaaaaaaaaaaaaattccataggacaaacaagtatttcaaaacaagtccttgaaaaaacacatctatctgtctaaaatttactgtcttggaccaatttctggggattgattgacagggagaagacaaatatgtctgtttcaccaccaaagagaaacataatttgaaggtagttcgttagagcttgctggtttattttttctttctttttctttccctgcgtacattcctagtagtaagtggagaatccagtgaaatttcccctaacagtgtcatgaaaacaagtactcttaattccgctaatactaattctcccttttcgggttaattatcattggaattcattacggtatcctttcccttttattgatagagttaacattagtgtttcaaaagattattttacatatttttttaaacttcatttggcaataaatttttttttttttttttttgagatagggtcttgctctgttgcmtaggctggagtacagtggcatgatctcggctcactacagcctcaactccctgggctcaagtgatcctctcacctcagcctctcccaagtagctggaactacaggcacgtgccaccacagctggctagttttctttattttttgtaaagatgaggtctcactgtgttgcccagggtggtctcaaactcctggactcaagcagtcctcccacattggcctaccaaagtgctgggattacaggcatgagccagcacagccagcctaataattttaaacatacagaaaagttgcagaagtattacaggatctcccatgtacatgtagtgtcctttacctagattccttatttgtttatgtaataccacgtttggcttatctctatatatactttctgtaacattctcattttctgtctccctccttccttccttccctctccacctctctctcctcttattcccctgccccccatattactaacctttttcctgagccaaatcaattgaaagttgcaaatatgatatatcagtactacttaataaaacgaagattacatgacactacataactgtagtatatccataaaaattaggaaattgacccagcacggtggctcacacctataatcccagcactttgggaggctgaggtgcacggctcacgaggtcaagagttggagaccagcctggccaacatggtgaaatcccatctgtactaaaaatacaaaaattagtcgggcgtggtggcaggtgcctgtaatcccagctactccggaggctgaggcgggagaactgcttgaacctggaaggtggagattgcagtgagccgagatcatgccactgtactctatcctggatgacagagcaagactccatctcgggaaaaaaaaattaagaaattaacgttgatacaatattactttgtaatccacagatcccatttaaatttccctaattatcccagtaatgtcatatgtaggtccaggatgcagtctagagcatgtgtgctgcatttagctgtcatgcctctttagtctccctcaatggaaaaagttccatagtcttttttatttctgttgaccttgacatttttcaagagtacaggtttgtggaatgtgcagcttgggttggctgatgtttcctcttgataagatttaggttatacattggcaggaatactgtggaagtgattctagattcttctcagtgcatcacaatcagggaggcatgtgatgttgatttataatgttaacatcttttgtgacttgcttgggttgttgtctttcaggttacttaattaataattatgttatacctaataagtatttaataaatatgttatacttattcataagtattctatggggaggcactttgagattgttaataacctattgctcattaagattttagcagatagttttagcatccatttgcgatttttgcctgaagaatgatagccaactggtgattttctgattctgtcttttttttttttttttttttttttatgatggagtttcgctgttgttgcccaggctggagtgcaatggcatgatcttggcttaccgcagtctctgcctccggggttcaagtgattctcctgcctcacccttctgagtagctgggattacaggcatgtgccaccacacccggccaattttgtatgtttagtagagagggggtttctccatgttggtcaggctgatctcgaactttctgacctcaggtgatccgcccgccttggcctcccaaagtgctgggattacaggcgtgaatcaccgcgcctggtttagtcattctttttatatgtattagcattttactgcaaggaaaaatgttcttttctgcctgtttgtttatatgagcacagactcacggattcctgttctattcattgtattatcaactgtttcaggcaatgagagcctcttaaaacttgttgtagcgtctttttgtcctgcctgcagctatacagtactacaggatttattatagttttctcccttttcatatttataactctcttctacagaaagaaacctgtcctctactgtcaacccaacaaatctgtcacggctaactctcatgcatatgccttcctcactccaaattgcccatcccagttcaccctatagccatcctaaagctatgcttactgtggttaggcatgaatatcccattctggatcaatttgtggccactatttccccctccactccctgaaagatttgttttgcttagctaagcaaatccaatcgtgttggacaaaattattcaggaacatgagaagggagaagctagtctgtttatctttaacataattgctgatatgtttgagtttaaatctgccgtctttcgtgtttcatctatttttttttatcctccattcttgccttcttttagatgtattccagttcatcctaggatttgcttattagttacacattctttaaaaaattccrtttagtaggccagtcatggtggctcacgcctgtaatcccagcactttgggagaccgaggcgggcagatcacgaggtctggagattgagaccatcctggctaacacggtgaaaacctgtaactactaaaaatacaaaaagaaattagctgggcgtggtggtgggcgcctgtagwcccagctactcaggaggctgaggcaggagaatggtgtgaacctgggaggtggagcttgcagtgagccaagatcctgccactgcactccaggctgggcgacagagcaagactccgtttccaaaaaaaaaaaaaaaaaaaattccatttagtaaaaaggaaaaaatttagtggttaccctgagaaaatgaaaatttttcagtcttaaggccctttttttttttttttttcttttccactttcaaccctgagaagctaagtatcataatcttaatataaccttttggttttatatatgctgtttttaagatatgaaattactttttataaagttagattgtcaatcttttttcttttctttgtgggaggactttgatatcataccaagctcttccactcaaggttacatagttacctgtattttctcctaacacttttatgttttgattcttttttttttttttggagaaaatacatttgaatgatataacttacgatgatggtataatagttygttgaatttggccattttgtatatagtataatagctttgttgaatttggtcattttgtatatagtaggccacagtaattggtgagagttttgaagtgtgaagatgtgtgatttctaatatgtaattacaattaaaagtataaaaccaagaagagagtcttttgcaaatttggagaatggggatttatcttttctgtctctacaactatctagctatgcaccctaaacaatgtgcttaaagttttttttgcacctacaatttcctcagccctaaattaatcttgtttttaggtctcaatgcttttgagtytcaatgagtcctgctttgagggtgatgaaaacgtgagaaacatgtaagaacacattgaagattatgtcagatgcggtcatattcctattgataatatcattaagaggagctgtttttataggagttaatatttaatgataaattgtagtatattggggttgcagattgctgactatagtttatcagaaggtgggaggaattctcttagtttccttcttcctcattcataaagaaactgggtagtttttattttaggaagagctctctagtttggtcagctggctgttatgtgaacttatccaacttgcttaacccctcaaggcaccagtttctttattggaaactaaagataaaaacaccaaccatagagttttttgttttttgagacagagtctcgcactgtcacccaggctggaatgcagtggcgcgatctcggctcactgcaagcttagctgcccgggttcacaccattcttctgcctcagcctccgaagtagctgggactacagatgcccgccaccatgcctggctaattttttgtatttttagtagagatggggtttcactgtattagctcaatctcgtgacctcgtgatctgcccgcctcggcctcccaaagtgctgggattacaggcgtgagccactgcgcccgaccccatagagtttttttttttcttaaataaattgttacaaaaaaagcttattgatgacacttgttaaagatggtaaggcagatattttttcgggggtggggggggcatggcagtagatatagggaccactatgatagaatcttgcagtggcagaaagaaattaaactcaacttggggtcccataaagataagtggaatttataactaaggagctgagtgcttgaagggagtgtcagtggatggaaaattattactaagaggaagcatcaacataaggggtttctggctaaactgacttgatagcatggcaggccaggctaaaatatccagagtggtcctatatcaagtgtgtgggggttttcagtaaactgactgagcaggattctcattcagcctggtttctacaaggacagagagggagcctaaagttctcctagtcagaaagaactcaagagtcttgctgaaggtttggtccaagcaaagagtttttgtcaaaataaatgagaattatgtttgttaagcacctattatggtgcctagcacgtaagtcctcagcaaactgtaactttatatgaactcttaacttctgtaatagccacattttaatttcttaaaggtgtggtcaattcagtttaacatgagttaataatttaatattaattttcttctgcatagttagtaactttctaaagtatatattatataggagagataacaaatatgtaatatgatctctagggcctgtagcaaatagttattattaatcaggagacaaaattgttagctaggcagccactacaaatcaatttaagttggtacttaaaatgtaacttcacagtagcttacacctataattcttgggatgccgaggcagaaggattgcttgagactaggagttcaagaccagcctcggcatcatagagctacaaaaaagttttaaagattagctgagcatggtggtgcacacctgtagttccagctacttgaagactgaagcaggaggatcacttgagtccaggagtttggtgttacagtgagctatgatggcaccactgcactccagcctgggccacagagtaagaacatgtctttaagaaaaaaaaaaaagtaactttttatttgtaaagcagtgttcttcaggagcattatgtttcttctggggttttaaatcatgtaatatgacattaaattttgtggtaaatacattctggtgtacttggtaaatctgtgtgtatgcttttaatgatgactggtcaggtgggaaaggaataatattaaaataaacagggaatagtagttcacctgaattgatgaattatatatttaatgattgctttctacatacaggtttactcagtgtttattgaacatgtgtcactgaggatatagcagaaaaagaaatctcatagaatttgtattctagtaaaaacctatttttttttaatagagaaataaaatagagtaagtagagagcaacaaggaatattggttagaaatgtctctgtgaggaaggatgtttgagcagccgtgcttggagagagaatatctgagggaagaacattccaggcaatgasaacagcaaagactaggagggaatgttcttagtgagtgcagctgggttagaataagccagtagaaaactagaggaaaattaagaggtttgtaggaggcatatcatgtgaggactttggactttgacttgtgggaattcattggaagattttgagtacaagagtgatttgttcttttttccaaaggatctctcttagttgctgtatggagaagagattgtataaaagggacaagagaagccaaaataccgattagaaattatgcattaatgcatggtagtggtaaattggactagagtagaggggtgtaaaaatgtctggtgacatttttggtgtcatagctgagggggtgccactggcatctagtgaatggaggccagggatgctgcttaatattccacagcacacaggacagcccccacaacaaaaaaattgtctggtgtaaaatgtcggtgttgttgatgttgagaagccttatactataagacacagatttaaggtagaaaacttacagtcctgctttcatgaagcttgcagtctatgacccaataaacatcgtgtatgtgggagtatatagcattatggtatacagtacatgtcatgcatatgggagtgtattgcagtgtacctactcagacttaggtcagagaaggatttgagaatgtgacatataaaattgaaacctcaaggatgaaaataggcattcatagctgggcgtggtggctcaggcctctaatcccagcattttgagaggctgaggtgggtggatcacgaggtcaggaattcaagaccagcctggccaacatggtgaaaccccatctctactaaaatacaaaaattagctgggtgtggtggcacatgcctgtaatcccagctacttgggaggctgaggcaggagaatcgcttgaaccagggagtcagaggttgcagtgagctgagatagtgccactgcactccagtgtctcaaaaaaaaaaaaagggacattcaccatacagaggggttggattagagtgaaaagtgttcccaaaccaacgaaaagagtatgtgaagatctagaagtagaagtctttgaatggatcctttggagatgagggaggcgggcagagttgaaagagtagtggaagtcaacgtaagggtcttgtgaggcatggtaaacagttgttttgaaagtaaggcctgggctgggtgtggtggctcatgcctgtaatcccagcactttgggaggccgaggtgggtggatcacctgaggttgggagtttgagatcagcctgaccaacatggagaaaccccatctctactaaaaatacaaaattagccaggcatggtagcacatgcctgtaatcccagctactcgggaggctgaggcaggagaattgcttgaacccaggaggcagaggttgcagtgagccaagatcacgccattgcactccagcctgggcaacaagagtgaaactccgtctcaaaaaaaaaaaaaaagctgtagaatgtaactatttcaggtaagtatcaacttgtaaaaatgatttttaatttctcccctttttcttataattcttatctagctaaacttttattatcctttagtaatggcattcataacttttatattgtttttacttaatattagatcagaagtatttttccatatagctgttactgtattcatcaagacacctatttcgtaatttttagtgattataaaccatttcactcaatggctacaccaaagtttttaactgtcctcttgttggtgaacatttagtttgttccagtttttgctttttatgaataatgctggaatgaacatacatatgcaaataactgttttttcttttttccccctgcatagcaatgtttcagtcaataagtagctttttgtattacttcttaaaaattttttgtgtgttgatggtaatttttttwaatatattttaaaataggtactaccaaatagtatctcttgtttcacttcttggtgagtactggcttatcacattaatttaggaactttttttaaaaaacctacagagattatggagaagtctggcgaggaaggaatgcctgatcttgcccatgtcatgcgcatcttgtctgcagaaaatatcccaaatttgcctcctgggggaggtcttgctggcaagtaagtagaacaaaaagctaattttgagttcgttcataattagtaattaaataatttggggtaaaaaaacttaaatcagaagtacatcaattatctagaggtgaaatgggttagtgtttcttatactagagaagaactcttaaaacttcaaccaaaaacgattttttaaaaggaattatctatcatactctttgagtatgaaggtccttctttccttgctaaggagtacaaatggattgtgcaaaatcagattctgagagtaaagtgtagaaggtatgttcttgacaagtatagagtgtaccagttacttttttagtgtggtcaggatgaaatattgagatattcacaagcttaaaattctgtgtaatttaataaaactaaagcatgttttttttttttaggcgtaatgttattgaagctgtttatagtagactgaatccacatagagaaagtgatggggtaagttttrttttatttcataagcatttgaagtaatttcacaatataaatactaaatatgaatacattcacattaacgaagtctataataaattatagtctgtagtaaattactactgcttttcattttaaagtgtcagttaaagtttaagaaaatgtattgaaatgaaggtagagataaaattttgttttgtagatagttttgttgtcactttctgggcatcaaatgaccttttttgtttgggctgtctttatttcttctctatatgtctgcttttccttcttctcctttaaaccttaattttgaggcaagaatgctcttttaaatatctcaatttctcctccagcaggctgctgccatcaccagaagttagtgatagtgagtgagttgttattttaataactagacctttcagtacccctgtatgcccacttggaatacccgaggatagtttttttctaatattattgttgtattatgggtacatgagtgttgagctgagataaccatttctgttgtaccttgctgtacttcatcagagcaagactctatgcccttaccttttattttgcttttcttcgaaatgtcagtgagctgccagctgcccctctatattgttttgttttgttttagtactattaccaggagacagaagtgtcctttttttttttttaaatccaagttagttcaaataagtatttttctcttgggttttcaagtttttatgtctaaaaataaattatttaatttttaatatatatgcttcaaagctttaagggaaccaaacagaaatgaaactgattgggaggaagagcccacctccagtctccagctcctcttggcagattgagagagagagtatccattggctagaaatcatatgtcatctcaattgcattatttgctaggattcattgttgcacagcaatataatatgatttcttttccttaacagtaaaagttatcctggcaaaaaggaaaatttaataattaatataattttagtgagtcatataaaagtgatgctatatattgctaattataatttatatcttggtctagagcagtgattctgagtctttttttgtggcaggttcctcaaagtattaagaattgtacccaaggccgggcacggtggctcatgcctgtaatcccagcagtttgggaggccgaggcgggcggatcacctgaggttgggagttcgagaccagcctgaccaacatggagaaaccccgtctctactaaacatacgawattaactgggcatggtggcgcatgtctgtaatcccagctactcgggaggctgaggcaggagaatcgcttgaacccgggaggcggaggttgtggtgagccgagatcatgccattgcactccaccctgggcaacaagagcgaaactccgtctcaaaaaaaaaaaaaaattgacccaaagctgagaaaattaatttaaaaatccaaatattttatgtgatccatcagagaaccctcaaagaaatgagtataggatgttgacatatgactaaaaggatggtggtaatttggaaggttgagagaagagaatcttaactcttcagctagattatagattcttcagggcatccactaccttgattagaggaaataagccctcagaagacagttattgattcattattagccatagaagtactcccatttcctcaggtgtttcaaagtgtcaaccctcatgtgtaatctttaaaaatacatatatatatatatatataccttgctggattttggggtccttcatagtctatttttactccaaacaaggttttctgtttaacatataccaaggataacttttaaattttttaaaaagaaaaaatgattacacatagtagctacataaacagggaataaataggcaacggaactatgaaactggggggaaatgctcaatatataaaccttaccttaaatagattattatttggctatagaaatgggatatatgtacttaattacctttatacataaatgttctatcaacatcagcagatcaaacactgacagtgtgttgtatagtggattcacagagggagaagactagaaaacgtaagacgtgaccccacctgtgtgtctagtgcagcttacactgtagttataaacacaccttaaatgatcamaatatttcgtatagcttggtaacaaataaatgacaaaatccagaatgtgaccattgccatgtgacttggacagtgattgctgtaaaagttcagctgcttaagcagggggaaagtcagcttcttagagaaaagatagkatttgaagaatgatttgaatggtagaaatgacatgaggatgatgacctttcaagtggactagagaggcaaggacaaagtataagatatcttcaaaagaaaggacatcttttttggctaaagcagagaactgttgtggtgaaaaataagaatttaggttgcagaggtacttgctaagagaccagccttttgaacatcattttagggtaatggaccaccttatgtttagagcataagaatgatagattcaaaaaaatatctgtggtattttaatctgttagaaacatttaccatattagattaaagagatgcaggcagtcaggtagttgtgaaataattacagagaccaaatggtaactgtagacttattatcattacatagatatgtggattaaaggaactttccttgtttactgtgaaaactgactttacagcctagaattttaaatggggaaatattatatgcctttcacaataatcactaacttagaaaaatgttgaactataattgcaagtagcagaaatgtgctgaaaaataccgcagaaggagagagaatgaagaaaatacagacgtgattaaattctgagctcttaacttgacccactgtagcaaaaagctagccgcaaaggtgctccataaatgcttcttaacagtgtggatgatgtcgccrggagctggatgttaacttgcggggtgggaaagatgaaagtatgctagaattacagaagaggagaaagttggaaggtattataaaaattaagtttttttaaataacaaaaattatttttgtttagatatttaaacaaagaattctagccagagttaaatcagagggtttctttagactcctgaatgtctgctttatgtcggagagaattgttctgttgtaaatgattataagtagtaccactagaaatagggattcattcatttttcttataattaagacatcttttaaataaatatttttcagaaagtagagttgagtataagtcataaattaagtaattttaatatatattcagaaaggttactatttaggggaaacttcttaagttctttactaaatttgttttttagtatgtgttccatactaaactaactttttagaatgtgttccatcttcttaccacaaacaatattgatattttcccaacttttaaaatacaaatttgtaacaaagggtttagccagggattcttagtctagggattcacgaatccccagaaatcttttggaaaatttccagaaaaagcaaaactacattttgctgtaagttgtctttatattagacagggctctgggatcatactccttccctttttctaaaatgctagtttgtgttttataattagaatataaattctgtgagatctgggacttgatctgattcatttgtgtctatagtccaagcacaatcctggcatacggtgaaagctcagtaaatattttttgaataggaaatatttgtatttattcatttctagtaattttcttaaggctgtccttaagtcatatatttaaaaattaatttgaggttactaattggtatgaaagtctgtatttatagagttttatactttcatgcaaaaagttcttcccttgaaaaagactcataatgcttttgaattagtatgccactgatcaagtagttgcacaagttggtaattttccaagggtaaagttgagcaggggggtgacctgtatttacccagctcctacttgtgycaggccccttatttatacacacacagagtcataggtaatcttctcagcacccttcttttacacatgagacttacagagatgaggtagtttgcacaggtcacaaagctaaataaatcatgcagccagaatttgaattagtctgactcctattctctttacattattccatgtggcctctttaaggtagagattatgtatgtctgtaccccacctgtgtctaccatgcaggaaaaatcatttcccattcttttgtaaatatcatgtttatcagtcttaagatactctattttattgattgagacagggtctcattctttgtcccaggctggagtgctatggcaccatcatggctctctgtagcctcaacctcccaggctcaagcgatcctcccagctcagcctcctgagtagctgggattacaggcacacagcaccacactcggctaattttttgtattttttgtagggatagggtctcgcttcattgccagggctagtcttgaactcctgggctcaagttatcttcctacctcagcctcccaaagttctgggattacagacgtgagccactgcatccaaccacaagataatctgtttttaatggtaaatattttataaagttgttgaaaggaatgagttaagcccaattccttgtcagttatttttcacttaaatacacatatttatcttaatccaaaaacggtttaaggcattttgatcttagagaagggaaggaaaaacaggayagattagtctctttttgagcccaaaagaatctctgtattgttttcagattattaaattttgcatgcatttttctgttttactttaaacggataaatgcaatacccatagctgcttttacatttttatatcacagtttttagaactatgtgaatattagttttttcatatttactttttattcacttgtcaaagcattgctatggagaagacctatactgtttgaaaatgcaggccgggcgcggtggctcatgcctgtaatgccagcactttgggagggcgaggcaggaggatcacgaggtcaggagatcaagaccatcctggctaacatggtgaaaccccgtctctactaaaaatacaaaaaaaacaaaattagccaggcgtggtggtgggcgcctgtagtctcagctactcgggaggttggggcaggagaatggtgtgaacctgggaggtggagcttgcggtgagccaagattgcaccactgcactccagcctgggcaacagagtgggactctgtctaaaaaaaaaaaaaaaaaaaaaaaaaaaaaagagagagagagagaaaatgcactaacattagtcactrtgtttttaaggtatgattgacataacacttacctttgctatgtggtcttgaccattcaaatgacactgtctaaaattattcattaaatttgacatgattcttcaagtaacatgtaatttattagagtcttcattagtcatcaattgtatcacattttgtcatactggagaatttttagtttaaaaatttttttgtctgacaagcagcacgtaggacttcataagaaacatttttactagtgtttactttttctctactgttataagtagtcattttaagaattttggttatgggccgggcacagtggctcacgcctgtaatcccaacactttgggaggccgaggtgggcggatcacaaggtcaggagattgagaccatcctggctaacatggtgataccctgcctctactaaaaatacaaaaaattagccgggcgtggtggcgggcgcctgtagtcccagctactcgggaggctgaggcaggagaatggcgtgaacccgggaggcagagctttcagtgagctgaaatcgtgccactgcactccagcctgggtgacagagcaagactccgtctccaaaaaaaaaaaaaaaaaaaagaattttggttatgagagctgtgtttcaaaagataaatattgctgcaaataaatattagctggttaaattttattttttaaaatgtgcttagttcccttccccctcctattactactctctgcttgatttatctaatttctatgtcttatttggtgtaagttagtattttcatcatgagagattcgacttttaagctatgttagtctagctgatagtaaaagcttaaaaactagggtggatgggagatgtcctgaattctcatctcagtaattgccttcaatttactttacagaataattgtaaacatcccagctgatatgatagtttaatcaacataactagtgttctatagttttattaattttactatattaaggaaatataaacttcaatatgaaataacctgtggtgttctataataatttcaccaatatttctttagtaagagtcttacctgtatgaggtacttcctatgcaaaaaaggtcactcgccataatgtattcaacagagygcaaagatagacattgatgttaattatacctgtgcacaaatcagagccctgccatttactaagattgtcaccgtgacaaataacttaaatctctctgagctttagtttcatcacttataaaaatgataactggaatccttactttgtagggtacctgtgaggattcagtaagattatgtatataaagttcttagcacaaatattatttttccttccytagatggtaggaggacatagaatggaatatgaaattgtctttactytaaaagagtttgcagtctaagtggagagtcttgtgaaccgttgcaaggtagagttaattgctataatagatgtgtaaaaataggtgtgctatatcaactgtacgagttcagataaagaaagtgcaggaacctagataataggtttctcttctaatattaatgaaagcccatgagagagttacataacagtgtttggaaaaatcaaatataatggctgcggaagaggtttcagtcctctattgtctatccagagtgatgagaaaatgtaatttgccataagataaaatgacttttaagtgtggtcattagctaaagttcttctcaatttagtgattctgtaatgtcagccattgcaaatccgtgtctacttgatttattggtttggttttcttttgctttttatttttttatttttcattttttgagacggagtctcaccctgtcaccgaggctgtaatgcagtggtgcaatctcggctcactgtaacctctgccttccaggttcaagcgattctcctgcctcaccctcccaagtagctgggactacaggcatgcaccaccacgcctggctaatttttctatttttagttgagatgggtttcaccatgttgatcaggctagtctcaaactcctgaactaaagtgatccacctacctcggcctccaaaagtactgggattacaggcatgagccaccgtgcctggctatggtttggttttagtatgtctttttttttttttttttgagagagagtcttgctctgtcgcccaggctggagtgcagtggtgccatctcagctcactgcaagctccgtctcccaggttcacgccattctcctgcctcagcctcctaagtagctgggacgacaggtgcccgccaccacgcccagctaactttttgtatttttagtagagacagggtttcactgtgttagccaggatggtgtccatctcttgacctcatgatctgcctgcctcagcctcccaaagtgctgggattacagacctgagccactgcgcccgacctagtatatcttttaaaaagcaacttctcttccccaactgtcactactatagcaattcacagaaatacaggtgattaataatgtaagtgtcagttggaaagcgagaggtactttatctgttgaacttgccaaaattgacccaaatacgacaaatggaacaacctttcatccaaccttattaataagtccacctccaaattgagtcatgccatttagtctatatcagtgattctcaaccctggctgtatatcagaattacctgtcaggctttaaaagaacaacccaaatccactgaatctgtgtattttgaaatggaactttggcatgtgtgcaattttaaaagctccacaggtaattccaatgtggagcaagggttgataatcactttatgtgtaaatctttgaagcagattttgttttaatgtcctgtaatttttttttaataaaatggtaggtttttatcttttttttttttttttttttttttggtttgggggttttcgggggaagagggttgtaggccctgcattaaaaggtctttgtgatataccgtaaagtagaaaatttcctcttaaagactgacaaggtttatcattagagtatacttatcacatgttgttccatctcaacccttcctgaatagattaaaatgggaaactttttatttatttatttatttatttatttatttatttatttatgaatgaatgaatgaatgaatgacagggtcttcctccattgcccaggctggagtgtagaggcatgaacatggcttactgtaatctcaacctcctgggctcaagtgatcctcccaccttagcttcccaagtagctgggaccagaggtgtgtgctgccacacctaattttttaaatttttgttttgtagagacggggtctccccgtgttgctcaggctggtctcaaactcctgggctcaagtgatcctttgaccttggcctcccaaagtgctgggattacaggcatgagccaccagccctggatgagaaactttatttagggaaacatgttttaagtccacataataaattttgcaattaaatgacagctaatatgcttgttgtggaaaattggaaaattcaaagaaaataaagtatctagaactccctacccattatcattatattgctgtatttcctttctttccaggtatttttacatatgctaacatgaacagatacacagacgtatatgtatccaaaaagcatgggccatacacagtatcatcttttttttttttttttggagatggagtcttgctctgtcgcctaggctggagtgcagtgggtgtgatcttggctcactgcaacctccacctcctgagttcaagcaattctcctgcctcagcctcccgagtagctgagattactgatgcacacacaccatacctggctaatttttgtatttttagtagagatggggtttcaccatgttggtcaggctgatctcraactgctgacctcaggtgatccacccatctcagcctcccaaagtgctgcgattacaggcatgagctactgtgcccggcccagtatcatccattttttgccatgaggatacttccccgccccatccccaccaccaccccgtctgaggcaggaaaacaagcactttttttttctttttcttttctttttttttttttttttgagatagagtctcactttgtcacccaggctggagtgcagtggtgcgatctcgggtcactgcaacctccgccctccgagttcaagcgattctcctgcctcagcctcccggagtagctgggattgcaggcacttgccactgcgtgctgctaattttttgtatttttagtagagatagggtttcaccatcttggccaggctggtcttgaattcctgacctcgtgatccacccgcctcagcctaacaagcccttttttttttttttttttttaagagggtctcactctgtcgttcagactggtgttcattggtatggtcatgggtcactgaagcctcaacctcctcgacttagctcaacctctcgcctcagttccccaagtagttgggactatgggcgtgttccttttaaacattttttgtagagatagggtctcattgtgtttcccaggctggcctagaactcctgacctcaaggaatcctcctacccgtctcccaaagtggtgaaattgcatacacgagtcactgctcctggccaatgagggcaactttttaaaaaataacattcatctgctctcatttttctaataaaacattgccatttattatatggctttattagtgttatctttgttgcaaaagtatatgtaatagtctctaaagatggttaagagtttgtgtcacatcaactgtatcaataacctattttgtattttattttcccaatattttaagatgaaaacttccaaatgtatttaaaaaggggatatgatatgttggaacagctgtatattgtctctctagattcaacaactgttaacattttgccatagttgctttatttttctttttatatctactgttttttttctttctttgactgaaccctttgagagaaaattgcagacatcatattttacctgtaaacatttaagcatgcagctcttaagaatgaagatatttttcagccaggcacggtagctcacacctgtaatcccagcactttgggaggccgatgcaggcagatcacctgaggttgggagttcgagaccagcctgaccaacatggagaaaccctgtctctactaaaaatacaaaattagccgggcatggtgtcacatgcctgtaatcccagctactcgggaggctgaggcaggagaatcgcttaaatcctcgaggtggaggttgtggtgagccgagaacatgccattgccctccagcctgggcaacaagagtgaaactccatcccaaaaaaaaaaaaagaacgaagacatttttctgtataaccataataccattattatacctaagaaaattcatttttttaaatttatttttaatttttgtgggtacactgtaggtgtataaaaaaataaattgtataatattgaatatcaagtttaaatttccctagttgtcactagagtgactattgtaattgttattttgaatcccagtctaatcaagtttatcaatcaagcacattaaacaagtctttaatcagtcaagcccctcacctgtttttttccccttgaaactgactttgaagaatctgagccagttttttacaatacgtcctgcattctgaattcatatgattgttttctcatgtgtgctctaacttgatcctctattcccttttttcctgtaaactgggaattagcattattagattcattctaaacattttttggcacgaatacaggacatgactgtactttataatgcatcatatcaagaggcacatactgtaaagatatctttattttagtctgtcggcttaactgtgatcagcttggatgattagagcttgttctgtacagtattaagtagttactattgtagaaacctgtagattttccaaaattcactaaaatatgaaaggattgagtagtttattattcatactgagaatacttaatttatttttatctagagatgtttttatcaaaataagagcaaaaagtaaatacaatttttatccgtaaaaactctaaaatctttcaaaaatctgtttaaatctatatagttttatgttttgtatttcctacttatttagcagaaatgatgaagaaactgttctgatggcctgcttttctgtccttttcctactgctttaaacattgattttcttttgtactaaatcatatagccaaatattgtttaagtaagtcagttttaggaaatgcttgtgttgctgttgaattataaaagctgagtaaatttcagattaaactttaaatgactgtgaaataagacataaactagttaatggtaatttgcttaaaatgacttgagattattattggaagtttttattaattgatacaggtaagaattgatatttaataaaatgttctcatgcttagactatattacttttcggtagagaaattagtattttgctgtaatgtgttatgaaatacatgtgatatcctagtttgtctactgacactggggtcttgaatcttaaaaaaaggcctccgatgaagcagaggaaagtggatcacagggaaaattggtggaagctctcaggcaaatgagaattaatcataggggaaactaccgacaacttctggaggagatgctgactagttacaggctagctaaagtagagggagaagaaagccctgctgaaccagctgccacagctacttcttcgaacagtgatgctggaaacccagtgacaatgcaggaaagccatactgaatcagaaagtggtcttgctgaattagacagctctaatgaagatgcagggacaaagatgagtggtgaaaaaatatgactttcctttttggtaatatttttgtgatctttgatggtttttaacctaggaagtgtaatgtatgcatttatataactgttttgttatttgaatcttggaaaactagttttattatattcagatagccttgttttttaaaaaggcctttgcatacacctttatgagatagtgtaaaattgactatttatagtactatggatttaatgaaattatatgtcatttcacattgtatgccagaaattaggctaccaattatgaattaaagtcagtagttaaattaatactagatagaattagaaattttgattagagagattatgctatattatggaaaaacttgttaatgtagaattatactgcttcatattattttacctattagtacactcatagttagctttgtaataaatttatgttttctttaataattttagttcttcaaagaatggctgatgctggcctgtaatttttctttcaaggatgataatttgtgtgttgtttgatttgtttatattttacatctctgtagttttatttttagaagttgtgagatattggatgtgtggctatttttcctttctctgtattctttatgaaacataacttttgaaaaacctatgtattattcatacagctttggtttgtatattctgtatagcctaactacacacatcaaaatgtatgtcaaccaagtgtttagaatgaaattataagtgtttaagtccaaataaagcatgtgatgtggaataatctatgcatgttgtacttatttttgaattaattttttaaaaacaaccaagtttggtatattggaagaatacccattagaaattcatttgtatttatataacatttagaacacttttggcttaccttttttcattaacaaaaaggaaaagtttaatattaaaatatatgtgttgcatacttaaatctattctttttcttatccatcttttgtggtacaaaatattaatctttggacattatgggcacacattagacatgtgagaaaattgccacagtgagcattttaaagattgcagaattgtccattttgttacaaatttttgttagttattaagaaattgaacaattatgggctatttttaaaatagtggcagatgagagtttttgtttaaagggatttttaaattatagatttgtcacatagggaaaaatattttttaaaaattattttataactgtagaacattaacttttcgtctttacgtttatatttatatcatgtgtctaaagttgctttaagttaccataaattgaaacttcggaatctttggatgttatagctgatgttttgatgtatttttccaatgccagaatatttttaagtgctttgagaaaggaaggcatttgatggagaggggaggaaaataacccaacccagttatctatccatattagatacacgtgtacacacacaatatgcaatacacaacatctctctgtaaaagtacccttttcagacaaagaaaggaaggtaatttgttcatcaattttgttttcttttgaaattcaatccaatctggaagtggcataggtaaataataatattcttccttttctcttcctgtagggtgctggagatctagaagacccatggtagccttaaaaaccttctaaaatgcttttgattctgaaaattgggggaaaaaacttttaatcacaattttcttcaatacaaggggaaaatattcttgcggattcccaacgttttgtgatatgagcagaaaatcattagcatttcccatcatttgttcatatttgtgttttctgacagttgccacttgtagcattgcctgtactacagtattttttgccaacctcaggcatactcgttacatctgtattgaactttcggccctagaaaccagtggagttatttcaccacaaatcaacaatgtgcctgaggtgcatgggaaatatagttagctatactctgaaaatacattatgttttttttctttaaacaaaacacacaacatgtaagcatgtaagagtaaagaattgtatgatatgttccttttttcagttcaccaagttggaagccttttgcagctctgtggcttggaatttcatttgagcaatttctataggatatgtatttattattgattgttatttaatttttttccaattttacctgtattaccaaactgggttctccaataatgtccaaattgtaatgttgccttgcttcaagataaagtgtatttgggaataatattataaacccttacaaattttatgcatgtatctactgcatccttcaactctcactagaaaatcttttgaaaccaaatggattaatttatggctatttataatttgctttgacatctcactgttggaaattttttaaagatgagatttgcctttataatgtaaattgtgatttttgttttacatgtgggtttctatagttttaattttttcagcttttaagatacgagttttgtgtaatttggtatttttaatcatttatgttattttaaaagctcagaatatcacattgaaattactataaatacatttaaaattatctattttagatctaaggaaatactacagagatattttcatgggttcagtaacttttcattttataacattgggcacggtacagagtgattgtcacataaggtacttgaagatttattagtttaattctatttttacagtaaccttgaattcttctgagttttgcatgtattaaattcaattaatgctgaacatgaagagtaaagtatttatctgaaagaagtttctgggttaggagaagtaatgaatgtatccatttgtacatggtttacatgttgtggatgctttgtaaacattttcctgtatgtttaaattgtgtttcagcaggatgtaattgcccttgtgtgtagttaaaatgagtcatcatctggtcctttgtgaaatggaattcatggtattttctgtaacgttttcctgaagctgtttctggagagccacacatttaaatacagacagctttcctgatcatttgatttattgtgcacctgatttttggtctaaaaggaattattgccacaatatattttatttattctttagattttagccttgtaagttaaagtgctttacatgatgatgtgaaaagctgtttgtccctttactgggtttggggggttgttaaaagatagggaatgaagaatgcaaaatggtttatcgttcaaactgtccactctgatccaaccctgtactgatagtacttcccagtatgatattgtgatgtttcatacaatgcagtgaacataaccaacttgttacctaaataaagaattgataaaaacagtgtgacatattactatttggtatgattcagtttttaatgttattttaaacttcttatatggttggcatatttctgaaaatttaattccaaagaggaattaaccaaactgtacaggacaatattaaccccttctgtactctagaaatatttatactccttttaaaaaaacctgcctttggccgggtgcattggctcacacctgtaatcccagcactttgggaggccaaggcgggtggatcacgaggtcaagagatcgtgaccatcctggccaacacggtgaaaccctgcctctactaaaaatacaaagattagctgggcatggtggtgcttgcctgtaatcccagctgcttgggaggctgaggcagaagaattgcttgaacccaggaggcggaggttgcagtgagctaagatcgcgccactgcactccagcctggcgacagagcgagactccgtctcaaaaaaaaaaaaaaagaaaaaaaaaaacttttccggcagggggcagggtgggggttactggtgcttgaaacagaaataatgtatgagttagtaaaagaaaaacccatattcagtgttgactcatctgaatttcctagcctggctattctcaagtattttggtctgaggacccacttatactcttacaaattgtatactccagtgaacttttgcttttgtggatactatcgatatttactatattagaaattaaagctgagaaattatacatactgttttaatttgttaacaaaacaattacatgttaatatataaaccattttatgaaaaataattgtcttataagttaggatacaaaaattcagtgtaaaaaggaccatttttcatttttgtgagccctttaatgttgaactgaattcttgtttgtgcttttgcgttcagtctgttgaagtgtggtatggcccgatggttgaagtttatgaagaaacctggcctcacacagataggtagttggaaaacaggaatattttagtcacttcagataactgtggatatcaaaacttgacaactgatagtttcttgaagattggttgcaatgtgaaatcggaaagtttattagaggacttttcttagtttgttatgttaaaatccactgggtctgtcttgcattttgaatggaccttctggctatgcatgattttgtcacatcatgaattagtcatttggaaaatactggttcactgaattatgcagttcttctaaatattgatccgttattctgcaatgattaaagttttttgttaagggtaggcacagtgattcatgcctgtaatcccagcactttgggaggccgaggcaggcagatcacctgagatcgggagtttgagaccagcctgaccaacatggagaaaccctgtctttactaaaaatacaaaattagccaggcatggtggcgcatgcccgtaatcccagctactcgggaggctgagccaggataattgcttgaacccaggtgacggaggttgcagtgagctgagatcgtgccattgcactccagcctgggcaacaaaagcaaaattccatctcaaaaaaaaaaaaaaaaaaaaagactgcttagctgaatgtggtagcttatgcctgtaataaagcaggaggattgcttgaggccaggagttcaagacccgcctggacaacatagcaagacctggtttctacacacaaaaaaattctaagtactctagcatggtgtcacatgcctatagtcccagctagttgggaaactgaggcaggaggattgcttgagttcaggagttcaaggctgcagtgagctatgatccagccactgcacagcagcctgggcaacagcgagactccatctcaaattttaaatatatgtctcttttatattaaaaaaaactcaaattttaaaataacattgtgaaggaataaacaatctaagcaacaaatgcttccaagctgcttcaccgttagtttattaacctgagtagaatttaccaccaagagtcataatttcttaatgctaaaagtagaaatccactgggagttgcattgtcattgaaaaaaaattataatgaaggccaggcgcagtggctcacgcctgtaatcccagcactttggcaggccaaggcgggcagatcacttgaggtcaacagtttgagaccagcctggctaaaatggtgaaacctgtctctacttaaaaaataaaaataaaaaaattaacttggtgtggtgctgcgtgcctgtagtcctagctactcgggagtttgaggcaggagaatcgcttgaacctgggaggtggagattgcagtgagccgagatcgcgccactgcactacagcctgggcgacagagggagactccgtctcaaaaaaaaaaaaaaaaaaaaaaaaagttgtaatgaactggtcttcctatatgaaaataatggcgctgtcttgctagttgtgattcttctttctacccaggctttaaaatggtttttaataacaggagaaataatattagtcggggaaaaatgtttctataatcatattagccgtatatttgagccaggaattgacagcctcattagtttacttttcaaactgcctgatatattttctgaaaccttggaaaatacgcaaaccagaggaatatatggtgcccaagtctttatccagcttcaatacttgaaattaactggaacatgtccatcaaatatcttttgctgaccaaatattattcttccttgtcttgaatttaaggttatattttttaaatgacatctcacactgacatttcctcttccaaattgccttcatttgtgttttgaagttcatctggtttaagtattaagggaaaacgtgataagatttcttgtggaacacattttgttttgagaagctaaatagtatttagtgaaaaatagcaaagtgtgatgtttttcacatattagacaattcctagttgtgcaaaaaatccattatatatgtaaaatagtcaaatgttaacataattgttaagatgaattcaagcaatgatttaatttcaaagcaattctgaagttactttttaaattctgtactagaaaatgcactgaaatgaagttacttgcttttagttcataatgggcattataacaatttgcactgtcgtttttatgctaaattgcttttaagtttttttctgttcaactttgggagttattttgtaaaccctaaagaaaatgctaaacaagtgtttgtttttgcctgttgttttgatgattcgtgtatgttacattatggtctagaagtaaataggtgtagctactaatagagaatacattgcttttcaggcagcatcaccgccatttctcacttcctgctggcttttctggctgtggtattttctcccccttatttcctgtttcagttttattttacctgcaaacaccacttactagtacactgttttgtgctcagatgtaactggtagatatgctcttctaattcagaggtgaggggcacttaggaagtcagtatttctgctatcttgtaagtatccacaactccagtgggacacaaaagagccataccttttatggaaaggtagaatgaaagactgggctttacttcttttaactagtagacctagtctataatattggcaacagtgattttttttaatgattaaatctgtgcaacaaatgtattctttccatataacattcacctataatgcatttaagatgaagaggaccagtaccacccaggagttaccctaatggtgggtctgataccttctttccctctcctgagtcgtttacacttacttttttgggcactgattatgaagaggtggttttgcttcattcctaagtcttgaagttatgaaatgcaatttattatttattattatttgagatggagtttcatgtttgttgcccaggctggagtgcaatggcacgatctcggctcactgcaacctccacctcccgggttcaagcgattcttctgcctcagcctcatgagtagctgggattacaggtgtccaccaccatgcccagctaatttttttgtatttttagtagagatggagtttcaccatgttggccaggctagtcttgaactcctgaccttgggtgatccgcccgccttggcctcctgaagtgctgggattccaggcgtgacccaccgcacccagcctgaaatgcaatttatcttaacaattaattccacagtgacatgatatagagtaccatggggtttattttcatgagattttgcctatgaataataattatatagtataaagcttattttaaatatttaatatttgctattaaaattgtaattaagactgcttataattggtatagcactttggttctactgaagtatactcttgaaagttactgggttctgctgggcacagtgcctcacgcctgtaatcccagcagtttgggaggccgaggtgggtggatcacctgaggtcaggagttagagaccggcctggccaacctggtgaaaccccgtctctactaaaaatagaaaaattagctgagcctggtggcgggtgcctataggcctagctactcaggaggctgagacaggaaaatctcttgaacctgggaggcggaggttgcagtgagccaaaatcgtgccactgcactccagcctgggcgacagagcgagaatctgtctcaaaaaaaggaaaaaaaaaaacattttagggggagcttgagctacataaacattcttaagtctagtttacttcggactgtaactaattttaaaatgcgaagtcttcatgaaagttctgtaggctcctaaagatcctatactccaagagttaattaaatccaataactttaaaatgtattttaaatggttgtaataatatattttacatgtacaatcaaaagccttaatgtaaactgaaattatttcactaaaaatcctaactgaaaaaaggaggggagaggagggagagggagagagagaggaggaaaacaaacaaaacagaaaattggctggacgtggtggcgtgtacctgtagtcctagctacttggaggctgaagcaggaggatcccttaagcccaggagttcaagtctgcagtgagctacaaatggatcactgcatgccagcctgggtaacagaatgagaccctgtctctaatacaaaaaaaaaaaaaaaaaaaaaaatccggttggataagcatgaaatagtatataatttgcatttctgattacatgtgagaaaaacatctttcctatatatattggccatttgagtttcctcttttctgaattgaatgctcacaccacttgtccatttttccattgggtttgtctttttctaattgatttgtctttttctatatagtctagataccaatcctttgttatgcgagctgcaaaacctctcagactgtttttctttttttctttgtttatgcagtcttgctatttgtcatttttttgctgtatgtttttcttgtttaggaaatcatcctcatcccaagttcatatagtctctaatttttttaatttatatattttcattttcatatcaggtggataatgtagtaacaaggctgaggggaggcacatctcatgtaagtgtgaaaacccaatcatcatgcttgtgaactacagaaggatctctaatgttaccttccagccattttagaagtctacctcccaagcacatatatttaggtttttaatcattcttgaatttcttgttacatagtatgtgaactaaggaatctttattttccatccagctagctaattgtgccaacaccatgccacccctgtcagattcccattccccaaatatgtgtggtccatttctagtttcttctgctctattgtttttttgtttttgtttttgttttttttttttgtctaaccctgtggaaatatcacatcatttagattactatagcctcttaagtgctgacatctagcaggtatacattgtcttcaccatatttaaatttagttccttttatttttcattttcaagacaaggtctcactctgttgcccaggctggagtgtagtggca

SEQ ID NO: 93267 - DNA, 18278 bp, Homo sapiens
caaggtccccagggctgtctgggtttgtcttggagattcagggagccagctcctccccagagagaagagggctctggtgggcttccctctgcaaagacagaacgtgggcatcagtctctggatctcagcttctcctgattgatgggcaaagcttccacagaggtgttgagctgggttgcagctgagtggatccagcacttcaggcttgagaacaagatgactgaaggtagggagccataggaccactgagaaggccagaggtggaggtgggagaggggcagaaactgacattaccaccttctctgtcctctacaaactgcccaaggactttcagagccatactccttcaacttatgccccacaccccgaaatcttccttccctccaaaaaatgttcatttctccatcaacacagttcatcctagacccgtctgtctcagagtactcctcactctgcagggagagctgggggaagtccctaacagcacgcagaaaggatggcaatttggaacacggagtggatcacatgccgagggcttccatgcagtcacatgcttacacaccttctacctgcatcctcacagagtcctccgggagttccagccagcagctgagcagccggacggcaccatccttgctccacttccctgcttgctggctctcattgtccttattcttggagaaagaaagtccaaattcttagcacagtgtgcaaagcatgagccctccaggtcagggcctgaattaggtgatctctgagttccctctgagccatagcaccctgtcccaccagcccaggactccctgcccctcgtcctttctttcctccatagaacgtaccaccatctggtatattacatgtttggtggttgtctagcttccaccactaaaatataaggtcctgggggccacacgcatttgactgctgtgtttgctgctgtctctctcatcagcagtggacacacagggttgcatacagtagtcactgtacacaaatcttctgaatggatgaatgaatggatgaatgatccatctccaagggcccttaattacaatcataaccaactaacttagcaatttgaaagccttctttcatcttcacaaccaactttcgagttaggtattcttatctccatcctcagacgaggacaccagggctcagagggcgtcagtcacttgcccaggtgactccagcaatgggaggacttaggatcacacttaggccgcctgactcaagagcccaggctcttgcaaagtatttgaaacaaatgagctcaattaattccacacattttcagggggcacataatacaatccaggtgtaaaaaacactgggggacttttggtgctactgcaccagcctgcttggcaagagatggatgtgtggctgatagggaaactgatagggttttcaacaaagcctgaaattaatcatayttaatgaatgtgactaatgtgatgaaagaatgagcgattaaaatattagcacatctgaacttctcctccctggctrayctcctccctagggttatcatctttcaaagaagtaggggcacagaattacagaaacgggttttatggaacacaaatgccttttaaatggcttagattaaggacagtctgtgcagttctcaagcggctgtctgtcttcacatctcgctgctcaagtgagggacgtgggctgtggggagaggctgaaactgtcaagatggctgcarctggaaatgggaagccaggcatttcccggggtaattgtgtggaaacaggagacaggcgtggggtcccttcagcagggaggyggttgcctttctgtgtaggcactaggtgagatgaaagtggctgggaggcatgttccctggggatgaggcaaaggcatcttactggctttgcacattatgcaggatcacaggcagaactacctagggaccaattttgttttgaggatgacgaatgcagaatcccagcacatttgccttagagctcccctccctatgccccctcaacacacattgcccagatgaacacatcaaggcagtagggaagagggctgggggcggtggtttgcgcctgtaatcccagcactttgggaggctgtggcgggcggatcatgtgaggtcaagagtttgagatcaccctggccaacatggcgaaaccctaactctactaaaaatacaaaaattagctgggcatggtggcatgtgcctgtgatcccagctattcgggaggctgaggcagaattgcttgaacccaggaggcagaggttgcagtgagccgagatcacaccactgcactccagcctgggcaacagagcaaaactttgtctcaaaaaaaaaaaaaaaaaaaaaaaagactgtagggaacaggaagtgtctagactacaactcacacttggaactaggagattcccctgcatatcagtgttctgctactctccggaatcaatcgatcatgcttgtgcaaggaattatataaacctgaggtcccaaactcgaggcctcagcagatgggcaggtaatgtaactgaatggacacagtgggaaaggacccagaccaccaagcaggtacctaccctggctgacagcaccccaccgtctttctctttgttgaggacatgggcctcgagtggcttaaaataatgcaattttattattttacaattctggaggtctgaagcctaacacaggtctgtagggctgcacttcttctggagactctaagggagaaggtttcctttccatttccagctctatctctgcctgcaggtccctcctctggccccaccctcaaagccagcaatgtggcatttctgtcctctcacctcttgcttccctcttctaagaccctatgaacatgccgcacccacccggacactgcaggaagactctctgatatggtttggctctgtgtccccacccagatctcaccttgaattgttacaatccccttgaattgtaacaagggggggaccaggtggaggtgatggatcatgggggcggtttcccccatgctgttctcatgacagtgagttctcatgagatctgacagttttataaggggttcccccttcgctctgctcttattttctctcctgccaccctgtgaagaggtgcctcctaccatgattgtaaatttcctgagggcgcccccccaaccagccgtgctgagctgtaagtgaattaaacctcttttctttgtaaattacccagtctcaggtatttcttcatagccgcatgacaacagactaatacactctccctatctcaatctccaatcacagctgcaacattcctttgctgtgtaaagtaacatattcccaggttccagggattaggctgtggacatttttgtggggaggcattattccatctaccacagtttgtatgtgggagtactcacaatttgtaaatgctagcaaataattctgaggttcatagcactgtgtatgccagatcaccaggtgtctctgggcagaaatgagtggggagagaatgaatctccagtccatgacttccgacctctgatttaaacagtgtttgttaaaaggaaggcttggtgtcatgcttcctcctgccttgttcatacatacacattgcgtgtcagacttccagggaactgagaagcttaccaagcatttatgttcccaggcctgtggctatttttttccctcagtttacaaaactaacaatgtttattaagctctcattgtatgccagtgtgctaaatatctcacatggattctttcttttaatttgcacagcaatgtcatttttatccctgttttacaaataagaaatctgacactcagtaacgttgcccgatgtcacacaggtagtaaggggcagagctgccatgaaggccaggctgtctggctccagagtgagctgatacatgaaagctaaaacccccttcagttaaataacaaccactgaggggttgcagtggtgtgtacctgtagtcccagctactctggaggctaagggaggaggactgcttcaggccaggagtttgagaccagcctgggcaacacagcaagacccccatctaccaagtggaacccaggttggcctacagaagtccaagttccagtatgcctgccactcctggacattggcctccttcttccacgagaggacagctgttcggccatacagttacccatctctctgctgcaacgctggactcgaacaccactaccagatgcgttcttatcaatgtgtctttgggcatgtcatttgtcttctctgagtcttagtttcttcatctagaaaatagaaagttattattattgcagatatttacatactgtgtgccaggcacagttctaggcattttacatgtattaatccatctcatccttaaaataactctctagggtagatcctgttattatctctgttttacaagagaaagacggaggcacacacagagattaaataacttgccctagggcacagctagtgagtggtgaaactaaaattgaacccaggaggtctggagataattcctattctgttcacccaactgggacattgtgaaggttttgtgaaggatcattcattcattcattcatttttcatttccttaccaactcagagggaattgtgatattatttcttgtgaagcactcaaaccatgcatgctgtgtgacaacttctctggaaatgtcttttatcctaaggttgttgccaagggagagcactgagccagctgtgtgatgagcctggctagggtggcccctgaggaggcagcctccaatcttgagagtacaatatagtcccttgggctataaggctggtcaaagcctaggccctaaggggagtcataggaaggtcaaaggggaaacctgtcagtacactttggacctggcatgaggaataacaacgagtcagcaaggatcaagggaaggcttcttagaggaggtggcatctcagataaaaacaccactagcaaatcctcacttggtgctgcctgtgtgctgggcctgcttgtagatgctttacacgttttagttcatttactcctcccagtaactttacaacacacatggcatcattactgcccccatttggcaggtgaggaaactgaggcacagagaggtgagggaacttgcccagatcacagagcccatgcacagcacagagccaattctgtgcactgcttatattaacatttacttaatatttaaattatttttgacctaaatgaaaaactttatctcagtatagtacagaatagaaaaccagtatggatagaaaatcaatactatgaaccatataatgaaatcactctagactcagttctctgctaagagcttctaactcaagatcttttctgttaaaagtgggagataagtgtagagaggaattaaagatatattaggatcaaactgaggccaagtgaatttgctcatgcctataatcccagtactttgggagggggagacaggactccttgaggccagaagttcgagactggagtgggcaatatagtgagacctcatctctacttttttttttttttaattaaagatgtattagcaccaaactgagactttctcattggtgcaatcaggattgaaaaacaaaacaaaagaaaacaaaactttctcactatgtgatggaacatgaatgagcgagctctgtgcatcctctaaaattctaaaatcctactttgggaaacagtggtggcactgaagagcatagactcaggagacagattaccctgcttcacatcttgctggctatccagttcctggaaaagaatctctctaaacctcggtttcttcatgggtaaaatgctgatagtaatagctctgacttcatagagaccttgataacaaatgaaagaacgtaggtataataaaacgcaaaaccaaatacacagtgaatacttaataaacataatccattagcattatcgagctttgcacagatgcctctggcctttttgttgttgttgttgttagatgaagataataaaaatcatcatagtaaacacatagcgattactatgtgctggacttcgtcgtagttgagatatattaccatcctaagttaaactataatcgtttattgttatctctaggtcttcctagatgaaatttttaccctaaaggatcgtaaagtcggcccaccggacgtcagtggggtcccctgttcagccctctcgttcttctggggatctctcgggacactgacgaggtggcaccgggacctacaggtgggccgcaagccccgcccccagygacggcttgtagccycgtcccccgacgcagcgcctctccargtttgccccgccctgcaggactgcagaatttcctttccggcggcgcgctgtcgtcacgcgtcccgcgcctcctcgcgcctgcgccgtggttggaaggtcgtcyctgtgaccggcttggcggttggagcggctgtcgccatgttgtcggtagcakcccgctcrggcccgttcgcgcccgtcctgtcggccacgtcccgcggggtggcgggcgcgctgcggcccttggtgcaggccacggtgcccgccaccccggagcagcctgtgttggacctgaagcggcccttcctcagccgggagtcgctgagcggccaggccgtgcgccggcctttggtcgcctccgtgggcctcaatggtgagccggggcgagggccgcgagcagggctgggggtctctcggtgcccgctcctccggcccccagcagggagcggccgcgggcgcgcgagcggagcctgaatcaggtcgggctgggcggcctccgcaactctgggcctggcccccgggctcggggcgtctttctggtggccggcctggactcgcgtccgccggcttcgcctggttcctcctcggccgagttcacgagctctgtagtcccgctgttccagccacctctgaggggttttgttgcttgcaggtcgtttgaccttgggcgagtttctaaacgtacttcctgtgaaatggattcatatctttatcaattttgtaggggtgtcgtgaggcttaggtggaggaattctacgtaaagccgttagcacagtttgggcacttacatgcttaagaaatggaaacttactaatatttgggaagttggtcttctcaccactaccgatcccttcatgtccttccccttcatcacccccccaccaaaaaaaaaacaaaaaaaacatacacaaggtcagttacagtgtagtgtcacaacataatcagtcgtcaaggacgggcagagattgacgacatttacattttacagatgagaaaacagacgaggtagaatgactcgcaccaggatccgtggtgtggacatgtggtagcagggatttgacaagacgaattgtcgtagccactgagctcttcgcargggctattccacaccctctgtccttagatccccgtttatcttctttgcctcgccttccatctttacttggccctgtatcggagatagagaaatggcagcctgtgggcagtgtgtctgcaggctgtgtagttttcaaaaaaactgggaagactaatggcatctcttaaaatgctggaagccggtaatactgggatctagtttctactkgggaaaattccatagtgtgctgtgtagtggccgcccccgcagttggagcaagtggtcttctccagtttgtcacagtctttaccaggtctgcgtgtttcattctgttaccagcctggctccactgatagctgtttgtgactcttcccctacacgctaaccaaattgcccgccacttttctttttactctgtcttcattcaccctgggctctgcactttcttcatggtccttccactaagttgctacatgtccatatgttttccttacccatcttttcaatctcagttaaggatcaggtgaataaagtttttatttgctgatttgtctgtctctgtagcacatacactttacactctgtattgtgtttattggtaactcctccacccttgggcttaagggcatagagaaggtaatatcttctttatttttctatctttcacaacgtcggattttgtatacagttagtgcaaagtatttgtgaatgaatatttgttaaggagcatcagtgggttttgaagaaactgtccatggcaggtgtagagtaccctagcccatccttgggacctggaggtgagaaggaaggaaggagaacatttcaatagcaaaagaaaagcatctttggarttcgtcgtgttgctaaagtttcttcaaaaaattggaggcttacatttctctgatggccagtgatgstgagcattttttcatgtgttttttggctgcataaatgtcttcttttgagaagtgtctgttcatgtccttcgcccactttttgatggggttgtttgtttttttcttgtaaatttgtttgagttcattgtagattctggatattagccctttgtcagatgagtaggttgcaaaaattttctcccaatttttaggttgcctgtaaaccacaatgagataccatctcacaccagttagaatggcartcattaaaaagtcaggaaacaacaggtgctggagaggatgtggagaaataggaacacttttacactgttggtgggactgtaaactagttcaaccattgtggaagtcagtgtggagattcctcagggatctagaactagaaataccatttgacccagccatcccattactgggtatatacccaaargactataaatcatgctgctataaagacacatttacatgtatgtttattggggcactattcacaatagcaaagacttggaaccaatccaaatgtccaacaatgatagaccggattaagaaaatgtggcacatatacaccgtggaatactatgcagccataaaaaatgatgagttcatgtcctttgtagggacatggatgaaattggaaatcatcattctaagtaaactgtcgcaaggacaaaaaacaaacactgcatgttctcactcataggtgggaattgaacaatgagaacacatggacacaggaaggggaacatcacactctggggactgttgtggggtggggggagggggagggatagcattgggagatatacctaatgctaaatgatgagtcaatgggtgcagcacaccagcatggcacatgtatacatatgtaactaacctgcacattgtgcacatgtaccctaaaacttaaagtataataaaaaaaaaaattggaggtttacctgacttagagaaactatttttagaaacaggcaaataatgtagaaccataaggcaaaaaccttttctgtaatcatttcagcctgtaatttaagttcacattatagtctgtctagatggttcatggcaggatggcttatgggagtggaggggttggatctggagaagattcttgaattggagaggaaggttgtactattttcatgcagatttccaaggcgcattggagctcaaccttaaaataaaacttgttttgttaaaattccttaaattttctcctttaagtatttgattttgcttyaggttagaattaaatctagcatcttactgaaagtcagacctaatgcagctcatgtaaatatttggagaatgatttttgcaacagggcagtttaatttccgaaaggattcttggtggtgtagcctactaaagtgtaaccagctagatagagtgggaggagacttttgccaccaaatctctgaatgagaagggcaaagccattttattgagttttcttgtacatttccttgtatactgttaagggttgtggatactgtttttaatgtagaagtatgaactttttattcctttatcttttagggaggaagctcatcttttctgtaatcccaggtagtgctaggagcaagtaatttatgcttaattccaaatgccagtatatactggcaggttagcatttatttgttagagtagtagtataggatgtaatgtcactttgactccacagattctgggatgtgagtctcaagttgccattatctgtgtcctggtcttctccaggaaatgatttagtcagaaaagcacatagagtgattttggtaggtttcattattgtttgaatacttctggcttccataaagttattgaccttgagaatcatgtgaaaagcagttcaggtattccatattgtaatgtttgactactcaaggaagtacagtatattaggatgatatcctagtagagcaaggtagaattgcagtttattacaataaaaatgcatcataaaagatctttattttggatacacattttctaaaagaggaatttttagtgtccccttttttaaaaaggaaactttgtggcaaatttcttaagatgaatatacaatttgcaaagaggtttgcttcctgaaacatacctaaaagtggtactaggtaaaattttttttggtcagtattggagagagggatgtaactgtgtcttgtttttgttttttaaactaccaaagaaactccttgctcccaaagtactacatagtaattatttgtttaacattcatttgagctcttttatggcctagactagaagtgccccagttgagagaactacagcagtgaaaagggaagataatacccctacttttacagtaactattgccctttactgaagagggggagatatgaaaattttgccctttttttcccttgctaaattgaaataattagttcttttgcagttttcattttattttgagagctctgataaggatgtccttctctgcctattagtggttttaagttaaagtaatactaatttatacactagagtataaaatagaaacgctaatttttctgcagcagagttatacagttcacagaatgtttattrtatcattattattttatgaattaacagttttttccgagaacatagattggactataaggggcagacatttgccttaataaggtgatcacacgtcaacttactgtgtggactagatgagttttagggtgtccttctaatccagagagtatgggaggtatttagcatgatttatatagtaagtcttggcagttgaattttcggaaactttgagttattactgtttattttgctgtttaacgtttttagcatgatgcactgaggtgttgtgaatcctgaatcagcaatgttcaaccaactagggggagctcaatttacaaatagtatcttgtgatttcataccagtatgataggtggtggttcacttcatttcatttttaagattttatatgctagcaccgccaatttgactatttctgagacccagtgagtgccatatttcacatttttagaatttgattttttacctgtgaatccataaagggctatttcctgatatatactcccttcgggatactcatctaattgtgttttttaaccttctgtttgtcttgcagtccctgcttctgtttgttattcccacacagacatcaaggtgcctgacttctctgaataccgccgccttgaagttttagatagtacgaagtcttcaagagaaagcagcgaggctaggaaaggtttctcctatttggtaactggagtaactactgtgggtgtcgcatatgctgccaagaatgccgtcacccagttcgtttccagcatgagtgcttctgctgatgtgttggccctggcgaaaatcgaaatcaagttatccgatattccagaaggcaagaacatggctttcaaatggagaggcaaacccctgtttgtrcgtcatagaacccagaaggaaattragcaggaagctgcagttgaattatcacagttgagggacccacagcatgatctagatcgagtaaagaaacctgaatgggttatcctgataggtgtttgcactcatcttggytgtgtacccattgcaaatgcaggagattttggtggttattactgcccttgccatgggtcacactatgatgcatctggcaggatcagattgggtcctgctmctctcaaccttgaagtccccacgtatgagttcaccagtgacgatatggtgattgttggttaagagacttgractcaagtcataggcttctttcagtctttatgtcacctcaggagacttatttgagaggaagccttctgtacttgaagttgatttgaaatatgtaagaattgatgatgtatttgcaaacattaatgtgaaataaattgaatttaatgttgaatactttcaggcattcacttaataaagmcactgttaagcactgttatgctcagtcatacacgcgaaaggtacaaygtcttttagctaattctaattaaaaattacagactggtgtacaagatacttgtgaaatctgtaactgactttattttcttgcccaaatatttgcttcctgctttgcgtcagggacgcagattctgcacggtcattgttgggatgaagtaaaattaacgggtcatctaagtgtctatggcattgacagaaacagtagtatctaggtattccttatttaccggacttggtaagagtcctggctatgcatttcctccctactgtgtaagccgtgtgataatctcaacactaatctgtgggaaagagtcctgaatgaggcattagtagctctgagggtttatcttcacgtctggtctgctggtttttctccttaagtgacaggccaggaaattttattagtcccttatgagtgtaaattagtacttaatcctttagtcttaataggcagtgatgggatattacctgagagaaactttccaaaatgagagtgctctgccatttcgttcattttgtgtgtggttcatcatgtccccaaagttcctgcatccactctatcaggaggcagaaagggagcatctgagacctaatactgcctgcatgcagaagtggtcctgctgggtttgtttctgtagtgatgacactttgaatgttttttcctgttgggtttacagtcactcagcacttttcactgtaagatggtgtggaaccagacgcagagcacatcggaattcacatcctattctgcctccaattacacaggtgaaacaagactaaggtccattttcccctgggagttgggagtgggctttgtcctttgagaatcacagtcactttttgatgtgtttgtctttgctgtttagaggtggaccagtcgtgctttactgagtctacctgataatctcatgtacacttttttaaaatggcaaaaatggttaggttgggtctgcccaaagggaactgaccatccaggattccagcctttgatgttaatagctaggtgttgacagaaaaaagaaaatgtcaaactttctatgcttatgagtagatactagtctttgcttcatttttaccattctagaaatgaaattagcatgtgtgataattggtgggacacagaagtattttatattctgtgtctctagatagtggaggcactcttcggattgggggttggaggaagggttggtggcagagttggaatgtgaaacattgagttgtgaggggaacacaggtccacacactaaaaaacctgtgctgccaaaaatgtcaacagcaccccctccctatagagaaatactgataacctgtatcacctcccatcctgaagtgataccttgaaattctacatggcagtggaggacagaagtaggaagtttgcaggtctctaggtactcacttagtgccggaattgctatatttggtggctgcttacttcatctttcatatttagagtttgatggtgggatgctgttaaattgtagtagaccatttagtttttaaagaaggctttgttccacaagtgacaggacaagtcaagtcacttcatgctgttttgctgaatggatacggcagacctgtgttaacatttttaccattctgtgaaaacaaaatcctagatagtaggagaaaattacttacagaataaacctgaccagctagcaccctgacatcagatcattaacgtactgcattttattggggataattcttgggacaatcttgagagccaagtgttttcattatgctttaaaaagtgttataaaaatggcctttttgaaaatgttgcattatttgttaaagataacatcaaattttctttggtctttctgagcatacctttgtaaaaactttgactcaatctgagtgtatagagggcatttgtcctgactggatcaaaatgtgctttagtaccctcatttttctaaactgtaggaacatactatttaaatatcagaagtaattcttcattctcacagtactaaatttcattttctgtattttcatgtcgtttgaatttcattgcattttgtatattaacccaaaataatgtttatattttatggactgttatccttagcccactgttctaacacactttatcaccacctatttgctggtgactccccacaaccacttccctgagtttcatattcatgtgcttactgggcatatatgtttggatgtcctgttgacaccttaaactcaaactgtctgaaaggaaaagatgtcatctctgtttccaatgaaccagcttctctattttagtcagttgcctctccatcgaccttgttaactacccgccaggcgaaaaacctgttagttttccctgcctcctttccatccattatctcctctccactttgccccaaatcagtcccctagttctgccaatctactctttgtttttctttttttttgagatggagtctcagtgttgcccaggctgcagtgcaatggcaagatcttggctcactgcaacctccacctcccaggttcaagtgattctcctgtcagcctcctaagtagctgggattgcaggcacacgatgccacacctggttaatatgttgtatttttgtagagacgggggtgtcaccgtgttgcccaggctggtctcaaactcctgagctcagggaatccacctgcctcggcctcccaaaatgctgggattacaggcctgagtcacygcgtccggcctgctaatttactcttaacaagaccattactgtatctgtcatctgtagcattctaataatggccaactttttgagcacccattactgaccactaggctaagtgtacattaggtatatggtctctcttaatctgtaaaatctgaggttaatgtcaggtagtgttgctatttctagtttacagatggggaaactgaggcacaccaaagtttcttttctacaaccatacctgttaggtttgttgagccaaaacttttattttagctgagggagtctcgagtccagagcctatagtctgatccccattttatactgtagtgttttaattgaggccttgttaagtcttgcctagtctactgcagtaaaattccagatagatctttcccccaattctgtccccataaaatttgtcctccatgtagctgccaagtagtgtggaggttaagaatatgacattggttttggattccagtactggctctgccatttcctagatgtgtgacctgacataaattactcaatccattcctcttccttcatctgaaaaataatacccgctcagggttgttttaggaagtagcacattagtatgtgtcaaggtatatgtcaaaactccttatacaagtcctcacctgcatcccatcggtaaaccccttgctctagtaacagaattttcttgtaacctatattctttgtagttttctttcagtcttttcccaagctgtcccttcttatctttattttagctatttcatccactgcctgcctatctgcttaggtgcagtgccctgcaggaagccttccttttctcacaggccctttctcagtaagtttttccaaaataaccaggaaatatccattgtggtatttatattaacctcttttgtaaagctcacgttcctggtttgtctcccctccaccgccagactgaaggctgaggcccatggcaactactgagccatggagttgcatgctccaaatgaaaaaaaaaaaaaaaaaatgaatttctgagtggcatttgaaaggaagattttccaaagagtattttggaaacatcaggtctaacaacaacaacaacaaaaatcagtgtattttatctttccaggacttgaggtcagaggagatattacagtatattttggatttaaatttaaaccatccccataagaaaaagttgaaaagcataaataatgaattcaggatcttaaaaactgagattttactttagttatgtttgtttcgtaatgaatgttctgcctatgtaagacttcagtgtcaaaaagtctgtcctttagtattttattttcaaaacttgtaaatgcaatggatgtcatttcatttaattttaccattttatctgtcttactcattttccatcctgggatttaggaggggaacattttgattagagaggaaaaatattatcaagcaggtgaactgatcaattctcttctgaggaaggattcaggatgattttctccttttcagtactcagcactatttattggagtttaacaatgtcccaaacacagtactgccaggaacatgaagttaagatggtttttagtccagatacttaaagaagacctaaatacaccacaaaaggaagactattcaattgcttgcttctgtgagtgcttatgaaatagattattatagatcggaaatctctggtytgtggcacaagattaaagttaactttgtggagggcttcagcaatatctctgtaataactcttccataatgatcaacctaagactggtctatcagtgaagtgaaaatcctaaattcaataaactacactttatatttttgcagctattatcccaaacttggatcaatttgagtgcaaaaacttaaccgtcatctggcttttgaaatccttattttattagaatatttgcaaaggtaagaaatcaaagtatctaagtaataggttttcatacatttttaaaagggcaaacaaaaccttggtttcttaatggaagggagaggagagctaatgcatttcacaaaataggcctgtctagattgagtatctgaaatctgccatttcctgcattggggcatggctaaaattttaactcgtgcctcttgctttatctgagggaatacttgctttcttagctctctcctcaagacacactctgctgtggtccctttcagccctttggagagacaaggcattcctggggccccagttgatctcagtacacgaaaatcaggttagaggcagtgttcctcttagtaacggattatctattataccattttaaatataaatttcaaatgaaatagtgggtagaaaaggtatatcaactgtaaaacaagatacaaatgctcaaagcattatttaacgaggcagtaaatggcatttagaatgtgattaggtatacagaaaggccacttaggtggaggtagaccctactcagaatgcgattctgaatcaaaggttggtattaatcctgcattctcataatactttggcccctggaagttcagatttgcatgtgtacatagttttgatgttaatggaaagcaaagctgaattcatccatgacagtggttcacattgtagtgtccccctcctgttagctttgaagaattactactaattggctgtaaaagctggttctttgaaatgatcaagaaaatatataaggctttttgtaaagcttgataacgagaaaaatgaggcaaagcaaaaatatataaaatgaagagccagccatcctcacttgatggaagaaattaaaataataaaaacatgcaactccatagtaacaaagttgtaaaaaccaggggatacagatgacttcttagcgaaaatataaaatgccaaaattagcccaagaagtagaaaacttaaacataccaattagcatagattaagtataaaaagttaccatgactgaatgacttcatagctgagttctatatgacacattaaagaaaagataattccaatttaaactaccagctcgttcaggtcagagcttttccaattttactgtgcgtgcaatttacctggagatcttgttaatgatgcatattccgattctgtaggtctggaatagggcctgagattctgtgttctaacactttcccaggtgatgtccatggcaggctaagaagttcaagggtgaaggggctgcatttggtgagggccttcttgctgctggggactctcagcagagtcccaaggtggtacagggcatcacctggtcacctgatgagggggctgagcatgctagccctggcgtctatcctcttataaaaccacttaatctacttctgtgataacccattaattcattactttgtgaatggacctaatcacctctttaaggccccagctgtcaatactgccacactg

SEQ ID NO: 93268 - DNA, 24892 bp, Homo sapiens
agatatcgtattcttattacaatcctatgaggtattatactcattttaaagataagaaaaccaaagctcagattaggaatgtacagaatgtagacttcacattaagaacaggcctggctttactttttgttcacatccaaagctgggattttaacaatgacaccatactgctctgtttctattacagcattctagaattttgtgagtagtcacattcatacttttttctgattttagcaaataattccaaaagcaattgtctacaaaggtcggcacgtagtggaaaggtgtgatgcagctgtatgccagagacagtaaggagaggtaggaatgtggctaactggagaatacggaatttgtctaagggagtagctgctgcctagctttagcagtccattgtggctacacaggaactgatgttagcaaacgttcccaaatcttttttttctagaaaagatgaaatgctcaatttatatgagctgctcatttaaaaatactgactactggccaggcgcgatggctcacgcctgtaatctcagcactttgggaggccaaggcaagaggatcacctgaggtcaggagttcaagaccagcctggccaacatggtgaaaccctgtctctactaaaaatacaaaaattagccaggtgtggtggtgcatgcctgtaatcccagctacttgggaggctgaggtgggagaatcacttgaacctgggaggtggaggttgcagtgagccaagatcgtgccactgcacttcagcctgggagacagagtgagactccgcctcaaaaaaaaaaaaaaactgattaatttactaaaaagaaacactacccaggccaaacaaaagacatctgaaagccacatgtggccagtatgcaatatgttttagattctgatgatgaatgattcctttcccagagattgtggactagaccttctggtgccaaatgatttttgtccgttatcctcaccactggattcattccacaaacatgtctgccatcttcagctccagtcatgtgtttttttaagattggttcaggtacaagaaagatcactaacaaatcacttgccaaccaaccagccccagccccctttcttctctctcattctctttctctctctcttccccgctgactacaaacacactctctccactcacttattatcttaagtctaaaggtttcaagtttgatcttcatacatcttattttacatccttttaattaactttttagtcctcctgtgaattatcttaaaatttttcatattcctcattagttgaagaaaccaaaattggatatgatcctacagtgtagtttttagaagtactgggtctggtttaggtcttactctcaatgtttccataaaggttatctaataattgtcagaaatttatcattctattctaaatggctagaagagcacctctaggattaaagagaaaaaatccttttcagcaggaatcataatgcatgttctaaggacatcagaaaaatgccagctcttttatcatccctcatgtagaaattgactaaaaactataaattctagataattacagcttttaaaaattctggacagagaccatttaaaagattgagttttaaaacaaagtagtaacatcactaacatttacctttacaattcctatgacctatgaagatgtagaaaagtgtttatcacactgattttaaatccactcttaaatatccaataggcaaaagctggaagaacttagagtagccttaaaaccttagaagaaaacaatatattatgggatgaaaatgtggtcttctggggttaagggctgatatcttggatcattcttccttctgctttctgttcctcctgtgtttctgataggcaagtttcttaccctaacttcagttccaacttactttccactgcagcaaattaaaaaaactttacacaaaaactagaggtttatctgtaagggaggtactgtctgaagctattaagagtttttctctactatgaaagtgtagagggtccgatcataatcaaaagagacgaggtgacaagggggtcattaacataagctaattttaaataggagtgtccatttggtttaagtgtttaatctgacagctttctgactacggaatttgaaaatcctcgccatggaaagcccaaagaaaattaatactgttactttctttggtataccctattcatctcaaatgtgaataattgtttatttgcattttgtaacatttctaaaaatagtcattatgaacaattcttattttctcattcaagaagttccaatcaagttaagtggaagtaatattgtcactgagactgtggcatgcccaaacatcttattttcacataatctatcccatttctagctcccttctttaggtcatttggatactttattcacctgctgaaatgcctttaaacctaatatgaaagattaattagggagcttacctatatttatgaaatacttgctttggtataaagagcaaagtggacattactccatgttctttttttttttttgtcagtcttgctctgttgcccaggctggagggcagtggcatgatctcggctcactgcaacctccacctcctgggtttaagcaattcttgtgcctcaacctccaagtagctgagatcacaggcatgtaccaccctgcctggctaatttttgtatttttagtagagacagggttttgccatgttggccaggctggtcttgaactcctcgcctcaagtgatctgccaaccttggccacccacagtgctgggattacaggcatgagccaccatacctggcctgctccatgttcctaatcagctaagacctgcaaacaaaaagcagcctactcaagattcataggaagcacttttacttacaattcctctcctcgtttggctttcttgtctgaaaccagatagacagttccaaaacttccactgccaagtttttgttgaagcacgtatcttcttgcaatcaaggtctttggataagtggaaatggctgttgatccactcacacacttagctgcctcttggaatttcagcattgctccaaacaagagagaactggttcattcatttatagaaacttaacattccagtctcctaagaaatggtcaaattcatccagtgttggtcagttccttaaagatgaaaagttaaaagatcaggtctaaaggttgctaaacgatgtctaacaaaaagtgttaagtgcagtgatatctgcaccttgatcagcagactgacaccatattggttaacaacttgaaaaaaaatgttaaaaggtagagataccacaaattccagaaggcaatctttcacaggaagagcctccctttgtacattgaaatttggcagaagtgaattatagccaactttccacaaatttctgggatgtacatctgttttacaatgagcaatctcttcatttatttaagatttatactccccaactacttataaaagaatccaaatacaagaacattatcacctccttaaatctatacatctgcatcaacctttttgtaatgccctcttctcaccttatatttactttggtttacaaagagtgagttaggattaaacaaggaattagcaggtgctgtttcctttagatttatttttttctgtagatgttaaaccacagtttttgtatttattaggacagatgcaaagaaggataaggattgagaattttttcccatgctcagcaaattctagtttctgaagttcctattgtacacattgtgtataatctctctggattaaaaacaggaagagttacaaattcaattcaaacctaaaatcccatttaatgtcagtggaatataaatgctacagataaatctgtaattcctcagggagctatgagacgtggcagttatgaaaggcaggactgtttaggccgggcgcagtggctcacgcctgtagtaccagcactttgggaggccaaggcgggcggatcacgaggtcaggagatcgagaccatcctggctaacacggtgaaaccccgtctaatacaaaaaaattagccgggcattgtagcgggcgcctgcagtcccagctactcgggaggctgaggcaggagaatagcgtgaacccaggaggcggagcttgcagtgagatctcgccactgcactccagcctgggcgacagagtaagactccatctcaacaaaaacaaaaacaaaaacaaaaacaaaaaaaagaaaggcaggactgtttcatatgagtaggtacaaagtaaaatcacttttatttcatcagaatgttaaatgttttgttagttatcaagaaaagtgtgcttttgttttaaatctatatagaaataacattttaaattgaaaactgcctacaccttgaagttaggttttcatattcaacaattccaaagctatgagacaaaaacctagtttttaaggatggtcaatgggctttacgtggtggtgtccgtcaaccacaaaaactactagggcaattaaccacaaaaatcctcaaaacagaacataagtaaatgcccatttacaacattttccttcttaaaatgtatgaatcagttaagttgtacctaataccagtgagattagttaccagctttttcttttcccttccaaagacacgttagtaaaatctgctggaaaaacaactagagagcaggcctctaaatataccttttgtttttacttccccttcactgtcataaaagtgatgccgtctggccatactaagctgttcaaataaatatatggacttacagactttccagctgaaaagggtccttcaggtcactcagtaattctccttattttaaagatgagattaaggttccttttagagaaggacagaattagggacggacagaatgagaagttcacttctagcggctcttattttaaaggacagtctaaacccagcagtgcttaagtagtctggtccaggctgcagaagactctgggactaggttccctcccgcccaccctcacagactcagccctgccacccccatcccagtccacttttaggtcatccattccattagtctcctctgcgcaaccataaacctacccaagaatgtgtcgcattgtctagattctagaactatctgttcacttgacaacacgctccccctcgaggtttgagtgaacttgggcactgcgaacacatcttctttatttctgcatccccaatccctggcatacctcctggcatatactaggtgtttaacaaaccttgttaaggcaagtaagtgtccagcagatcaactgccgcccaaaggagagaaaaaaggttagttaagaaagctagatgggaacttggagaaagttactaccttgtgcaaactaccccttctcggtgaaacagatctggctgggggcaaaagacaacggaaggagtatttatcacaagttgaaaaccagtagttatcttcccaggtaataagaggaaggcaatttgtcaccagtttctgctacagcacaaatctacctttaaagtaaatcttaaccttaaggtaaaacgaacaattccttgcttcttcacctttttaaacatttacattttggcaaagcaggttaacgtttattgaggggcactgagactggagtacatccggaggtaagatgtccaggaaagcgaggagatcgcagccatggcgtcctagagattcggaacccagcccgggcagcttgaaaccattaccttccccctcgcaggggagcctggctagccccaaggaggacagttcgctttacctttccctgtcgtggtcggagcggcgcccggggctgcccaagtcttgcgggtaatcgggcaggcctcaaactaggggcaaccacacccaccgagcgccagacaccgcgggccacggctgtttggaaccgtggccagggagacggcgcggggcatactgggaagtcggggcgaggcggcaccaaggcggaagtgttcgccgacccaagtaggcggagaaagcagaggaggaccggcgggccaagctttcctagcctgacagcagccatttcggaacgtacgtcccagccctctttagctacttagcgcctctgggcccgagaacacctgctccttggctcagtctggcgccaccggcatcacggaactgtacttcccagagacgtcacaccgggagacttccgattcccgctcttgagattggactctcacgtgcaggagccagtcctcgctgggctctagcgggcttctgatggaggagctactcctctgggaggacagagtaggtgggctctgctgcaggtccgggcggcgggttgtgagggccgaggtggcacggtgtatgaaggcctgtgtttgaagacttaggtcagaccttttgcccgcctttcccctatgcagctctatgcaactgtctgtgcaaggtcctgtaatttgcgtaggacgccttgacacagtctctgcttatggacgctttacaaaactatcttgcaaagaaataagtactatacaggataaggttctgagatactgacagggctggaactagggtgagataagtgtaaaatgtaaatggatgccaataaaattcagtaatcaaggtaagttttaatgcaatctctaaaaatcaaaattatagcaaaaaaaatccatgactgacaaaatgtcacgattttaagtaatagtaacagtaccgtgctgtgccatattgaagcccgaggtgtcaaaagaaaaaccatcaattctgatcctgcgagttaagttagccaggtgaggaagcgtagctgggccagatatgcaaaataagatgatgaaaagagctcgtggttaggggtgtaactggatagaggggttcctagaggcatgaagcagttttccttataccaaaaactatgccaattaagaagggcccacaaatccaaagcctgaaagaagttccgtgactgattgtcaatacaaaagaaaaacttgatccttatcataggtcctacacaccttactttactgaagcccaaatgctttgtgattatgagatgaatatgatatcttttttttagcttaggactttttactttgaccccacaaaacaaatactctgtgctgtaagatgttgactattaccacttaagaatcaaagttcacagaacttctatactggtgtgtcagtaatggacttcaactgatttttctttagaattagcagcagcctctgtcaccatccaaagattacaacccatgaaaccattgartttgtgccttgtatcagaaagcaaaggagaatgaaaaagcacagctaacattgcttgaggatctaggtaagaatttatgatgttgatatctatgttctatctaaagagcacttcataacatttgctattgatttaatggtgctggaagcaatgacttggtgccccataactagcatcaattgaaaatgttttctgttgttttaaacaggcgattaattctttagactgtcatcatgggtatccgaggactaatgagttttgtggaagatcatagtaatgagttcttcactgatttgaagttgcgggacacaaaaattgtcattgatggttatgctcttttccaccgtctttgcttcagttcaaacttggatctccggtatggaggggactatgattcttttgcagatgttgtacaaaaattctttgaatcactgtttgcttgtaatatatgcccatatgttgtattagatggaggatgtgacatttcagataaaaagcttacaactttaaaggatagagctagagagaagatccagatggcccattccctttctgttggtgggagtgggtaygtatgtcccttactcatccgggaagtattcatacaggttttgatcaagctgcgggtgtgttttgtccagtgcttttcagaagcagatcgggacattatgacacttgctaaccattggaattgccctgtgttatcatcagatagtgacttttgcatttttgacctgaaaactgggttttgcccattgaatagctttcagtggagaaatatgaacactattaagggcacacaaaactatatccctgccaaatgcttttcccttgatgcattctgccatcacttcagcaatatgaataaagctctactacctctctttgcggtgctatgtggaaatgaccatgttaatctacccatcatggagacattcttaagtaaagcgcgtcttcctcttggagctaccagttctaaagggaggagacaccaccgaatcctgggacttctgaattggttgtctcattttgccaaccctaccgaagcactagataatgttctgaaatacctcccaaaaaaggatcgagaaaatgttaaggaacttctctgctgttccatggaagaataccaacagtcccaggtgaagctacaggacttcttccagtgtggtacttatgtctgtccagatgccttgaatcttggtttaccagaatgggtattagtggctttagctaaaggccagctatctcctttcatcagtgatgctttggtcctaagacggaccattcttcccacacaggtggaaaacatgcagcaaccaaatgcccacagaatatctcagcccatcaggcaaatcatctatgggcttcttttaaatgcctcaccacatctggacaagacatcctggaatgcattgcctcctcagcctctagctttcagtgaagtggaaaggattaataaaaatatcagaacctcaatcatkgatgcagtagaactggccaaggatcattctgacttaagcagattgactgaggtaagtatttgtaatactaatgaaatttttgtaaagtactttacaggatacaaagtgctgtcttctatattagttcacttactataacaaactgatgaggttgagtgctatcttgccctcatgtcgtagctaagaaatctagaacttgagtgaactaggtartgtcttagccagaaagtgtcagtgctaggactcaaacctagctcttttagctctaaatctaccatttccactgtacttcagtagtctgtgttatcgtcacagttattactactatattgttattactactaggttaatactagctatcaatagaatgggttacgtggctgaaaaaaaaaggaaaaaaattcacaactgcaaaaaaagtgtatagacactaatcataggcacaacatctcagactacatcggatttcagataaggttagtactgatgctaaggtctaattttttaacttttattaatgaataccttttttaaaataggtttttgtgtcattatggttatttgcctagtttgatacagaaaacatgactcttagtctaacttagtgttgcttaaacctgagtaacacccagaccaccttttcaaggagaaaaaaattctcatggatcccagtgttgtctttttatattacatatatatttaaaattacaaatagatatgaaactatgctgataaaagaactagatttagacattaaatagagataacttaaaaaaaaaacaattgcaatgcccattaggggatcttcttagatccaatgaaatattcagtctcacaaaactcacagaccacacgtggcaccagtctactyaaggatgtaggacggcaaccacagcttcccagtggatttaagtcaggtcttccttttctgtcagagttctcccagcactgttatcagtctacaccaaagctttatcaccattggtgattttgtcccccagaggacatctggcaatgcctggagacatttttgttgyccctacctagggagtagaaggggtagtggttgctatcggtatctagtggggagaggccaaagatgctgctaaattttacaacctgtaagtcttacagtgcacaggaaagtgtcccataacaaagaatctctagcccaaaatatcagtagtgccattccctgggctatacagctgaycaggaactagcctcttagcctcctcttcagtcacatctcagacaggaggagatgaatgtcatagtgaatgagtgcaagagccttcttggcattgggcagtgagtccaagagccttcttggcattggcgagtgactgttaaacccccagggtttctttggttgggggtgaagaaaatgttttggaattagtgatggctgcacaagtttataaatatactaaaccaaggcaagatggctcatgcctgtaagcccagcactttggaaggccaaagtgggaggatcacttgaggccagtagttcaagaccagcctgggcaacacaacaagactgtctctactaaaaaaaaaaaaaaaaattttttgccaggcatggtggtacagctactcaagaggctgaggttggaggattgctcgagcccaggaggtcaagcctgtagtgagctatgattgtgctccctgttgagcaaaaccctgtctctaaaaatatatatacactaaacccactgaattgtatrctttaaaaggatgacttttatgacatatgaattatacctcagttagataaaggagaagaaaaggtttcagtagcttaaaagccccgttccctataggatccagtctttcttataataattccataaacatagctaggtccctgcaagggacatcctacttacaagacactgcactcagggaagccccaagatatggtgtccccatcaggtgtttatagttcatttatatatagtttaagcttagatgcaattttataagtcatttttataatgcttggtaacacaactgacaatctacctttagcacatttccaggggtacaaaactagaaagtggagcgtaagtcagtctcaaacaagggatttattaaaactttacccacaccaataaaattcaaactagctacattattaatgttttgctgaaattacatttctactcaagcataaatggtgctgttggggagttttttwaaaaaaatgtaatggctttactgagaaataagtagtgtacagtaaagtgcacataaagtgtgtactttgatgagttttgagatgtctacatctgtgaagtcatcctacaattaaaataatcaatgtatccataacccctaaagtttcatcttgttcctttgcaattcatgcttccttgagtataaacacagtaaagtgcccaaataatcgtacagcatgataaatttttgcaaggtctatacatccatgcaaagaagatccagatgaatcattatcgccaccctagaagcttctcctagtgtctggttccagtcactcgctctgcaactctctataatcactctcctgtttaacaacacaatagttttaactgaattattactttagaaatgaattctttcatctggcttttattccacatgagattcattcacattgctgtgagtagttgatcattcatttctcattgctgtaacatttttctattttggtatattaccattatacacttaagaacattttttttcattacacagcttatgagcatttgggttctttccaatcttccatttccatgtgttcattagccatgtgatactctattatatgaagtttctgtacagttttttgctcatttttatcatatacgggtcctttgtcaaataacatattgtgaatagtctctcccattgtttattcactctttagtatgttttgatgaacagaagttcttaatatactctaatttaaatttttattatttatggttaccacttttgtgaactgcttaggaaactgcctactccacggtcatgaaaatgtttttttgctgttcacatttagatctataatgtatctagaattggttttttgtgggtgcgtatggtgtgaaatagggatcaggataccttttccccccacatggaaatccaactgaatccatgagtatagcaggctgcttatattccttgctaagtagagatgacttaagtgttctcatcatttacctggattcaaaatagagtgaaattttagttcattctctgcgctctgctatcacccagctttctcttggcataaacttatcaattctgaatttagctcagtgctaatggttctaattagcccctgaaaattataaatgtaccaggtgctcatgtgattccaaacacaaatgcaagtacaagtatagaaaccttgtgatagtacctattcattttgttttttagatcttgtaatacattatctgctttggccagctgttgttaataaaaactttatmgtctctcatttaattcccacaataaccacatgggatagggtttcattttggttatgttagttgcaatggacagagcaccattcaagttaaccaatgggaggttaatcataaggagacacaaaagtggatcattcttaaggagtaaggcagccaagaccagtctctctctgggcatctctgcctctcggggcagctgcttctgcaggcttgtgctttcgctccccctggggaagagggaaagtagttgtcacatgggataaaacctaactaacgttaagggctgtgagttgagtacttccccttttggaagggactgtggactggtgggtttgatgaaacatcttatacaagtcattataatgaccattttacagataagtcagacagactgtagaaaaggtcagaaacctttcgaccaaagccatagggttagtgcagrgcggaacatctctgargtcaaagcccagactgctttgtttatgaaaagttgtaacttggctctataattcagtaatttaaatatatatcagaaaagagttggtgtattttcttagctctacttagtgcattttaaaaaccagtttaagagtttagtttccactttacttaaaatttaagtagttaaaactacttccagtaggggtaattggttatactataaagttctttgcatatttctaattttaaaatttgtatcacaatattattaaaagcagtatttagaaataatcgtactatttaaagttttcatgcattmatgataaaactattttgtcatttatgatgtgttttgtttcaggttaayatctttagtctcagctgtcaaccactctttctactaactagatgttacatgctgagaaatgttattaccatctcaactttccagaaagcagaaaatctttttctggctgtgtgcagacactaggaatacaacttttstttttcttaaagtttgattataaagtcccccagaagatgaccttttaatattcctgagtgcatgacctgtaaggtccccattctggttcttacaaggtcttggtaattcattaaggtaaaattatttcaacaagaacctcagtgctcttatagctgttttacttctgagcttttatttgaagtacacgctaaaccatgaagtaaaagtatggcgtgttactccaagcacaatgcaagtagtccttaaaatattcctatctcccttgaatatacctctaatctacaagcagccaccctgggacaatccctgtgtgtcttttatgcaaagacaataaagcattcaacagggaagggacatgagacaggacccaaacaaatagagtatatgccacatagggttcctaaaagcaacgtttgtcttctggaggcaattagtaatggcatcatgctgaaggcaaatgcctgttgcacaggcacatacaggtggtgttgagtatacagctttgtttctcaaagtagaatacttgggctgctagttaaaatgtatattcctcctgggctctctctcagattagtcaatcaaaatttatggagtagggcctaaggattgaatttttaatgagcttcccaggtgacgtgcactgaagatgctcaccagcgtatacaaagaggatggaatgacataagtaaaggtgtaggagtaggcagtacacccattcaaccaaccatatttataaagcatcttattaatgttctaaatgctgtgagtgtggctgattttttttcccacaagaagrtaagtttaacagctgacagaagtttcagtagcattaaatctcttcaygctatggtggaaaaaagaaataacagacatttcccaaagtaacttgcaggatacttggtgtgtattttcagctctccttgaggaggcggcagatgcttctgttagaaaccctgaaggtgaaacagaccattctggagccaatccctacttcactgaagttgcccattgctgtcagttgctactggttgcagcacaccgagaccaaagcaaagctacatcatctacaatccttactgctcacaatgctagtggggcccttgattgccataatcaacagccctggtaggtaactggaaattacaggagtatattgtggcatgttgcttgcaaactgtttactcgagtttacacaaacaaaaaagtattcttggattatttactcccattaattgtatcacaacttagatgtggaggcaccaaaatatcattcattcattggtaaatattttttaacacttcatgtgccaggctcagtgctggagggcttgaatcttaagtatacagcagtgagatgtgttggggtactgccaacttccatctgtttggtggcacctactcctttaacttgtgaattgtgacagtgtattttgccagctgcattttgtattccatgttacctatccagttattagcacagcagcaacgtcatcacaagaaacttgcccagaagtgaaacttatctaaatacctacaaccactacattcttgcttatacatctttttattcctttttctctgctgtaggtttcaattagtatgtaagtagtgatggcagaaatagtaatttgtccttttttttttttttttttttttttttgagatggagtctcactctgttgcctaggctggagtgcagtggtgcaatcttggctcactgcagcctctgccacctgggttccagtgattcttctgcctcagccttccgagtagctgggattacaggtgcctgtcaccgcgcccagctaatttttgtatttttagtagagacgggktttcaccatcttggccaggctggtcttgaactcctgaccttgtgatccacccgcctcagcctcccaaagtgctgggattacaagcatgagccaccgcgcccggccagtaatatctcttaaatacactgaggcaagttcatctgcatataataccaggtgaagtaaatgctgaaacactgggacactttaatacytcagtggaatatcctctttaaagattatgaatgctctaacactgtataaacatgcataataattatactctggaatagtactatctaatatggtggctactagccacacatggccaaagttaaattccatttaaattaaaaattcagcttttcagtcacactagccacacttcaagtgtcaggtagttacatatggctataggctagcctactgtattggacagcactgcagaaagttctattagatcgtgctactctagtttactattttaataagttagataaaagaatgaaacagcatggattcctgtttctaaagtattaaggctcaagcttgacagctgtcagagggactgttgttatatgacagccaacttaacacaaaacaaatcagttaagtcccactgctgctttatgaacacaggtttagagtatttcctctgattgaataataaatacagtataagaaagctctcagagcacaagcctattaagtttttacctgagtccaagagaaggggcatgtcaagggtctgtttcttttcttttaggaaatgtggaccctgtacccaggcaggctcagtgtcttgctcctcgctagttggtaaaaggtgggcctcctttttattattttcaaattggtccagatgttattttgtgcacccctgcccaaacaaatctgtagaaacttacagctaaaaacacacaacattccttatttcctaggattgttgcttcttgccccttatcctctactatgaaaagaaaatgattatttgccaaattctccaagtcatactttagcttcctcctataaaacacagaggtcaaaatgtgttttgaacacacaggttgtttctttaacacaaatgcaccacagcttgggagtttcggtgaaagagaacagtaaagagaataatatttaatagtcatttgtatttttcatagacacagatttagggtttagagaattcaaatgcagacatgtttatggtcaggtagtagaccagtggaaaagatcttatttcagggaaaaagtaaattccgatgggttgaataaagttaggtcatcattaaaaagacagttcagtatcaatatttcaatttatacagcaaggcatttatgaagccagaagagaaaaacatcttagtttttttaaattaatttctttctttatagaatttgtagtatatgtggagaaaatgaaaagctgttacagtgcttttagaaatactgcccttgggctgtttctttatttaggtaaggaagagctgcaggaagatggtgctaagatgttgtatgcmgagttccaaagagtgaaggcgcagacacggctgggcacaagactggacttagacacagctcacatcttctgtcagtggcagtcctgtctccagatggggatgtatctcaaccagctgctgtccactcctctcccagagccagacctaactcggtaagcaccatgggaaactttagttcagatggaagcacacaaaagtaaatacagtattttcacttatatttaaagcaacaaagttacttaaaaaaaaaaaccaaaacaaaaaaaaactaatcttaatgtaattgattttgagtcactgttacagctgaagagctggaaacgggaaaaatattaaattatttccatattctcaaagaatgtttccatgattcaatccaattttaaaaaatcagttcctttaagtaatacattaatatgtgggagaggggaggcaatcattggtaggatacaactctctcctttcctctcagtctttaaatgtcactttgtagagcctttttctgataacccaccctagtgagacacactgtctaccctcattcactctagtcctgttactctatttttttttaattgcatttcttaccacttggcatatggcttactcattcattcagatattaaatgcctaccctgtgctagggtgtagggacaaaaacagaatctcagctctaatggagctttcattctaagtgagatgatgagtagatgcccaagtgaacttaacctaggatgtttgctttaccaggcaagaaggacaataagggagttgagcctatgtgccacagagtaattayaatgtttgtctgtggagtttaagctgggtatgataaaaagaagtgacagcagcagtagggtgtggagcagtgaaaaaagtgataggatcaatggattggacatcttggtaattgaccatccaggaggtacttgagggagagatgaagataaaaaggagatagattgtgttttgtttgtctctccactcagatgtaaactctgtggggggaggggcttgtctattttatttgctgttgcagccccagtgccttcaatactttgaatgaggatatatggacacatacaaaatatggtgggactttacatgtttcaaggtaaaaagcctcctggcagtaaacagtgttgttaatatatctctgggccttatatctgagctaacacaaataagactaattggcctttgacccctggattctttatttctttcgtttaataatttaaggccattcttgactggatcctctttagttaccacaaatccttttaaaacaaaacaggaaatgcaaaacaaaacagttctcttaataatgatttaaacagcaggattgttcttgaatcttagcataaccaaggctttttacacagagatgttacactgattaaatgatggttctacatggattgctaaggtaccagtttatcagctttgtccataataaacttgtggattccaattaatcccatcttctatttgtgaagtaggtttttagtctcagtgaatgaccttgcaaatgatgccaataaattttctcatattctaacaaactgcctgtttggtttatcagggtccttttaaattccttttctttaaaattaaagtgtttgttaaagacacctgctcagtctggggctagctgcaaaaccactaagcatgcatcacgtaatttgttgatgaaaagtttttaagtatcaccagcaaagaatctttgtcataccagctcagttccttccttcaaagaacagattattcttaagtaatttcgataatattatagagcaataagagctctcattgtttagatgcatttgttgaagctatgtcaatggtagttatcctgttgcactgaattacttctttaacaacatacktttttcttgctttgaacagactgtacagtggaagcctggtgcacggactatgccagcaactgctagcatcgacctctgtagaaagtctcctgagcatatgtcctgaggctaagcaactttatgaatatctattcaatgccacaaggtcatatgcccccgctgaaatattcctaccaaaaggtagatcaaattcaaaaaaaaaaaggcagaagaaacagaataccagctgttctaagaacagagggagaaccactgcacacaccaagtgttggtatgagggaaacaaccggtttgggttgttaatggttgaaaacttagaggaacatagtgaggcctccaacattgaataaaactcagtttgcatcaaactagatgtatttaatataatccttacttaaaattcttccgttaccacccttgaaacaattagctttttctttaggactgacctgttaggggataaacatcacaataatctgaattccaagttattttgtattttgtttttaataaatacaacctgatttaagaagcttctgtatttctaaatatgtttgaaaccatgtttatacttctcatgttccatttcagcaagttaatggtaatatagtctatatgctttaaattgcagcaatttagccagctacattctcagaaagtagaagtctcactcaattattgcctttaagtagcagctggttatcatttcaaaaagttttaaaaacagtttcctctttgtactttagtatgaagtctggccaatgaaagttagaagtgaggatgccagacagaaaactgtctctactaaaagtaagtacttagtcaatgagaccatgacaggattgaagagcactttaggtgcactccaggttttaaaggagaagttgaaactaatggcttcagccaaataagaaacagcatcctgagctgttagacctggagaaggaggaaacagtgagaagtgaaaatatcaagagatatatgcagcaataccagaccctatgccctctttatactacagattttgacccattaatgagatgtgaaagtatttaatgagtcatacccagcattttttaatgaaaaagttagaatggaaaatatcagatatacatatcatgtattaggtgattgtgtaaaatatattccttactgtggactgtagggaagaagtttaaaaggtactgctctggaaaatactgccaaatagaggctgctaaaattagaaatacccagagttctgaaagtgccggccagttccaaatgagaacttgaaaataaagagaaccaagtagaataaatgcattgggcaagatctgaaaatatactcaaccttcattttacttgtattcatacaaattgtgttcttccttctgtactctcccactggtatattccatcaggaatagccctaaaggtagctttaaagctgccattttgagcaggcctatgtacagttcctaatatctgataaacaattttctttactttactagaattaccatactcttagagaaataagcccagcatcagccagtgtcaaacacacacctgccaagtgttgacttttacaaaaggcacaataaatcatttgcccctagagtattcaaccctaacaattactttgttaaataagagttcttgaaataaggaaatttttattattttcagaggattgcatgggagttcctcagtaaggttatttttataaccttactaacaaccatctccaaagagatggttactcccagaagaatcaagaaaagagtagtcaagtacatctatttttgagaagaaatgttactggaaaataaggtatctaatgaggactataaacatgtgagaccggtgctggatgtagtggctcacacctgtaatcccagcactttggaaggccaaggcaggcagatcatttgaggtcaggagttcaagaccagcctggccgacatggtgaaaccccgtctctactaaaaatacaaaaattagccgggcatcatggagggcacctgtagtcccagctactcaggaggctgaggcgggagaactgcttgaacccgggagacagaggctgcagtgaaccgagatggcgccactgtactccagcctgggtgacagagcaagactgtctcaaaaaaaaaaaaaaaaagaaaaaagaaaaaccatgtaagaccgttgttatatcaaatcctccctaccttgattcctggagtttgaagctaatctggagactatattaatataactgtcccatttcctgggttatcatcaacactgcttcttaaaaccactgaattacatctaccatgtttttctttcattaaaagtgtcctcctccagcagaagtaataagtcaggttcctttctctaaccatggcactcaggaccattccactgaaattatccagccttgcagtaaagcagtgacagtctaataatgtccctttaagtatactactctggtgtatatcttctcctacatgtattagatgagaggtcacaggcacttcacaggagtatgtaaggtggttcaccgaaaaatgatgacatagcacctgaaccccctgcagaagacattcttgttcaggctgcttgggagacaacacacaatgaaatgacaagagattattttattaagttggtgcaaaagtaactgtggtttttacccttacataaagcagtctgtcaagtgcaaaatggcaaagtgcagactgaatactacaataaggaaacagcggtcaccaggatgagaagaggttaaatcacaagaagattctcagacctggcttttgacctggctttaaagaataggaattttaaaattgagatcagatatacattaggaacacctgtgtagaagcagaatattgtacatcccatattccctttscaaaatctagtttcctatgtttgcaatcaagtgattaggtcctgctctttctaattcagttctaacaaatgaaatctcatcttaggctttggaaactgtcttcaattagcagttcaagtaacaaaaggaactctgggcagctaagatgaataaattttagagagaaagctgcagagacaggaaaacttttactataacctaatcatgttctgtatttagtggtgataaaattatactggaagtctattttttaaaagcactttttgagacacctggaccttgaaagtttaatatgcatcctgtaaatataatcacaggtctttcatgccatttgatcatggggaaagaattcaaattaaccttttgacatctgaatttgaatttcagaagataaagaccatagctaaaaagcccttagaattatctttttctcctttgtgcacaaaaggaaataaatcaatgactatgcctcagttgccctacttgcaaaataaggattataacagtccaaattattgtgtaaaagatacaataacaagtatatttaagttacttagcacagtgcctgatactaaaagtgtgttataagtgatagccattgttatatccgcacatgaaaagccagggcaaagcaaggaatgtgggaagaagtgagtgagtgttaagcagtacaaagattaagacaacgtgagaccagagttgccacaggtttaagagcagaattttgcagaggcaaaggagatcaacactatcaaatatggtgaagaagaaagatgggcaggaatgtgagaatattatagcaactccagccgtagccacactggaaagggtagaaaactaccaagacaatttcaatgggcagccaagctcaaacttagaaaataatgaaaaaagaccagaaggaattatccccatgtgagtacctgtcccccttgagccctttttcctatgttcagagagttttctgtagtgtttttaaagcccaatttgaaagagcccttggcatgtttaaagatagaaaaaggtggccgggcgtggtggctcacacctgtaatcccagcactttgggaggctgaggtgggcagatcacgaggtcaggagatcgagaccatcctggctaacatggtgaaaccccgtctctactaaaaatacaaaaacaatatcagccgggtgtggtggcgggcacctgtagtcccagctacttgggaggctgaggccggagaatggtgtgaacccgggatgcagagcttgcagtgagccgagatcgttccactgcactccagcctgggcaacagagcaagactctatctcaaaaaaaaaaaaaaaaaaaagatagaaaaagatgaagagcagatattaccatttcctaggaatttcctcttcctgcaactaccagggttataacctggccctactccataatcctaaggaggccaaacccagttttccccctagcaagtttgccagatttcactgggtgctgctctctaccacatgctgtttggctggctggtgtaccatttacctgagcagcacctggaaagctgtcactaccaagaccaggaagttccataaaaggataaactttcagtggtgcctgactcaaaatatgacactgtattttcaataagacagatgtggggtacttggtgtttatctcgtaatgtcttaatgacacatttcagtcatcacagctgaaagtgattctgcatcttgtaccaatttgaaattaaatactactcttggaaaaatgtattaaaaacattacaccccactttcagcaacagctttctgagccatacaggataagctgcttctgcatttctttccagaggtgtgagtaataccaaattcaagtccatccagctgtaaaaattctaagacgagaacttcatgttaaggaaggaagttttaaaatttaaaaggcgtgactgcaccaggccatataacagtctgttaaaatgagagaagtaaatgaatgagataatacatgaaagaagtatttccagctagtttcactggattctgtttttagggacagaaatcaaatgaaaaatgaacatgctacaatgcacatgcaatctcttctattcctgctactcctgaaaacattctatttggttaaaatagctaagtctttctctcaaaatataaatatatttttatatttatgtatacatgcacatatacagtcaccttttggtatctgtgggaactatgcaaatatgttttggtttagaatgttctgttctgaaaaaatgagttagtgagtatattttttccctaagactgagctgttaggatagtttagtttctgctattactaaatgttgtcttctctaagcaagataacatacttaagcctattcagattaagctttatttctctgggtttgtacaaccaataggagggaaacctccacttctcttgtgcatccaagaggtagaagtgagcccatcaaccagataggagcagactgcttcagatggataaaaaattgggtgagcaaagagagagagatgggaagcacaattcagatgggacggcagatcagaacactccagccactgtaagaacaagaagccttgataatgtgatggcatgtcctcctggttgatgatgttttaacaacagtctgagacactctgactttctctacatgggggccttgatggagactcagagtagtcactgacatcaaatctgctaccaagagcatccattcaagagagaatatactgttgggagattggagggtagagaaaattgatggtacttcctttctaatccactgaatgcaaggtacagggcctattttcctctttttgaatatctaaatgagtaggcaaactttctacaaagggctagatagtaaatattttaggctttacaggtcatatagtcccttgcaactgctcacctttgctgcaactgctcacctttgctgccacagcatgacagtgccaataaacaatattgtaaatgaatgtggatagttgtgttctaataaaactttatttacaaaaataagcaacaggagaatttgaccagcatggcacagtttttcttttctttcctttttttttttttttttgagacagtcttgttctgttgcccaggctggagtgcagtggcgcaatctaggctcactgcagcctccacctcccaggttcaagcagttctggttctcagcctcccaagaagctgggattacagggatgcatcaccacgctctacagatttttgtatttttagtttcgccatgttggccagactggtctcgaactcctggcctcaagcaacccgccttccccagcctctcaaagtgctgggattaagggtgtgagtcaccatgcctggccatagtttctacaccaaaactaaataatagctccatgtgggtgagttaaacaagatcaaattaaactatttccctaacttgtaatacctctagctgatgcatggaccatccaaccatccagacccactccacatagaaaaatacttacaaaatctaatgcaatcctattacgcaaccacacagatgaatgagacaggaataggaattaaaacatactaatttatagcttgttaaaattgatctaataatgcttaaatgtaaagtttgtcatgtctttcctatca

SEQ ID NO: 93269 - DNA, 113369 bp, Homo sapiens
  misc_feature (1)...(113369): n = A,T,C or G
cttcaaacaaaaacgtttctaaacacaattagacaatctttgtctaatatcaccttttgtttgggtggggatatgtctcaacccgagtagaaagaacaatctagattaatacactgcaagtcaataagccactggtaaagaaaaaaaatcctaacttgtacctgatttactccaggagtgagtagttccctatatgacaggcaaagagaaatgtttttaccttaccaatgccacatcttgtcagcatttcagcagtcacactacctactccaccaacacctactattgctacggcaaaggtacggattttctgtgaaatataaaatagtatatgttggttaatagctcttcatcaaatatgtcaccagaagttattttaatttactgaattaatcttacaaaaacttggaaagggtttatcatacctcatagtcgcttacaattcccattcgtttcaatgccatcaagcggcttaaaacaaagaaaaatatgttttaaagcttacagtcttttaggtattagtaatacaaatagacatacatcatcacagaaaataaacaccaaaatataatcattactaatcgtttcaaagaggaggatgcttacaggctggtttttaccagatgaaactaaattacccaggcaccgtttaaaaaaactctcccaagtgtagcatatgaaacaagattggtttttaaaagctatgtattctgatttgcagccaagattgcgactactacttaaatgttaagggtcaaagttaaatttcaacatttttctatgctttggtagaatatgtaaatatttaatgttttaacactcagatctccatcatcagagtaaattcatggctggaattccattctcttgttgcctctgcccacaatagatgatgtatacttttagtaagcacctactgtatgccaaagactctaagaggtgctttaactagttactggtaatctgcagtttaagtctatggttaattcccattcatcttcactttaaggagtcaaatagttccaccaggcttgttaggaaattcagcctccacccccattttcctctccctcacttttaagtccattaccatcatattcctaaacaacatgctaacattgttatttcttttcagttttagtcaattacgtgaatcagattttgctcttagcattcatccccactgcacgcagacatcttccatcccaccaacttcccaatattgttagatagtcatcttggttagatgttaactcttcacaactgggccatgcaatatattaaaacttaccctttcctctaactcccaaccctgaagttaataagtatgtttctcctgatgcttaatttcctatgtattttcacaaattcaaccgccaactttccactagttatctaaagttcctctagatacattcatattcatgaggtattctatcaatttcatcttcttaaagatgtatctcctagaatctgacatgattgtctctagacttactgcacatacagctcccttcctaggctcttccttcatcattatactacaaagtctcttaatttctttattctgtattaatccactgtttcctgtatgctatagctcactagttctaaagtgtctatggatcaacaacaggaccacctgagaatttaatagaaatgcaatttcttaggccctaccctataatcacccactgaatcagaaatcttgaatgtggagtccaacaatttgctttaacaagccctccagtaattctgatgcacatgacagtttaaaacactgtcatcaattatttttaaacttactctcttgctgtggttagaagaacatcttccagtagttttgcaaagggtacggcaaaggtaaattttgagaactttcatttctgaaaatgttccttatcaaaattatattctttataaaaatgacaaagcaaagggcatataattgtgggaagctacacatatactcttaatcgatagtttaacttggtaaagaagtctaaagttagaattgtctttcaacattttaaggtattgctccagtgtctcctagcttgtaaaatttcacagtgtgccttaatgtgaatctgttctcatcccttgtgctgagtttttagtggactctttcaaaatgaaaactcacattttcagttctgggaaatgtccttgaagaatctggttacttccttgtttggtttgtttttcctggactatctggaactcctattatttggaagttgaaccatctggatttgtcctttatcttctttctccagttatctactattttagttttctgctctattctctggatgatttctttcaactttattttccaacacttctattaagattttcatttctattaccatctccatttgcaagaattcctgatcatctaaatactttgcaccttgttcctgtatcatttgtaccatatcttctctcatctaaggatactaatgataatttagggggatgtgtttatcttacatagtctatccaagttgctatttttatttctttcatgttagaagtttctttcatcctttgttctgttcatatttaagtgtgggacactaataaaggtaacaatataggcaataactgtttgactttggacttcactgtagggtcatctggccagactatttagttgagaaacccacaatgtcagtgtctttcagtctttcctcttggctctatcagattccctagagaataatctttcaaactccaacctgagttggagttccaaccccacgatcagctgttggaagtgaagaagcaaggctgggagtctcgacactcagtatgtaagcatttagtttacattcagtcacagcattcagcatgtaaacaatcagtttaccccttccttcaggtacaaagacctgccccaattattcttggaaatcttctattttactctttctaatgaagaaatctctactctcctcttctggtagggaaggagtgtttgcccagttacccacagtggagtaggggatctggggcttttgtttcttcaacagattttcaactgaaagttttttttagccctacctgaagttctgcaagtacctgtgcctattcctgagccttttgggggattcttgcaataaactgggttgcgagcttaagattaaacttctctgaatctattaaatcagttaccttcacccatcccttctctagtttccaaattgttactataatcaagtacagggacccacccctccctatcagttattaatacgaaccctttatattttcaatgggagtttcttttaaaaaattcctttactgtcactttagtgaggttgggtagaaagtgatggcagatccatcacaggaatttgctatccttaccttgatgctcccttcaatctttaaataatctgagaagcatggatggcaacccccttttacagatgagggaaacggtttgggttaatcaactgcccaaaatcagctaactggcaagtggtattctgagctgggtttctgagccaggatttgataccaggttttctaatctcaaagcctctccaatttttccacatgcttataactatattccataacacataattttacggttacttgtgttttttaatatcccacctccatgtagtctctcaaactgaagcaaaagtcaggtgctttatatttcttttgtatctcttgaagcaattaaaatggtgttgaacacatacatatccctttcctataaccttttgtactttatcataattcaataacctgtactttatcaataataacactgtactttatcataattcttatcacctgtactgcaatggcatgtttacttttctatttatctcacactcatctggtaagctctagagggaaaagaccatgtctactttatattcacagtgtctgcacacaataagtactcaatacaaagtaaataatattgtcaaggaggactggagacaaaaatgtactcagtaaatatttgctgtatgaacaattcaaaaaattaaagctgaactttattaaaattccatatatcagtgaacagctttgggtatcaaactgccatctcctgtatagcaattttaataaagtcaatggtgcaaatcagatagaaaatactacatatttagacttgagttctgaaagttttgttataattacaatgtcaagggatcatctcatattaaataatgtctgaaagacaacttaaattcatgacccatattcctctgcttttcattctggagggaaaatttcaaagtcttcatttgtaaaattttaaaatgttttaaaaatgtcaaatagtttccacttattctgattagagatgtcagttcatgcttatttaatctctaaaaattctggaccattaaccgttcatatttggcaacacagttaaaacagtgcaccctaagacttctactgcggctttatatatcacaaactaaaaccttttttaaaaatcaaaactgttatgctctttaaaggaaaaaagcaacaataaaatcttccttatctactttaacactatacaatttttagctacacgacttaattgtttttactggggagacggttcatgagaattttacattaagacaaatctaatgcaagacaggccttattatttactaccaaggcatgaacctgaggtggctctctaagcctcaattttctcacttatataatgggggtaaaatagtagcaatctcatagggttttggtgggaggagacaatgcatgtaaagtgcttacacagtgaaagctcaataactgcttgctactaaatgcacctagcaataaaatcttgtataaggcttgccatgtacaagcgctactctaagacctttatacatactgattttttcaatccccacaactatgacagagatagatattactattatcttcattgtacaggtgagaagctgaagcggaaagtttcacaacttgccaaaggttaggcagttacgaagagagtagttagatttgaattgcaatcagtctggcggtagagtccttacccttaaccattgcactatattccatctgctgaattgataagctttgttaggaaagaagaaaagagaggcctgggcagtcttggtaatgtcgaatggtttgagatgttaaggagcacccgaatatctcagaatagagctaaccccgctctcccccgccccgaccccatttaagatgcattgataagcctttaatgaaactcaaagtttaccttagcaggtttaatatttgatctcatcttctgaaagttcttactatcagtcttatacacagcgaggcggactaattaagaggcaagggtgataggaaactggacacacgtcctcagcaggcacaggagcagcaccatatggctgactcactggaggtttttaaaaaagagaaagaatatcttccgatcagtactaagatgtggccttgcccatttgggaacaggattcgcagaccaagaaaagggtggcgggcgtccccatgagcgggacgtgggaagcgcctcacttctgacctcacggagcctgacctcgtcccccgcgcctgcctccgaccggcgacgcaggttacctgtagggattcgaatccaccacctctgagctcatcttctcgatgcggacccggccgccccctccgtcgccgctcctcgggacctgcagactcctctcctgggcaagttcccgctccagctcctggacccgctgctgcaggcgctccacagactccgccatggctgggactccggccgccaacgctcccagcccgggccttcgccgccgccttcgccccacgttgctcggctgggcccgcgaggggtacgtggggaggcacctcgccgctgccttcctagcccagagccctggggacgtgcacccagcgcctcacagacagacacgtctccgagactcccacaggccttcctcggagccgcttccggtgcgtcgcagacatcgctccccctcatcaaaaacctggctctttcggcttccttcctcgctgggccggctaaacccggccgcagcagcaccggggtgataagtgtccaggrcaggaggccagcgatgttgccttgctaaccgggtatctaagagaaacagggtctttttattcttaggctcgacagtctgacggccctttttctgaacgggaccctgcaggtcttccgcctgctgttgcattaaatttgggggtggaagaggcttctgcgttgttccttacccgcaacgatgaccatggctttgccttctttaaaattgaggcctccaactctgacgctgactggagaattgaaacccgaacacacattgggctcttttggcacttgactagagctaaaacctcgggattcagcgggcaagcgttgctcagcaacggcgcgtaggctgtgtgcggttggctggagccagaccccaccccggcctcggcccatgctctagaggggacgttgccccaatcctgaaggacttcggcactcgagacctgtggatgccgcgttgctgtggcctgcgggggtgatcatgaagccaggtgctactggcgagtccgatttggccgaagtgctgccccagcacaagttcgacagcaagtccctggaggcctacctaaaccagcacttgtctggctttggggccgaacgtgaggctacgctgaccattgcccagtacaggtatggatgtcagcctttgcctccagcggaaaaaaatttgtacattgagttttccttcctttggccctgggtggtttcctaagtttctcccaccctgattgcttttcctgcagtcagtggacgcaccctacaggcatgagctgctattgccggccctccgaattcgatgctgggggcttcccaattggagggcggtaatggaagcgcaataacgttcaccattctactatccaaaggaatctttgttaaaggatggatttatgtcccttgaggattcaccaaggcaattaaggctacaaattctgagaaatagatgccttcttttgtgatacagccattagatctttttctgagaagctggtgtaattccgtttgattggccgtattccgggaggctgagttaatgacaccagatggaggatccgaattcgagtactagcttttccacttaggaggtcacagcaccactttgggcctcaggttttttgaagtgaggtaatggaactgagtgagaggatcctgagagtagcgttccccaccgggaatctggctttagtctgatgttttacaatagataatacattcttaaaactttattctaaaaataacattgttactaatacagggctacagaaagagtcctatcattcagaaaactggatctgtcacttgctgtctgggagtttaaatatgttacataaacactctgagaactagtttcctaagttgtaatacctattttgattagtcttattaatgaaatgaaataccgtaatataggtgaaagggcgtaaaaattgcaacaacatagtgtgctagtggtattttatcactagcatttatattctttgactactgattttggtgaaaatgaaaataataataaatgagatggatcagggaacattttagggtgtagaatttaaaggtcccatgtcccaatagatattggaagatgaaggraaaggtggaataaagaatagctgagatttctaggctagaagccttgtgttgtaacaaactgaaacagatcaaagttcaaatttcaactatttcaattgctgtggaatttggacaagttaccctttgaacatctagtcctgctttggcaaaaaggagatagtaacgttcatattgtaggagtgttgaagaggtacataactgaaagatacttaattctgaaccaagctgaatgttaaaccataaccgtgttcaaaaaatgaaattagttgtaaattagttgtggtataaaaattgcttccagaaatgttgtataagcttggtttaataaatatatatggaactctggatcccacagagaacacacattcatttctaggacacatgaaaaagtttataaaaattgaaaacacataggccatgaaggaagtctcagaaactcaaaagaatcaatctttatattttgaaaatgtgtgttttggccaggtgcagtgactcacacttgtaatcccagcactttgggaggccgaggcacgtggatcacttgaggtcaggagttcaagaccagcctggccaacatggtgaaacccccatctctactaaagatacaaaaattagccgggcgtggtggcacgtgcctgtagtcccagctacttgggatgctgaggcaggagaatcgcttgaaccaggagagggaggttgcagtgagccaagattgcaccaccatgctccagcctaggtgacagagtgagactcaaaaaaaaaaaaaaaaaaaaggaatatgtgtttttttaataccaaaagtttaacagaagatagctaacaaatacatgtttataaattaagtgattcatggattaaagagccaataatctacatagacagtaaaagactatcaaagttcagtgtacagaaatcaactgcatttctctactttagcaacagttaaaatgtaattttcaaaaacttacaggagcatcaaaaatataaattacctaagtaaaagatgtgcaatacctttgtagagaaatgataaaacttttattaggaccttaaaaagaattttaaaaattgagagatgccatgttgttgaataggaatattcaatattgcaaacttttttcttccagttgatctattgattcaaagcaatgacaatcaaaatcctaatttttttctctaatttgaaaaagtgctcctaaattttatgtgtaagagcgaagggctaaggatagcagaaacatttttaaagaaccacaaggtgggaaatttgagttaagatggtatgatattagcacagagatagacagaccaataaaatagaacagagagttcacagaaagacccacatatttatagaagtttgataagtgacaatgttggcactgagagtcagtggggggaaaagaagaacttttcaagaagttatactggaataattgttatctgtatgaagaaatagaaattagactctttatctcacacagttccaggtagataaaagaactgaatgttaaactataaatgtttggaagatgtgtaagttatatttttgactttagagaagaaaatattttaaagacaacagcagaaaccacaaaggaaatgactgataaattttcattaaaagacttaaagtgaaaagacagaagaaaatattttcagtgcatataatggttaaaatattcagaatataactataatagctcaccagaaaaatgggcgaaaacttgatgatgctcaactttattatactgtagtaataagggaaatgcaaattaaaaaaaaaaaaacaacacaatgagaaaccatttcacaccaccaaattgacttttaaaaaatctgacaatagactgggtgcagtggctcatgcctgtaatcccagcactttgggaggctgaagcaggtggatcaccagaggtcgagttcgagaccagcctggccaacatggtgaaaccccrtctctactaaaaatacgaaattagctgggtgtggtggtgggtacctgtaaatcccagctactcgggaggctgaggcaggagaattgcttgaacctgggaggcagaggctttagtgagctgagatcacagcactgcactccagtctgggtgagtcagaggcagactccgtctcaaaaaaaaaaaaaatctgacaatatcaagcatcaggatatggggcaacagggactcatataggggtgtgaattagtatagctgctattgaaaaataactcaacatgatcttgtaaaaatgaagttgggaagatacacatgacctatgacctagcagttctactcatagatacatactcctgagacttttcttgtactacagtataaggggacaatctacaaagatgttcattgtactgtttgtaatagcaaaaatccaggaaacaacacaatgtctatagatacagaatggatgaataaattgcagtatattcacataatggagtagcatacaacagtgaaaatgattcagctacagctgtacataacacagaatgaaaaacgtgaagaaattaacagtatattatatacagagataaacttcaagggaatgataaatataaaattcagaatggtagtcactcaaggggaaggacatacagggtttcaaagacagtaattttctccgggtagtgaaaatggtgtttgtggcattactattcctcatgccttaccaatttcataaatactctttttatctgcaagatttacttttaaaatttgcaaaaattaaatcttattggaaagataaaatatttagaattaatcaataatgaaagtattatatagcttgatacaacaaaacttgtgatttgcagctgagtgcctaatatgtatctggcactgtatcaaccactgaggatgtaacaataatcttgcctccctggaacttccattgtatttgtagaagacagacaggaaaatcagcttctgaactttacaatgtagaagttgatatgtaacatggaggaaaagagaataggaaatgtttgggtgtggggcaggaagatttcctcgagcacacggcattcagcaaagacttgaagggggatgaaaatgtgagccatgtaaatatccaggaaaagagtgttccagacagaggggactgctaatgcaaaggccctggaagggatgtgtgcccagtgtgttgaggaaacacagcccaaatgcctgaagtagtgtaagcaagggcaacagggaccctgtcaggcaataaagagactttggcttttactttgaattgagatggagagagacttaaaacatgcttgagcagaggagggaagtaatctttaaacaaacaaacaaacaacaacaacaaaaaaaacagaatctctgcttcttgtgttgagagttgactgaaggggccaagggcagaagcaaggacaccaatgtattacagtgttccagcagggagatatcagtggcatagaccagagtgggagtgtagaatgggtaagaagtggtcatagtgtaagtatatagtcacatgctgcataatgacgttttggtcaatgacgggctgcatatacggcagtggtcccattagattataatactgtgtttttactgtaccttttctatgtttaaatgtgtttagatacacaaatgcttatcattttgttacaattaattgcctgcagtattcagtacagtcacatgctgcacaggtttatagcctaggagcagcaggctgtaccacagagctcaggtgtgtcctatcgggttcaaatcagcctatttatgctaactccaaccagctgagaagtttcacaacgaatcagtgccaattaaatgcttaggaattcacgatttattgtgtggcttctacacaacaatcatgtaactctatccaacacacataggcattaatagagaagggaaacacagcaagtattctgggagaccagcacactgactgagaaaaccaggtttggttttcctcagaatgcccactgacctggtggtgggtagctgctcttttcccagagggcttaccacagccaaaggaaaggaggcctcagagttctcatgggcagagattctgcaggcatctcagccatgattggcttttacggctctccacagacatctccatggccattatcttcagctgacttttggctttactttcttgtcaggtgtcagggatgcctggccacagcagatgctatcttatcacctcagtccaccacacatatgcttactactctgagtggtcagtgatttcactgtaagctgagtcacttgtcataagtgactccattatgagacatttatgatcataaaacataattatatatcagtgcataataggctataccatctaggtttgtgtaagtgcactctaggatgtttacacgtgacaaaaatcacttaacaacatattttccagaacacatccctgtcattaagcaatgcatgactgtattttgaagggtttactaactgattaaatgtgggctaggaaaggaagagacgaagattatttcatttctgccttggtaactgaaagaatagggttattgtgaactgaaatgtaggtgactatagaaaagcagatttgagggggaaatttgaggaactcagttttggagtgttaagtttcaagatgccttttagacatccaagtagatatgtatagtaagcagttggttatgtcttgaggtcggggcagagatctggactagacatataaatttgagagccatcgacaaaaagaagatatttaaagacataagatcgaaggtcttacttagaaaatagttcacataaaaaggaggtttggagactgagtccaaggcaccccaatattaagaagttagcaaattaagagaaacctacaaaggagtcttagaagaagtggccaaagaggtgggggaaaaccatggtttgtattagtgatcttgaaaaagtagtattaatggaaagaagggaatgaaagcttgattgaaatgggtttaagaagataggaggaggacgtgtaatctcttgaggagtttttctacgaaaggaaatagaaatgttttaagtaggggggaagtgaggtcaagagaaagctttttaaaaaataacatcatatttgtatgctgatgacagtaatctagaagagaaaattttgtgtaggagagaggcctggaaagaagtccttaagaaggcaggactctaatatgcaagagaaggggttgcccttagatagaaatgtgcacgtccttctgcagactttggagggaagacagaatatatgtgtacagattattgtatgcagtagatacagtagtgtaagcttgtggaagttctcatctgattgctcctatttgctcgttgaaataggaacctaggtaattaattagctgagaatgaagatggagaagaaagtgtttgaggtttgaggagagagaattatgaaacagccatccaagagaatgggagaataaatgagctaaggaaatatgattgccagatgtggttcactttgaggtttgctgaggtcatgaatttgaagcaagaatagatatttcagtagatattactaatgctttgtccagatcctcttggatccctttctagtgttgctgtacatgtcctgcctttgttggtttttgcttccaataaacagcatctatgcctctttttttggtaaactgccctcaggctattggagcaccctttgctcttactgttgtagtacctgagrtggaccttaaccaatagtgattcagaagtatgaaattttcattatccttgcttcagagacatgttttgaactttgacacggcagagttcccccattacctttacccccacctacacactggtgagatcaggctgaagctaccctctaagggactttgtcttagatcacacctttgcttagctttctcccctttcttgacctgcttccccaaatttcttattagttccccaaacatttccttaataagtcacttgtatataattttttttctcatgatctgtttattgggaacctaacctaaaacagtaattatgactgtatgtgtctttcttcagctatggccagttatatcagtgtaagcaaaaaaaaaatggatttaacatggatgggagttttgccaagcaaacaccatgaagtgaggaaagggcaagtgaagtatactgaaggtgtattcaaggtagtggttatatgatttgctatcaaatttaacctagttaaggaaagatttattagtctgttctcatattgctaataaagacatacccgagactgggtaatttataaaggaaagaggtttaatggactcacagttccacatggctggggagtcctcacaatcayggcagaagacaaaggaaaagcaaagggatgtcttacatgaagtcaggcaagagagaatgtgtacaggggaactctccattataaaaccatcagatctcatgagacttattcaccatcatgagaacagcacaggaaagacccactgccattattcaattacctcctaccaggtctcacccatgatacatgggaattgggaattatgggagctacaattcaagataagatttgggtggggacacagccaaaccatatcattccacccctgacccttcccaaacgtcatgtcctcatattttaaaatgaatcatgccttctgacagtcccccaaagtcttatttcagcattaactcaaaagtccaccgtccaaagtctcatctgagacaaggtaagtcccttctgcctatgagcctgtaaaatcaaaagcaagctagttacttcctagatacaatgggggtacaggcattaggtaaatatacctgttccaaatgagagaaattgtccaaaataaaaggggctacaggccccatgcaagtccaaaatccagtgggacagtcttaaagttctaaaatgatatcctttgactccatgttcacatccaggtcacagtgatgcaagaggtgggctcccacagtcttgggcaaaggatatggtcgggggatatgaggtgaatggcagtatgatcaatggatggtaggtcaagtattgattgaaggattgttggaattgaggcactagcaggagtgagtggaaaggtaggaggttagaggtagaaatgtttagaaactaggattattcagtgcttttactgttgatattgctaaagtgtagggtgtaactcctagaattactggctgagatagtgtcaaggaaaatatcactggtggagaaaattcaaggaactgatgggcctaaatgttaaaagggacatctgtgtagattttgaaatcagtaattaagacaggagtagtgttaatgagagtaatagtgaattatgccaagatccttaagaaatgaggagaaatgatctgagagttagtaggtgactgcaagaaaaaggggtagagggtggcagagtctcatggcctgagattcaaagctgagggaagaatttacacaggagggagagcaaagagtctggaagtagcaatgagtttcaggaaggatacagactccatccaggcttactagaagactgatgtgggaaaaacatctaccacttaagaagcctacaaaggaaacaggatcctcatggaatattcaggttttagttagagcaaggaggtgaagggtctattcagagaagatattgaagctgtatggaattgtgaaagactgtgagttccaggggcacagtggaaggatatcaggagttgagggggtggagaagatgtgggagaaaatagggaatgtgcagagccttatgggaattacaatgcagtaaacaagtataaaaggggaatttgggacttctggtattgatgatataaagagggataaagaacacaatgaaaccagttccggtggtctcaaggtagtagtgctgtcagtgataggaaatgggaagttgtaggtatgtattggggctggggagggacagtcttacactaagttaagtagtctggactcactgtttttcttatttttttagtgatgccaactttaaaagcctttgtcctctatcatgaattgtactttctacctatttatcatgtggataaagtgcaactgtatttccttaccctgtgtatattcagatattcaaaatgtctaataatatatgaaatagcagcccaagtatgattttttaaaaaaactgtcactaaactgacttcctacaaatcagagtaggatttcatgactgtgtgttcatgttcaaacttcatgttgagttttggttgccttattctgtttctgtagtcatggttccagaagacacacctctagaggatgggcaaccacttctagggaagtccctagcaaagcacctagcatggtgctagctctgttacactgtgataacggcagggtttttaccctctccagctcttttggctgatgttaaattcttccttctcagtaatgagattcttgaccagtcattgatgactccattgcacttgtcaggagtcttgtgtttgacttcatctttgattctgctttgccgtctctcatttttcactgtggcctattgaatacataggatctgagcaacttcttacaagaaactctgtctctttgtttctcgttttccagctttgtacttctatgcctcttggaccaaatactcagtgtttccatgggcaaacactgggtcatttgtcttttaatcttcttttttcctgatctcttatcaacagcaaacacatttgagatgctgttggcatcaatataaaaagttatttaaatttgtggaaatccaaagggtttaggaggaatgcccgtgagttcaaatttgccgggctggttgttatccttcatcattgctcactcaattttgtaaaccttaatgagcaaacctgaagggggccagcccctccacacctgtgggtatttctagtcagtctggacaagagactgagaaaagaaataagacacagagacaaagtatatagaaagaaaagtgggcccagggsaccggcgctcagcatacggaggaccttcaccagcaccagtctctgagttccctcagtatttattaattactgttttcactgtctcagcaagagcaatgtggcaggacagcagggtgatagtggggagaaggtcagcaagaaaacatgtgagcaaaggaatctgtgtcacaaataagttcaagggaaggtactatgcctagatgtgcacgtaggccagatttatgcttttctccacccaaacatctcagtagagtaaagagtaacagagcagcattgctgccaacatgtctcacctcccaccacagggtggcttttctccyatcccagaattaaacaaatgtacaattgkgttttataccgagacattcagttcccaggggcaggcaggagacagtggccttcctgtatctccactgcaagaggctttcctcttttactaatcctcctcagcacagaccccctacgggtgtcgggctggggsacggycaggtctttcccatctcacggggccatatttcagactatcacatggggagaaaccttggacaatacctggctttccagggcagaggtccctgcggctttccgcagtgcattgtgcccctggtttatcgagactggagaatggygatgacttttaccaagcatactgcctgcctgtaaacattttgttaacaaggcacatcttgcacagccctagatcccttaaaccttgattccatacaacacatgtttctgtgagctcaagattggggcaaagttacagattaacagcatctcaaggcaaagcaattgttcagggtacaggtcaaaatggagtttcttttgtcttccctttctacatagacacagtaacagtctgatctctcttttccctacacaaaccaaactggttgtcagagtagatagttagtgaaggtctgagtctgttcagtggttttattaaacgcacttggtcagaatagtcatgattccactagtcatgatttccaccaaaggaaaaggagtaaaattaaaaagcagcaaatcctaaatattttcaaatctctgcacaagggataagtggcttcctggatatccacaaacacaactgattcccttatcagggcctatgcttttttttttttccagttcctttctgttaaaaaattcctataggaatttctgagtttctaaagcttagagatgcaggtagatgcaccctctaggatgatgccatgagtctgagacttgttaaccgtgatataaataaagggttaaaaatcttttctcctgctctatggataaatttatttaattttctagctctgtaattctgaaaacttggtaaaggtggcatatcagatgtgtttccaggcaacattgcttatggtaaaaataacatctaattagtaaactgcatctgaactggaaggtctgtaaatgaactgtttaagtatctggtggaaaggcatagctttgggcttccctaagtgtagagggttctttcaactagttatgtcctttgctagggccctggaagctggtgccaaaagactgctactacagataatggcttctgtagggcatgaggctttactatgatctaaatgtttgtgtccctcaaaaattcatatgttgaaatccttactcctaaggtaatgatattaagaggtggggggtctttgggagatgattagatcatgagtacagtgacctcaagaatgggattagtgttataaaagagaccccaaagaactgccttgccccttccaccatgtgaggaaagagcaagaatgtgccatctataagaaagtgggtcctcaccagacactgaatctgctggtgccttgatttttgacttcccaggccccaaaaatgtgagaaataaatatctgttgtttataagctacccagtctatggtatttcataatagcagtctgaatagactaccagcctaaatagactaagacttctaaatcaaggtggtacccatactcacccatttcctgatctcattccctctcacctgagctgtcaccragggggaatgggggcatggagtaaaccctggactgctgcaaggggtctgctgaagaaactcatctgatgctgccatgccagcatcctgtttttcctgtctgtttatgcttctaagggaaccaatgctatggatggcttagtagggtctcgtgagattgtctgtttaaagtcttctctaaccaagtaagtgtccatggctgcacacttacatgcaaagattttctatttgttaatggaggttagacacatcaaaagtaccatctcttaggttatagatcaacacatttctctcagcaccaaatatcttgtccaagaactaaccaatagttctgactattggttcaatgatgattcttatattgagaccatcaatggttctaggctatttggaggcctgatggttggagtagttaaatttagcaagtactgtattgacagtgttgacaatgatcctcccatgcaaatgggcttctgcaatttttttttgtctttgttataaccactttagatacttcctcaaaagagaaacttttaattgtttttgtttgtttttgagaaattcatgtaacgtaacatttaaaaatttaaccgttttaaagtgtacaagtcagttgttttccatatattcacaatgttatacaaccatcaccactatctagttctaaaacatttccatcgcccccaaagaaacctcatagttcccaattttttcctcccccatccctggctgctactaatctactttctgtcactatggatttccctatcctggacatttcatagacatggaatcacataatatgtagtcttttgtgactagcttctttcacttaacataatattttcaagattcatccatgttgtagcatggatcggcattttattcctgtatattgccaaacaataatccattgtatagatataccacattttgtttatccttttgtctgcagacggatatttgagctgtttctaatttttggctgttgtgaattgtactgctgtgaacattcatgtacaagtttttgtgttaattttatgtgttcagttctcttggatatatatgtagaagcagacttgctgggtcactctatcttcaacaagaagcttttagttttttctttgtatttcatttgggtcatttactatcatgaaagaccagtgctttatataagactagagaactgcctcatcaaaaatgcatccaatcagatgtttggcattttttaaaaaatgtgtttgtaagattcattgttgccagacgtgatggctcacgcctgtaatcccagcactttgggaggcccaggcaggcggatcacaagcctcatcaaaaatgcatccaatcagatgtttggcattttttaaaaaatgtgtttgtgagattcgttgttgccagacgcggtggctcactcctgtaatcccagcactttgggaggcccaggcgggcggatcacgaggtcaagagatcgagaccacggtgaaaccccgtctctactaaaaatacaaaaaattagccgggtgcggtggcgggcgcctgtagtcccagctactgcggaggctgaggcaggagaatggtgtgaacccgggaggcagagcttgcagtgagccgagatcgcgccactccagcctgggcgacagagcgagactccgtctcaaaaaaaaaaaaaaaaagattcgttgcaattgatggtttgcagcatcaaagataaattgttctatatcaataaagacagcatagcctgtggtggtcctatttcctgaccactggtgattatctctaccttcctatggtaaaaggcactcactcaggattagatggtaccaaaaccagtgctccttgatatgattgccagggaggatgggtctgatttatagaagacatagacactggggctgctgccagactcaatctaggctcatgcttgttttttcctgatggaggttggagtcctgggaagaagctccaaagatttttttttctactttctcctattacctattaccttaaggattgattcttctgtttatttaatttaggatctctcctttatacagttggattcttcaaaagttgggcgattcttaaatgcccatattataagtgaaggaatagactgaatagttttggtagctgaagtgtctatccttagtttaggtgagaatttctgttcatctggcagggaaagtcaatgccctggtgtctgtgagttagttgggccagcattgcacttccctgggccagatgctcactgtgggacctcacttctcagaactcccattgtagagagctcaactcacgcactagccttgttgacacttatgagggttatctctctaaaggcagatgagggggcattaagccagctgttcctgcatcttttaattcattttctgactgataactaacaatctcttctcagattgtttatttacttagatcagtcattgttctacaagtttacttagatcagtcattgttctacaggtactcctgataaaacttaggatttgcagtcaggaagtggggtcctctcttctacctctgtgagtcacagattctccagctgccagtatgttgccatctgctttaatatcatctagaaattcatgttgtgagctgctgatagcacccctcttgattttccagcattgagatgaatttattttcatttgtttcttctgacatttcagtaggatttggggatgacggaaaacatatctttgtaattgaccttttttttttttacttttatctagagcaggaaagtccaatccaaccttttatctccagaagggctttcaaacatatgtgctcaggaaaaaaccaccaggttcacttcttcctaaagcacatcaggtatagtatacaaatgtaatgataaattctttggtgacaaataaatgcttttaatacacacaaagccaatttacttttaaaaggcatcttatgattgccaaataatataaaawrtattttatttctaatgaaaatttcccttgaattatatctttttttgttttaaaaaattatttgaggttgaaatgtaagtctatctttaggctattaatcttgaacaacacccagttcttttgtgtatttgattttcctctacgttgtttgctagaagtaaaatcagccaatgaatattttcagtgctactcatctgtagatattttgttttgttatatatttaaattattatatgtaatagtatctactcagaattattttaatatatttgctatgacaatcctctaatcttttggtgataaaaagaaagatttgaataagtattttatagtactctctaaatattagacagtgagaattctaaaagatttttgttgaaaactaggtttttctgtcttgagaaaacaggtattatctatggattttcagagaacaggaggggacagaaatcaaagcactggggaacattaaaagcactgtgcgtatttagggtatagccgtaatcatgtacagcaggtgcttcccaggcccaggtcactggggaaggacaattgtggggtaggcttaataccacagtaatagagaatgtagattctatgggactttcttggtcccatatcatattcccagaaacatgaagtaagttggatgcttaagataaaaaaaagttgggtaacttttattaaatatcgatatagtatggctgaaggaaaatccccacccgtgccccaataaacagttttatttgtctcttttcttgataacatcccacctgaacacaccagaacagggcataatgctctcagcccaagtacagctgccaaggatctggagtactctgtttcaactcccttctgttttctcaactctgcattgaaaaaagcaatgctccagctctgtgatccactttttgcttctctaacccttttgccctctcccccttaccccctccccctcgtttcccaacacctgagtggttaacacttctttccacagcccttggtactgctggctgctctcaccttgaacatgggtttcgttactttcctcttccagttattgccacagcccctgctttacttcctgatgtcaaaatgagctgcatagcttcccctccttagaatggtcagtcaccattgcctgagtctggggccaggtgactacatgtagataagccatccttacttggcctgcatcaacagctctgcccttgggtcctgagtgatagcctgtgcatctgtcctaattaaggaagccattttttcctcactgtcttatttaggctccagtttgcttctagctgcctactttcctgctagttatcttgagctccacagcagtcctgagtgccaggaaagatccccatgcccctgccctggaaacacatgcctcccttgctctccagaaggagcaggtacttttccttccaccaccactcacctctcacccccagctctttgtagctgactgtggcagagtgctagaatagagacttacctgagcttccttggaagacatgaaagagcgagcagccagccagggaactgctgtggaaaaagggatgttttatgataaaatatgtgaaatattgtgaacagtaactattgccttcacattatcagagccaggattaagtctcatgcaggtgctcatcttcttatcctaattaaattacattttttagtagtggtctaatttataatcatagtgattacaccaagattactattagggaagttattactattatcctctggagtttgtgttgatactgttttacagttgttttctagccttaagattagctcataagtagttattaaatttaattacaattaaatcagtttctctgatttttaatgattcatcatcctatttagattgatagagaatttaaagtccagaaagccttgttttcaattggattccccgttcccaagcctatactgtactgcagtgatacttctgtcattggaacagaattttacgtaatggaacatgtgcaggtaaattaacacttaatcttattttgttgcttttacttttaattatgaagttaattaagatgttttattatgatacttaataaatgatatagtttgttatttaacattttaggtaattagattgcattgcaaaggtttacaattttgttcaaatttgagcacttacaaagggagggatggaatagacaagaaacaaatttagtaattagggggtattgacttattcttaaattttcctctaggtgtcagtaaagagctatctgtaatggcaataaccaaattgtccataaggtagcagggaaaacagactccacataggtcaagccattaagaacaataaattcaaaatgtgttttaaattttttctgtaaaatagttgagagtagttttgatgtttatattcatcttggcatatccttttattttccctttggcatgtatactctaatattaaatatgtttcacaaatgaatgtttttctagtatattcgacaaagtattgattatacacatttaaataatctgttgtaatcacttccatagggtcgaatcttccgtgatttaacaattcctggacttagcccagcagaacgttcagccatatatgtggccacggtagaaacattggctcagttacrttccttgaatatacagtcactgcagctggaaggatatggtataggtgctgggtactgcaaaagacaggtaatgcatccacattaatagctatttttttcaagttcttgtaaataatataccttattagtcaacaaaaaaagctattattgtatagttttctgaagcttggccatgacttttaacattgtccttcagaatgactagtttttagtataaaattatcttatgtttttatattaggttttgttcagcaaaatcttctgttttagactcttaattttccaatacttttaactatacagttttttcttcttcttcttcttcttcttcttcttcttcctcttcctcttcctcttcctcttcctcttcttcctcctcttcttcctcctcttcttcctcttcttcctcctcttcttcctcctcttcttcctcctcttcttcttcttcttcttcttcttcttcttcttcttcttcttcatcatcatcatcattttgagacagagtctccctctgttgcccaggctggagtgcagtggtgcaatctctgctcactgcaagctccacctcccaggttcacgccattctcctacctcagcctcccgagcagctgggactacaggctcccgccatcacgccctgctaatttttttgtatttttagtagacatggggtttcaccgtgttagccaggatggtctcaatctcctgacctcgtgatccgcccgcctcagcctcccaaagtgctggaattacaggcgtgagccaccatgcccggcttacagttttttctttctcaattggactagcagacatttattaagcttgactgtgtgtttaatacctgctgagtactgtgttaaatatcaagaaaaatatacaataggttcttccccacaggaacttatggtcatttttgagagacctgtacatgcatgtcattcacgaaacctgaaaatggtataaaagagtgtaaaatctagtggtaaattgtttgatactcaccatgattcaaagggtggaagttgggatgcccttgcttatatagagaaagcttcctgggagagatatcttataatgagtatttaaggaaagataaaatttggagtgatggagatcattttaaattaaaggaaagcaatactagatatatatggggctgctttcctttgtaagcatatcattttgtgggggttaaggaagagaaaagggaactaaagtttagagtgtactcactatatgctaggtcctacatggcagagtgagttgtcggcctctcttttttgatctttacaacaactctaagatataggtattattactcccattttgcagatgaagaaagggaggcttgcatcaatcaagtaatacrcaagtaagtggcttagatataatttaaacccaggttgatatgactagataagaccaagtaaaggtctttgctctattgcactaagttgagcaaagatacctygggaaatggagataaaaaagcaaataaacaatatggtcccacctgttggaggactttacgagtaagttgatttgtttgcattcaattctaagaacaatagaagatctttacactattcatacctgtaaaatatttagaaaattctgtgggtaataagaaagagtattaaaatgaaaagtaggctgggcgcggtggctgaagcttgtaatcccaggactttggaaggccaaggcaggcggatcacgaagtcaggagttcgagaccagcttgaccaatatggtgaaactccgtctctactaaaaatacaaaaattagctgggtgtggtggtatgcatctgtaatcccagctacttaggaggctgaggcaggagaatcacttgaacctgggaggtggaggtagcactccagcctgggcaacagagcgagactctgtctcaaaaaaaaaaaaagtaaatgtcttcttttttcttctagtccccatattccctttttcaggggttacttatttctcgtgaccctttccagagattatctatgcctatatatttgtgtgtgtgtgtgtgtgtgtgagagagagtgtgtgtgtgcgtgtgtgtgtttgtatgcattctttttttttcttctacaaagtagttgctgaataaagactagaacccatatctcttgatccctaggccagtatttttctcttgataaaaaactaggtaagtaaaatggaactatatggaaaagagacttaaatgtttaaggtttaggctgatttgagtgttttaggatgacaggagtatcaccagcatgggtcttaagtatttaggagtaaaacagcatttgaattttgttttaattttagaattgctagatcctacattccagtttcagctttaccatttttcttatttatatgtctttaggtatcaacctggacaaagcaatatcaagctgcagctcatcaggacatccctgccatgcaacagctatcggagtggctaatgaagaacttgcccgataatgacaatgaagagaatttgattcatggagatttcagactagataacatagttttccaccctaaagaggtacagttagctatgtttacaattaattgagtaggtctgttttgtgacacagtactaagtaaatgctccccccagagcactgagggagcccaacccactccctgttcccctacagctcaggactgtcgtcaccactcaaaatttttagaaaggagtcctgcagattttccagcataagttagctgcctacctttgagactggttctaatcccaagtggtatctggtttactgcttaaaaggatttgggaattttacatgcatgatgctgttttcttcaaataagttttcatctactagttacaatatttagcttatccatgttcttgctgttttttctggttcatttatacttctttggggtttttagccctatctcatgaagaatttattatttgtttattataaactctgagaatagagaattccaaaagcttcttgaggcttcaaaagaattacatgagattaatataaccttgctcaatgtaaatgtgcatactgtattctttataaagagtataaacaaatgaaagctgtaatcctccactgagcacctacaatgaggcctaggattacagtatagtaggaatgaatcctgcttctgagaggaggattttctgggttcattagtttcttagaatgctaagatgttttagggcaggaagagctagtggcactgatgaattctgaattctaaccttgttaattatctaccctgagattagaaaaattaaatatgctaatttataatctagataattataaaagcatatgcctgaaaacatagcaggatctggcctgtatttgatctgtgtcatttaattaatattttagtcgagtctacataatattgagtctctatagtagataacaaattagaacccactagacttggagttcctttaaaacaatgactgtatcttattcatctttatattgcaggtgcttatatgattctgatgaatctatgttgaagggattaattttagttaattattcactagcaactatttccatctcataaatttatgcttaactttcattccctagcagtgtgaacttaaagcatgttattcaatctctctctgtgcctctatttttattttaactttttgttttgaaataattagagtccccaaaaaagttgtaacagtgttatagtacagagaagtcctgtgtatccatcatccaaattctgcaaaatggatattatacaactatggtacattatcaaagccaggaaattgacattgtgtaccttttaaaattgaaaaaaaaaattctgagttgctgggcagctaaaatgaaacagtcaatgtggagcaactagctggtacctggcacatcaatgatgctcagtttatttcaggtaccctcatttttccattttttccccttcatttttctctctgacttttcttagactacttgtcaagcttcttcagaaaaatattagggtataagtaaatgcttcataatatgtacgaaaacctaaacagtggttgtaggggatagaattataggagacataattgtacatttctgtaatgtttagggtttgatgttttttggtttttatttttaaaacaacagcatgtttaatttttgtcatcagaaaacacaacaattaagaaagaagaataaacaattttaaatgacaaaccttccaggaatgtgtggagtaagccagtaaaggaaactacaggatatggcaaaacgaaattattttctgttacttatttacaaagtatttaaagcatgtttgggcaagtatttcagtagcacaataggctcactgcaatgttgaaaagaaatccagttttcctggaaaatgttgattttccaaatataaattttaccagtagagaaatgtttaagatcttggagtttaatgtaaaatctgcatattgtcatttcaacttgaaaaatatatttaattagaaacatccattggaacttgtcaacttcagtgatctagaaattgaaaccccttatttttgacctcaccctctttaccttctgttcttttatttctctgcatcttccctgagacactgcaaatttgattgctgttaatttagaatccataagcccttcatgacttcacttgacttcttatcctacataagccacatggtcataatcagtcatctcaaaaactacctttagtatcaatttcattaataattttttgactatagatgtatgcaagtaatgtaagaattataaagtgtcctgaccttaggttacttattattctagaatcttcccaccctgactttatatcatcattattattattattttactttttattttttctaataaccctacaggggatgtccatcaccccttgactttaaccagtttctagccctaaacttgaatcctcatatttttgctgcagaataaagtcgtgaagtaaggttaattggatctgggacatttttatgccacatgattttatctaggctgtaacttcatctcttagtaaaacctgtgacatttaaaaaatggcttttctaaatcttttcccttcttctcaaactctcacatttcttgtcccatctcggttcccactctcagcatgtggtcttgtcttctacctaactcatctttgtcctttcagtcattttccagcatagcstgctttctaggaattacaccatgcccctcaaagttctctttatattgttgaagacattttcgtccgctacacaatatcacctgtatgcagattgatgggtgatatttttctttagcctcattgccaagaaaatttgtccctcttgagcagctggtttgtttttgacctgcatacactataaagattgtgactgaccatgcttcacactttattttacccgctataaaattcaaagcaaattttactacccacactaacaactatgcatgtcctatcacattcaattatgtgtaataaccttactcctagcttcatcttttcattacaaattctattattttcttccctgccttcttcatctactgtttgttctgttggattgtatgtattttttgtttgtttcgaatgccaatacacatacatattaataaaattcaatggtgtaaaaagtatacataaaatgaatctctttataaagaagataatttaaaaaactaaaagctttctgttgagctgaggtttcagaaaaactatcaaaaataattttactaataagttccctagcagcagtaagacgaactagtaaatgtccagatcaaccactaaaagttatgttgagcttttaataactctcaacacaaacaggcatcaacaggactctaattagctattgctaattaatttgcactaatttatgcaatttgatgagccatcagcttttctcactggctgttgttttatagctttgtgtttttaccccaaaaatggttcagatattctgaaaagtaactccagagaagtttcccaattgtattaaaaaagaaaagtaatcatttatagcataagtaagtgcctcatctttactttggatgttaaaagcatagataacaaatagaatgatgtaagagaaaaatgcatccatcctcttcagtagtttcacaaatctagctagtatagtaatttataatacttataatattataaatttatagtataatataaccacaataaaagctcttataaagtcatagagaaaggagtgatcaatttttttccacagtaacaatgrcaaagttttgattgccttgctatatatgccaagctctgaacatattcatcaaataaatacatattggccatctgttgtgtgccaggttctttgctagaaactcatacatgaactataygtgctacccgcccatttaatcttcaaactaaccctgtgtaagaggtgtatattatggctgagaaaattgaggattagagaggttaactaacttgtccagagttatacagccagcaaatggtagagctagggtctgaatacaggcctgtctgattccaaagcccatatttccacacaaagctacaagaatgtgtgtaagtttgccagaggagcaagggagtgcaagcacacacagttatatggaggcatgaaacccagtaactcatattacccaaatggggtctgcagttttatgtagcttggataacttgcctagagtattgctgcagctgcctcactgcccaccccccatagtatattgaaatcatagtagccagagtgaccctcttaaaatacagatcatgtcatatcactcctatatatagaaccctccagtgaaggttcccctctctggacctcatccatcctgccttaatcccttaaagtaaccacagccatttctgttagtttggtgcaataccttttcaactttgagtattcatttataatctttttctttatttttttatttttttattatttttattttatatatatttattttttattrtactttaagttctagggtacatgtgcacagcgtgcaggtttgttacgtatgtatacatgtgccatgttggtgtgctgcacccmttaactcgtcatttagcattaggtatctctcctaatgctatccctccccacccccccaccccacaacaggccccagtgtgtgatgttccccttcctgtgtccaagtgttctcattgttcaattcccacctatgagtgagaacatgtggtgtttggttttttgtccttgcgatagtttgctgaaaatgatggtttccagcttcatccatgtccctgcaaagacatgaactcatcattttttatggctgcatagtattccatagtgtatatgtgccacattttcttaatccagtctatcattattggatatttgggttggttccgagtctttgctattgtgagtagtgccgcaataaacatacgtgtgcatgtgtctttatagcagcatgatttatastcctttgggtatatacccagtaatgggatggctgggtcaaatggtatttctagttctagatccctgaggaatcgccacactgacttccacaatggttgaactagtttacagtcccaccaacagtgtaaaagtgttcctatttctccacatcctctccagcacctgttgtttcctgactttttaatgatcgccattctaactggtgtgagatggtatctcactgtggttttgatttgcatttctctgatagccagtgatgatgagcattttttcatgtgtcttttggctgcataaatgtcttcttttgagaagtgtctgttcatatcgttcacccacttgttgatggggttgtttgtttttttcttgtaaatttgtttgagttcattgtagattctggatattagccctttgtcagataggtagattgcacatgttctcccattytgtaggttgcctgttcactctgatggtagtttcttttgctgtgcagaagctctttagtttaattagatccyatttgtcaattttggcttttgttgccattgcttttggtgttttagacatgaagtccttgcccatgcctatgtcctgaatggtattgcctaggttttcttctagggtttttatggttttaggtctaacatgtaagtctttaatccatcttgaattaatttttgtataaggtgtaaggaagggatccagtttcagctttctacatatggctagccagttttcccagcaccatttattaaatagggaatcctttccccatttcttgtttttgtcaggtttgtcagagatcagatagttgtagatgtgtggtattatttccgagggctctgttctgttccattggtctattactctgttttagtaccagtaccatgctgttttggttactgtagccttgtaggagctggtaccattccttctgaaactattccaatcaatacaaaaagagggaatcctccctaactcattttatgaggccagcatcatcctgataccaaagcctggcagagacacaacaaaaaaagagaattttagaccaatatccctaatgaacatcgatgcaaaaatcctcaataaaatactggcaaacggaatccagcagcacatcaaaaagcttatccaccatgaccaagtgggcttcatccctgggatgcaaggctggttcaacatacgcaaatcagtaaacataatccagcatagaaacagaaccaaagacaaaaaccacatgattatctcaagagatgcagaaaaggctttagacaaaattcaacaacccttcatgctaaaaactctcaataaattaggtatcgatgggacgtatctcaaaataataagagctatctatgacaaacccacagccaatatcatactgaatggacaaaaactggaagcattcactttgaaaactggcacaagatagggatgccctctctcaccactcctattcaacatagtgttggaagttctggccaggcaatcaggcaggagaaagaaataaagggtattcaattaggaaaagaggaagtcaaattgtccctgtttgcagatgacatgactgtatatctagaaaacgctgtcgtctcagcccaaaatctccttaagctgataagcaacttcagcaaagtctcaggatacaaaatcaatgtgcaaaaatcacaagcattcatatataccaataacagacagagagccaaatcatgagtgaactcccattcacaattgcttcaaagagaataaaatacctaggaatccaacttacaagggatgtgaaggatctcttcaaggagaactacaaaccactgctcaatgaaataaaagaggacacaaacaaatggaagaacattccatgctcatggataggaagaatcaatattgtgaaaatggccatactgcccaaggtaatttatagattcaatgccatccccatcaagctaccaatgactttcttcacagaattggaaaaaactgctttaaagttcatatggaaccaagaaagagcccgcattgccaagtcaattctaagccaaaagaacaaagctggaggcatcatgctacctgacttcaaactataatctttttctttaagcataaattggatcatacgctatatactattctacaaattgattttttggccatatgtacagccaaatgaacataagaaatgaacaaaagaatgtcctgtattcttaatatgaagatatatattccctttgggcggccaaggcgggcggatcatgaggtcaggaggtcgagaccatcctggcgaacatggtgaaaccctgtctctagtaaaaatacaaaaaaaattagccgggcrtggtggcgagcacctgtagtcccagctattcgggaggctgaggcaggagaatggtgtgaacccgggaggcggagcttgcagtgagcagagatcgcgccactgcactccagcctgggagacagagcgagactccgtctcaaaaaaaaaaaaaaatacatatatatatattcccttgatacatactgttacaaggtagaatgagggaagctttctgttttattggttccacattacatgattgttttatgttgctatataatggtggattttatatttataaaactaacagtatcttttataacaattatgctttgtatctacaacatgaaataacttttaaaagtaccatggatggagtagtacatttgttatacagttagattaattactaaagtaaatgtttaatgatgcataacatggattattaaaatataagtaattcactataattcctttttatcacaattacttccagttgagaagttttaactgcttttgcatctgctcattagcagagatattaaggctgtgtaaagtaaaatgagaaggactgatggccagcgatggaaccagaggacttagctctatataatcaaggctaattggctattttataaatgaratatgccactgtgggtaaagacctgaaattgacttttgatggaaaacatgattttgaatgtgttcaatgttatttatttctttattatacttgttttaagttttaatgtgttacagacctctttatttttaattacagtgtcgagttatagcagtgctggattgggagctgtcaaccattggtcatcctttgtcagacttagctcatttttccctgttctacttttggccaaggacagttccaatgataaatcaaggttcttatagtgaaaactcaggtataaaaacataatgttgtctaaattgctattaatataaaactgtctttattactttcataattaaaatataaatcttgcaattttagataatagtttttgtttcttaaacatttctattttattatgatttttatttttattttatttttttgttgaagataattcttttttttaatttatttttattatactttaagttttagggtacatgtgcacaacgtgcacgttttttacayatgtatacatgggccatgttggtgttttttagatgcaaggtcttgctctgtcacccgggctggagtacagtgccacaatcatagctcactgaaaccttgaactcctgggctcaagtgattctcccacttcagccttctgagtagctaggactacaggcacacaccaccatgcccagctaatttttttattttttgtagagatggtgtctcactatgttacccaggctagttttaagctcctgctgtcaagtgatcctcggcccccgcaaagtgctaggattataggcatgagccatcgtgactggcctatttcattttcttcgttaaattttctgaacttagcatgccacttttagtaatttacgaccaaatataatcctttgtatataataatcttttggaaatcaagatttagaacatgttttgttgtaagggctaatggttattacattccgttttacatatgcgtctcagtctcataacattttgaaatattcaccacgacattttaattaaagtttatattacatgctgtttttatagggataccatcaatggaagaactgatttcaatatattgccgctgcaggggaattaattctattcttcctaactggaatttctttcttgccctttcatattttaagatggctggaatagcacaggtaattaattgttttaaacgtgtgtttcgccattatttaccagtgtactgttgacaatgttttccagtcttcygggttttatattctttatccttagatcatttggcttatcataatgacaggtatcagacataggtaaaatataaatccagaatttacagaataggaatttggcaaggaaaaaatttgagtagcaaaatgtattatcagttttttgtataataaacttacaagatggatggaggaagaatgacataatgttaaaaaggattagtaaggattagtcatttcctgaatatccagtgtgagaaaaagctaaaatcttttgatgatctctgcctcagactatgaaaccatttattagttagggttgatgatgagggaagaattatctttatacttcccagaggctagcacagtatctagtatacagtaacctcttaaaatgtttttgagtaagtagatgagtaagatttttttattttcatcgtcatatttgtgtgattaattttgaaagataatagagcataaatttagggtttttttctaattacattgtaatctaaacaaatggcttcttctttatactaatccagttttcaggcactttgaatcttggagatttaagaaattgagatgcttcatcaatagcaaggggctagggtttagaagaaaaacaggtaaataagtttagaagtgaaaaataatgggaaaagaaggattaaggaaaattatgataatttattttctgtcctcagagttcatgctatccatgaacaactgaaatagttgtgttacatctcatcttgtaccctgagttaatcatgttaaaagaatgggtttctcaaaatgggtatgtctctgtgtttgacagtttccacaaataagataccaaataggctttaaatttgaaatggcttttcatttccaataaaagtttgacatggattatgattgacattaaaatgtacaacataggccaggcacggtggctcacgcctgtaatcccagcactttgggaggccgaggtgggtggatcacctgaggtcaggagttcgagaccagcctggccaacatggtgaaaccccgtatctactaaaaataaaaaattagccaggtgtggcggcatgtgggcctgtagtcccagctactcaggaggctgaggcaggagaattgcttgaacctgggaggtggaggttgcactgagctgagatcatgccactgcactccagcctgggcgacagagtgaggctccatctcaaaaaaataatgtacaacataaactatatatactgtacatgtagtagctttggagatggtcataaacattccaatctaattggaaatataaaattgaatatgatggaagaactattacagtgttttatttattacagtgttttattatataaggaattatataaagaagacacagtgatgtttgtttttagggaagaggaaggagtttattatgttgaaagtacagaaatggagaattatcaaagaaacactgattagcattcaactaacactgtttgaaagagacagttttacctgcattagggacccaaaaatgagataaaatgttcttagagatcgtctcattgtcttccttttgattttatagttttttaaatcttatttttgtttctttagattttcccccattatgaaggagggtagtgatctttagaggtgaaataacttgcagacttggtatctttggtaactgctgagatcatttgcaagtttgatttgattataaattagaattatgttaggatgagagtatgtgaactgtatgatatgagtatgactctttagaagggtgtaattacccctgcatgtacattaatatcgtcgatagtctgttttacgtcttcataccctgtgagtataatgtcacatataactgagaaactggaaagattgattggattgttgaaggacggttttcaatgaattttaattgttctatgtttatttatagggagtatatagcagatatcttctgggaaataattcatctgaggatagctttttatttgccaatattgtgcaacctctggcagaaactggactacaactctccaaacggtaaggaaaacagattccttggctaactcaaattagagcctttattgggtatgtgaaggttatacactttaggggagtagggattatttttattgcatacaccaggattgctgctgccaatcacaatagatttttggtaaatctcttctatgcctaaaaacaaattgacctaaaatataaagaaaatctccrtatttaggtttaaaagtatttttgtgccacttgattgtgtaaatgtttaaggatatagataaaactctcaagtgtttctttctaatatttaagtcacttacatatatctaattttaaaaatgcattatataagatgatttattaatttagaaatattgttcttttccactgttacatttcatgaagttatattcagacatttcataagcatctttgaaacccatgtcttcatcagcagagcactttttcaggcatcgaacacactttgccagtttcattcccattgcttaccagatgcatgtgtgatgctgtcccagaaattctgcttaacccacaagtacccatggcataatgttaggacaattgcttttttccaatttatcttatagatgggtatttgttctctctacaccataacaattgattctgttgtgcttcataatgacctttacaggtcttctttattttattttaatttattttaagttccgggataaatgtgcagagcctgcaggtttgttacataggtatgtatgtgccatggtggtttgttcaactcccgcttacgagtgagagcatgcagtgtttggttttctgttctacagatctaatattcagcagctatatttgtgaggcatatattaatagtaagaataatgattatttgtgttcaattcaacttctttgctttttcttctggagattctgacgggtgacttcaataaagattcaaaactaatgaagcgggattttttgctccttagttcagctaaaatccaggttctcgtctcacaggaaaaattaggcacacagacacattaaaggatgaggagggccgatttattaagcgaaaagaaagctctcagcaaagaaagggggggtcctgccaacaggcgcccacctcacacattgaataccaggctaccacacttgagctaaagaggccaggctcctccccttgcataaggcgcgaattcccggtggctccaccccattcccccagtgtgcaggcaggcccccagtccattgtgggcatgtccagacaagaccctgtgcctcctgcatctatcactaacattgcttgaggtgatgccaggcctatatgttttccccaaatagtgctttaagcattaaagttaaatgtttaaaatggaagtgattctgcattcagtccataatatggaagacttttttaaaatataaaatacagctactccttctgggggatgwkttttgggtagctgaggaaacttcacattatattagaartatgtaataatgatctttggacatctttgtaacctttttttccttttttcttttggcaaagaactttcagtactktactaccacagattgatactactggacagttgtttgtacagactcggaaaggtcaggaagttcttattaaggtgaagcatttcatgaaacaacacattcttccagctgaaaaggtgagtattatataagcagaatgtatttctgctaaaggactatcaatgaatamttttgttatttctgcttataggagaagcatggtgtcattttctttagtcaatccttacctagattcttcttctcaccttagaactaagccacgatagaacaaagggaatgcacagataagtctgtggcattaaaattaagccaaagagaattagtagttttaacattgggagcctaactatgttagagtaaaacactactttgggggccttgtcctaaggcagtaagtttcagcttttttttttttgtaaatatggacccctttgagaatttaatgagaagtgtagactatacaagatggacacacctagagaattttacatatcatttcaagctgttcacagatactaccacccctcttcctataagctactattttaaggcattaagtttcaataagttcactgagagtagagaggcaatatggaacattcattcattcagttaccaaataattattgggtacttgatgatgcttaggcacctggaaagctacagaatgtaaatagataataagacatacagggcttatgctcatgtgaagcttagactttagcaggaaaggaagacactaaataagagatgataaatgttgtgaagaaaagataaaagcttttacaaaaatatgtaagggagttggggcaggctgtttatatgtgggtagaacactggtgtagaaatgctaatggctttattctagtctatccctgtcacaagtttggtggccttgtgttagatggtcttgcgtggcctcagttttttcctctacaatgtgagtaggtatgactaaatatataacacattctcattttaatcatctatgattctgagaggtctacagctagcctggtaaaatcaaatagggaactgaaagagaccaaaatccttttaacagaaatgttcagagctgatatgtgtttgtaggacagtttgtgctgttgcttgaattatataaataattattatatttttagtaaatatctggcttgagattaactttgctcacagaatagggtataatttctttaaaaaatactacttaaagtgaggaaattctttctaaaatagtcacctctcacatgtgtttagtgactgaagtatcttgaatattttctgatctagttagtgtttgttcaattctgatttttaaaactgtgaactcttgagtattaaaaagggaatgcaacacttttaggttaagatagcagtgtgaattcaacattgtcctcccctccctcaaataaaatccaatttaataaataataagtttttttataaaatggaataaattggtataagcttgaaaacagaagagggacatatcagaggaattaaggttttgaaaagagaatggaaattagatttggaaagcagaatggattagcccctagaataatctaacaatagaagccatatctcagaagaagtttgaaagaagtctgtagcacaagtggtaaccattttcccacagtggagtccactgtgattggcttatatagaaagcaaaaatgagaagaggaaaagaaatcaagatgtttgatttaagaattacctgcaggtggaygactgcttcggttggtctcttataacctgttatagcaatggtgtttgcccccaggcagaaggctgcaacagcactccaaaaaatgcaaatggaccagtgtgctggctcaagcctgtaatcccggcactgtgggagggcgaggttggtggatggcttgagcccaggagtttgagaccagcctgggcaacatggcataaacccaatctctactaaaaatacaaaaattagcccggcgtgctgcacacctatagtcccagctactcgggaggctgaggtgggaggattgcttgaacctgggaggcagaggttgcagggagccgagattgcgccactgcactccagcctgggcaacagtgagaccctgtctcaacaacgacaaaaaagcaaatgatctgtttcaaagaagccagggcttcaacatgagatttagtgccctagaggagggtcctccatgttttggctttttttttttaatggagtcttgctctgttgcccaggctggagtgcagtggcaccatctcggcccactgcaacctccgcctcctgggttcaagcgattcttctgcctcagcctcccaagtagctgggactacaggtgcctgccaccaagcctggctaatttttgtatttttagtagggatggagtttcaccatattggccaggctggtctcgaactcctgacctcgtgatccgcgcacctcagcctcccaaagtgctgggattacaggtgtgagccaccacgcccggccttttttttttttttccttcaagagacagggtcttgctgtgtctccaagctagagtgtgtgatgtgatgctatctcactgcagcctcaaactccagggctcaagcaaaccacccaactcagcctcctgagtagctgggattacaggaatatgccaccataccgggctaaattttacatttttttgtagagacctggtctcactctgttgcccagaactactggcttcaagcaatcctcccacctcagcctcccagagcgctgggattacaggtgtgagcacctgcacctgaacaacttttcttttttcgggggtgggggagggtggtggggggtggtggggattgggcagaaatcccaggttgtctgtcctccctgattactgcctgattcctacctactttctctaaaatgaagcctatctgatagcatgctagtacttgcaatcagcccatcattcagaggagaggccagaattggcagaggaaaccaggcaggcttgttctttcattggtaaatgtgaataagcatataagagaaactgcagcacagaagaggtgtcacaggttgggttgtgatactctgctgaactttgtgtcatgcagctattgaaatatgtacaaaaaatttgcaataaaaagaagtgctttaagataaataaaaaagcagcctatagctttaaagggaagattgccaatgttttgtgtgaccagaaaagccacaatcatttgtctttgaagatcctttaaatctgagacataaccatatctgataatgtgagctttttcttcttttaaaaaaattgaaaaaaaaaatcgtactgtaccaacatctataaaaacgttttatcctgtagaatgatagtgaacaatacaaatctctgtgtaacatgttagaggatgttatttggagattatatttggagaaaagtaaatagctttttcaaaatcaaagagggaaaaatctatataagattctatccaacattattataactaagcttacaaaaaccaaaacagtcatttctagaaaataggttgtatcatataatacaatactttaacagcacttgtctttaaccactgagacgcttcatgactttttctttatatttttagatattttcaaattttctatagtgagaaaacataagcttcatttaaactattctaatgaccttttgaaactccttgaatattataaagtgagagcataacccttatctatgaaaatattaaaagccaattcttccaattggaaaatattaaaagccagtttaagccaatttaaaatgggtaagaaatcctaaaaatagcatgtaaaacaggaactagcaacataacacagtgagaacacacttttaacataatggtaacattaatcatactttcctgctgagtctaatatactaaggatgaactgttgcttctttctagtagacttcagtttaaaatgaaaaacattttgcaaaattatttgtaggctcagatttaagatgctgaaccaaccaacatactcaaaattagtatctctgtcagtgagtgaggacgcagtatgctacaggtgatattttgggaagattgaccaggcaccaagcatagtttctgcttttggctattaactaataaattacttttcttactttaagaaccaaagaagggttctttataatgaggaattttatttaattttgagtcctaccgtgccacaaataaactttgcagatatctaaatggataaaatttagaactcaaagtattaaataatacaaattttaaaattatataaacactggcataatttaatttcttcaaactgtggtcagagatgagaaaaggtggtcagagattagaaaatgagaaatgtactgcataatatatttcttatcaaacacagtagcattgaatatttccaaggcaatatgagggatggaaataataaacaaccccaaacaggaaatcttccaatttaacggacttcctgacagaaatgagaagggctgttcatcctggtgcctttgaaagagcagacctttgccttcttgaggttttcattaaatacwgcaatactctagactagccatgcttcaatgaaaggaacattttagtacattgttatatgagtgtaaattgatagaatgatttggaaaataatttgataatatgggttaagagttttgacaatgtttgtaagtaataccactagcctaagtgtagaaacatacagagatactataatagcaaaatattggaaaatgctgttatactccaatatttttgttctatattcttttagttgtacaaattagtgattgttattgttttatgtggcttttttttttttttttttgagacagagtctcattctgtcacccaggctgcagtggggtggggcaatctcggctcactgcaacctctgcttcctgggttcaagtgattctcccgcctcagcctcctgagtagctgggactatagccatgtgccaccacactcagctaatttttgtgtattttggtaaagacagggtttcattatgtttcatttggtaaagacaggtaggccaggctagtgtcaaatttctgacctcaagtaatctgcccaccttggcctcccaaaatgctgggattatagtttcaaattttaagtttacctacctatttatcattttatttatttactattccttcttgcaactcagatgtttcttctaggtcaagttcctttagtgtgaatgtgcgagtaaacttttccctttcctttgtttatcttttttgttgttgttttccttttttcttgctggggagaggtggcaatgactttacttattgttaatacctttattttgccctagttcgtgaaagatagtttcattgcatatagaattttacaatgacagttattttctctcagcaattgaagctattatcccagtgatttctggcttcatttgttgctttgagaagtcagctctcaatcttaactgttgtttaattatcagtaatctttcttttttcccctcttctttctctttttcagattatgagactgatgcactgccctactgcgctaaggaggcaacctcctctttctaagagcttttctttctctttaatgttctgtagttttactatgctctggcttcattggctttccgaatttgaggattgctgtcttatcagttccgaaaacttttaagagtaatttttccaaatattgcctctctctttattctttatgtctgggactccaattagacttgtgttagaacttctttttgaattcattatattcctttaccactcatatttgccttcttttgagtttctgtgcatcattctgagtaatttcttcaggtctttcttccaatttatgatttgttttttcagctgttatctaatctatttttcaacatccacagagtaactgttttcaaattttggagtgtgtgagaattgcttaagctagtaaaggacacagaagtgcaggttcattgaagtaggacaaagcttaggcccccatatttttatcaagttccccaggagattctgagagccaccaaaatttgggaatcactgccatagagtttttaagtttcatctctatggttttcctttccttagattttattcaattctttttcaaatgtgcctggtcacttttgatagtcctttgttatacttttaatttcttcctttattcttgaaatctattaaacacaaatagtttatgtcctgtgactgatcattactctatttatagtctttgggaagtgcaattccatcttggtgaatgattgtttttgctaactcttactaatggtggcttgtttccttgagtgataaatagttttttattttgaactcatgttctggaattttatctgtgaaagttatttaaggctttgtttaaagctctttcctacagataggatttgttttcgcatctgccaggtattagcaggcactgtcaccagaaacactgtaaacttaaattttggcttaaagtttaatgccccataagtctgtgaattcagtcccaaacttgggtgaaaacagacttcagttagaatgtttattttgtctattccagccagagctaagacctatataaaggcctgtattcccatggtctacctctgaggggtgggttttctgtttgtttgtttttgctttttaaattttcttccacttaggttttacccatcaagcagcctagctttggtggaggaaagagctgatctttgatcctccctcttgccatgtttggggcatttgactatgtctgactcctgcctatgtggcccattaaaacctagggtgtaacagggctaacatagatcagcctatatgccctggacaaacttggctgcaatgtgtgctcacacttgaagagtcaggcttttttgtttctggcctccaaggaattttctcattttccttccagcacagctatgtattaataaatgtattttaaaactatttttaatattttacccaacatttttagttgagcagtttctatgactatctagtttgtcatattgctagaaatgaaacactcaaatcttggtataagattttagtagcctactatctaatattgtggcagcatgattttgtgatcagcaaacctttagaatgttttatgcttctgtgtctggtttaataatagctgaaaaagcatcttcacctaaaaatgtttattttagatattagcagtttatgacattgtttactttgtattaactttagctagtgaaatttttttcttttattactttaaggaggtaactgagttctatgttcaaaatgaaaattcagtggacaagtggggaaaacctttagtgattgataaactcaaggtaagaaaatctttaacgctagaaaattcatatgcaagtgttttttgagatcctagaccttagttttgttgttgctattgttatatatgtagaagaaaattatatcaataataacctttaaaaaaagaaagttartaaatagaatctataacatacaaattaggctaggtagtgttctatatatggtagtaatgaagacaacctcttacaactgttcaaaggaaaaaatatgattaaaactattcattattagccatcactgaattgagactgaagtcaaggcagggcatttgtcccacatagaattaatccaaatttcatgtttttcaaatcttaacatcaattcatgtaagaaattaaaatgcacaaagtagtatatttggcatatcatactcaaatgtgggagattttgtaatagttctgattccagaagaagttctcaagtagcaaacttaatttttcagccaaatccaaggaagcttggaggaaaagacatgttattaatggttaaactgttgatttataatgaattaataagaacttggttttgctcactggagaatacagtaaaataaataactccataagtgtttttaaatttcaaagatcataaataccaatatttaaaaaaagaaataaactactgtgagtcctggtaaattatggtcactctggcatgttcatcaccttgacaggaaatggccaaagtcgagggtctctggaacttgtttttgccagctgtcagcggactcagccacgtggactatgccttgattgctgaagaaacaggaaaatgcttttttgctccagatgtctttaactgccaagcaccaggttactacattaattgaaaacataattttttctaatattttgatcagtgtttaaaatttctatatatgataagaatgtgtttttatacaaagttattgacttatgaatttagctataattttacttttcagttactttgatttaaatataagaaatggatttgaaattttcattggactaytcttttgttaaatatcattacaattaagagtattggtgaaaaaaattagccaccaaagggattggtcgtgtaaggatcatggatcatggatccatgggaattggatatttctattactagttggaatggatagagagtttcaaatcttttggttagcctcactattcattcaccaaatgaataaaccattcatttaccaattatttactgattacctactatgtcccgagcagtgttctatgttctcacaatgatatatcagtgaataaaatacgcaaagatgccttctttcaaggatctaattgacatacaaggatacaaaaataaataataattataataagtaaacttcaaacttacgtaataagtttgaagatgaaaagtgctttggaaaaaaacagcagaatagaggagctctgaaatttgaagtacagggaatatgggttacatttttaaatagaatggtcaggataggcctcactgagaaaatgacatttggtaataacttatataaggtgatttcttgagttagtcatgctgttatatggggaaagagtttttatagtagatggaacagaaaaggcaagagtgtgattgatgtattccagtaataaccagagaggccagtgtggccaggaaaataatagtaggagaagagatcagagaggcaagggcctcatattttgagcttcatagggcaaataagaggggcttataccttcattgaaaggatgagccaatgggaattttgtgcagattagtgataagttgtaacttcagttttgaaaggatcaccttgactgctatgttgagaattgaccaaagtagggtaagagggaagcagagagtcagtggcaataatcctggtgagagataatggtggtttagactggggtggtagtagtgtagtggatgataagtagcaagattctaaatatattttaaaggcagagccatgaggatatcctcattggatatggggtattaatggaagagtcaaggatgcctccaaggattttgaggtgaaatcaaattgaaaagatgaaggaaggaggccaattttttaaaaagtaaaatgaaaggagtaaacctggaacgtagtctataggaggtatcttcaaaactggatttgcagaagaaccacctaaggaacctttgaaaaatctagattcccagcctccatccctagagattctgattcagtatatctagggtagaccctgggaatattttttttcaaattactctgattatcctaatgctaccagtcaaggactagcacttgatttgtagtaggatgattatgggacaatatccaatggcaggcccatccctgcacaagataggcctcagtattgccttttgtgtttatgcatggccctggtgctaaagctctaccaaaaacaagttaatgcaggctaccagaaagaggtatatgagacagtactggactcctgagacaaaacgcagtctggattttccacactggactttgtctcattgctttggcatcattaaaatagtttgtagatttctgataatggttgaacttgtccctgaaatgattatctcttttccaaacactgatttatcaaattactgctgtactacattgtaatccaataataagctactgtaaaattaaagtctattcacagagcttctaaagatttcatctcaactgtgtaaggctattacatcattctacaaaggtagcatgattttgtggaaagggaactgaatgggtagtctttttgtttaaaacatttttgattgctactcatagtaagaaatatattttatattgtgacccaatttgtagaatatataggtgtatgtatatgttcagaatgaatggatggatggatggatggatattattgaaacaaaagtttcacaaaacaagagtttctcttactacatgcaagtgcatttggatattttccactgagtctaatctaatgcattctattttgttctatttcattttttagagaatgctagctatattccattaagttgatttcatgatgcactaatggatcataatatgaaaaataatcctacyaaagacttctcttgcagattcagctctgccactattttatcatttgacctgtgaactcacttttcactagatggtcatggatttttctctagcattaaaatttcatgagtccatcagctgtactgcctaaatgagataactaaattgctgaaattttaaaattggacagagatttgctctaagaaatgatgagcaactcttctaagcaaacaagttgtgtacaactataaatagaaaactaggcgttttctctttgtggtgaaggtaccacgaaggcctcaagcattgcattttggatcatttccaaagcagatgaagaaggcagtataattgatgttgagtaaatacttcgagaggtttcttaagtataaaagatgaatttctactcaagccacccagatcatttcccaaatagttataaaacatatgggaaacatatgtagtcttccagtttgccctttttccccccttcaataagtcatacaatattgtatattggaatgttgaaaatagcaactttaattctaaagctattactggaaaatttgggggcctttgggctggtatttgttttatatactttaagttctgggatacgtgtgcagaacgtgaaggtttgttacgtaggtatacacatgccatggtggtttgctgtcatctacattaggtatttctcttaatgctatctctcccctarcccctcaccttgcgacaggcgctgatatgtgatgttcccctccctgtgtccatgtgttttcattgttcagctcctacttatgagtgagaatatgcagtgtttggttttctgctcctgtattagtttgctgagaatgatggtttccagcttcatccatgtccctgcaaagaacaggaactcatcccttttttatggctgcatagtattccatggtgtgtatgtgtcacattttctttatccagtctgtcattgatgggcatttggattgggtccaagtctttgctattgtgaatagtgctgcaataaacatacatgtgcatgtgtctttatagtagaatgatttataatcctttcggtatatatccagtaatgggattggtgggtcaaatggtatttctggttctagatccttgaggaatcaccatactgtcttccacaatggttgaactaatttacactcccaccaacagtgtaaaagctttcctatttctccacatcctctccagcatctattgtttcctgactttttgatgatcaccattctaactggcgtgagatggtatctcattgtggttttgatttgtgtttctctaatgaccagtgatgatgagctttttttcatatgtttgttgggcacagaaatgtcttctttcgagaagtgtctgttcatatactttgcccactttttgatggggttctttgttttttcttctaaatttgtctaagttctttgtagattctggatattagccctttgtcagatggatgaagtgcaaaatttttctcccattctgtaggtggcctgttcactctggtgatagtttcttttgctgtgcagaagctttttagtttaattagatcctatttgtctattttggcttttgttgccattgcttttggtgttttagtcatgaagtctttgcccatgcctatgtcctgaatggtattgcctaggttttcttctagggcttttgtcattttaggtcttacgtttaagtctttaatccatcttgagttaatttttgcataaggtgtaaagaaggcatccagtttcagctttctgcatatggctagccagttttcccaacaccatttattaaataggaaatccttcccacattgcttgtttgtgtcaggtttgtccaagatcagatggttgtagatgtgtggcgttatttctgaggcctctgttctgttccattggtctatatatctatttcggtaccagtaccatgctgtttttgttactgtagcctcgtagtatagtttgaagtcaggtagcatgatgcctccagctttgttctttttgcttaggattgtcttgactatatgggctcttttctggttccatatgaaatttaaagtactttttttctaattctgtgaagaaagtcaatggtagcttgatggggatggcattgaatctataaattactttgggcagtatggccattttcatgatattgattcttcctatccatgagcatggaatgtttttccatttggttgtgtcctgtcttatttccttgagcagtggtttgtagttctccttgaagaggtccttcacatcccttataagttggattcttaggtattttattctctttgtagcaattgtgaatgggagttcactcaagatttggctctctgtttgtctattattggtgtataggaatgcttgtgatttttgcacattgattttgtatcctgagactttgctgaagttgcttatcagcttaaggagattttgggctgagatgatggggttttcttttttctttcttttttgagatggagtctcactcgtctcgcccaagctggagagcagtggtgcaatcttggctcactgcaacctccgcctcccaggcccaagcaattctcctgcctcagcctactgagtagctgggatcacaggagcctgccaccatgcccgactaatttttgtacttttagtagagatgtggtttcaccatgctgaccaggctggtctcaagctcctgacctcaggtgatccatccaccttggcatcccaaagtgctgggattacaggcgtgagccactgcacccggccaatgatggggttttctaaatatactatcatgtcatctgcaaacagtgacaatttgacttcctctcttcctatctgaatacccttcatttctttctgttgcctgattgccctggccagaacttccaatactatgttgaataggagtggtgagagagggcatctttgtcttgtgctggttttctttttttgtttgtttgttttgttttagaatattatttttatttagttatttttattattattatacttaaagttttagggtacatgtctacaacgtgcaggtttattacatatgtatacatgtgccatgttggtgtgctgcacccattaactcgtcatttagcattaggtatctctcctaatgctatccctccccccttcccccaccccacaacagtccccagagtgtgatgttccccttcctgtgtccatgtgttctcattgttcaattcccacctatgagtgagaacatgcagtgtttggttttttgtccttgcgatagtttgctgagaatgatggtttccagctttatccatgtccctacaaaggacatgaactcattattttttatggctgcatagtattccatggtgtatatgcgccacattttcttaatccagtctatcattgttggacatttgggttggttccaagtctttgctgttgtgaatagtgccacaataaacatacgtgtgcatgtgcctttatagcagcatgatttataatcctttgggtatatacccagtaatgggatggctgggtcaaatggaatttctagttctagatccctgaggaatcgccatactgacttccacaatggttgaactagtttacagtcccaccaacagtgtaaaagtgttcctatttctccacatcctctccagcacctgttgtttcctgactttttaatgattgccattctaactggtgtgagatggtatctcattgtggttttgatttgcatttctctgatagccagtgatgatgagtgctttttcatgtgttttttggctgcataaatgtcttcttttgagaagtgtctgttcatatcgttcacccacttgttgatggggttgtttgtttttttcttgtaaatttgtttgagttcattgtagattctggatattagccctttgtcagatgagtaggttgcaataattttctcccattctgtaggttgcctgttcactctgatggtagtttcttttgctgtgcagaagctctttagtttaattagatcccatttgtcaattttgtcttttgttgccattgcttttgatgttttagacatgaagtccttgcccatacctatgtcctgaatggtattgcctaggttttcttctagggtttttatggttttaggtctaacatgtaagtctttaatccatcttgaattaatttttgtataaggtgtaaagaagggatccagtttcagctttctacatatggctagccagttttcccagcaccatttattaaatagggaatcctttccccatttcttgtttttgtcaggtttatcaaagatcagatagttgtagatatgcggcattatttctgagggctctgttctgttccattggtctgtatctctgttttagtaccagtaccatgctgttttggttactgtagccttgtagtgtagtttgaagtcaggtagcgtgatgcctccagctttgttcttttggcttaggattgacttggcgatgcaggctcttttttggttccatttgaactttaaagtagttttttccaattctgtgaagaaagtcattggtagcttgatggggatggcattgaatctataaattaccttgggctgtatggccattttcactatattgattcttcctacccaagagcatggaatgttcttccatttctttgtatcctcttttatttcattgagcagtggtttgtagttctccttgaagaggtccttcacatcccttgtaagttggattcctaggtattttattctctttgaagcaattgtgaatgggagttcactgatgatttggctctctgtttctctgttattggtgtatatgaatgcttgtgatttttgcacattgattttgtatcctgagactttgctgaagcggcttatcagcttaaggagattttgggctgagacgatggggttttctagatatatactcatgtcatctgcaaacaggaacaatttgacttcctcttttcctaattgaatgccctttatttccttctcctgcttgattgccctggccagaacttccaacactgtgttgaataggagtggtgagagagggcatccctatcttgtgccagttttcaagggggatgcttccagtttttgtccattcagtttgatgttggctgtggatttgtcatagatagctcttattattttgagatacgtcccattgatacctaatttattgagagtttttagcatgaagcgttgttgaattttgtctaaagccttttctgcatctcttgagataataatgtggtttttgtttttggttctgtttatatgctggattacgtttactgatttgcgtatgttgaaccagccttgcatcccagggatgaagcccacttgatcatggtggataagctttttgatgtgctgctggattccgtttgccagtattttattgaggatttttgcatcaatgttaatcaaggatattggtctaaaattctctttttttattgtgtctctgccaggctttggtatcaggatgatgctggcctcataaaatgagttagggaggattccctctttttccatgaataggaatagtttcagaaggaatggtaccagctccttcttctacctctggtagaattcagctgtgaatccatctggtcctggactttttttggttggtaggttattaattattgcctcaatttcagagcctgttattggtctattcagagattcaacttcttcctggtttagtcttgggagggtgtatgtgtctaggaatttatccatttcttctagattttctagtttatttgcatagaggtgttcatagtattctctgatggtagtttgtatttctgtgggatmggtggtgatatcccctttgtcattttttattgcttctatttgattcttctctcttttcttctttattartcttgctagcggtctatcaattttgttgatcttttcaaaaaaccagctcctggattcgttggttttttgaagggttttttgtgtctgtatttccttcagttctgctctgatcttagttatttcttgccttctgctagcttttgaatgtgtttgctcttctctagttcttttaattgtgatgttagggtgtcaattttagatctttcctgctttctcttgtgggcatttagtgctataaatttccctctacatactgctttgaatgtgtcccagtttcaaagggagtgcttccagctttggtccattcagtatgatattggctgtgggtttgtcataaatagctcttattattttgagatacgttctatcaataccgagtttattgagtttttgcatgaaggggtgtttaattttatcagaggccttttctgcatctattgagataatcatgtggtttttgtcattggttctgtttatgtgatggattacatcgattggtttgcatatgttgaaccagccttgcatcccagggatgaagccaacttgattgtggtggataagctttttgatgtgttgctggatttggtttgccagtattttattgaggattttcacttcgatgttcatcaggtatattggcctgaaattttctttttttgttgtgtctccaccaggttttggtatcaggatgatgctggcctcataaaacgagttaggaaggagtccctctttttctatttggaatagtttcagaaggaagggtaccagctcctctttgtacctctggtagaattcgactgtgaaaccatctggtcctgggcttttttgggttggtgggctattaattactgcctcagtttcagaccttgttattggtctattcagggatttgacttctttttggtttaatcttgggagggtatatgtgtccaggagtttatccatttcttctagattttctagtttatttgcatagggtgtttatagtattctctgatggtagtttgtatttctgtgggatcagtgttgatatcccctttatcattttttattgtgtctatttgattcttctcttttctttattagtctggctagtggtgtatttagttaaccttttcaaaaaaacagctcctggattcatttattttttgaagggtttttcttgtccctatctccttcagttctgctctgatcttggttatttcttgtcttctgctagcttttgaatttgtttggcttgcttctctagttcttttaattgtgatgttagcgtgtcaattttacatctttcccgctttctcctgtgggcatttagtgctaaaaatttccctctaaatactgctttagttgtgtcccagagattctggtacattgtgtctttgttcttattggtttcaaataacttatttatttctgccttaatttcattatttacccagtagtcattcaggagcaggttgttcagttatcatatagatgtgcggttttgagtgagtttcttaatcctgagttctaatttgattgcactgtggtctgagagtctttttgttatgatttcaattcttttgcattttctgaggagtgttttacatccaattatgtggtcaattttagaataagtgcaatgtggtgctgagaaggatgtatattctgtcagtttggggtggagagtctgtagatgactactaggtcygcttggtccagagctgagttcaagtcctgaatatccttgttaattttctgtctcgtcgacctgtctgatattgacaatggggtgttaaagtctcccactattattgtgtgggagtctaagtctctttgtagtctctaagaatttgctttatgaatctaggtgctcctgttttgggtgcatatatatttaggatagttagctcttcttgttgcattgatccctttaccattatgtaatgtccttctttgtcttttttttatctttgttggtttaaagtctgttttattagaaactaggattgcaacccctgcttttttgtttgtttgtttttgttttgctttccattttcttggtaaatcttcctccatccctttattttgagcctatgtgtgtctgtgcacgtgagatgggtctcctgaatacagcacaccaatgggtcttgactgtttatccaatttgccagtgtgtgtctttaaattggggcatttaacccatttacatttaaggttaatattgttatatgtgaatttgatcctgtcattatgatgctagctggttattttgcctgttagttgatgcagtttctttatagtgtcgatggtctttacaatttggtatgtttttgcagtggctagtaccagtttttgctttgcatgtttagtgcctccttcaggagctgttgtaagacaggcctggtggtgacaaaatgtctcccagcatttgtttgtctgtaaaggattttatttttccttcgcttatgaagcttagtttggctggatatgaaattctgggttggaaatttcttttctttaagaatgttgaatattggcccccactctcttctggtttgtagggtttctgcagagaaatctactgttagtctgatgggcttccttttgtgggtaacctgacctctctggctgcccctcacattttttctttcatttcaaccttggtgaatctgacgattatgtgtcttggggttgctcttcttgaggagtatctttgtggtgttctccttatttcctgaatttgaatgttggcctctctttctaggttggggaagttctcctggataatatcctgaggagtgttttccaacttggttccattctccccatcattttcaggtacaccagtcaaacctaggtttggtcttttcacatcatcccatattttttggaggctttgttcattccttttcattcttttttctctaatcttgtcttcatgctttatttcattaagttgatcttcagtctctgatatcctttctttcacttgattgattcagctattgatacttgtgtatacttcacgaagttctcgtgctgtgttttgcagctctatcaggtcatttatggtcttctctaaactggttattctagttagcaattcctctaaccttttgtcaaggttcttaggttccttgcattgggttagaacatgcttctttagctcagaggagtttgttattactcaccttctgaagcctacttctgtcaattcgtcaaactcattctccatccagttttgttcccttgctggcgaggggttgtgatcctttggagagaagaggcattctggtttttggaattttcagcctttttgcactggtttttcctcatcttcgtggatttttctacctttggtctttgatgttggtgaccttcagatggagtttttgtgtaggtgtcctttctgttgttcatgctattcctgtttgttagttttccttctgagtccggcccctctgctgcaggtctgctggagtttgctggaggtccactcccaaccctgtttgcccggatatcacaagtggaggctgcagaacagcaaagattgctgcctgttccttcctctggaagtttcatccctgaggtgcacccaccacacaccatccagagctgtcctgtttgaggtgtatgttgacccctgttgggaggtgtctccctgtcagaaggcacgggggtcagggacccacttgaggaggcagtctgtcccttagcagagctcaagcactgtgctgggagatccgctgctcccttcagtgccggcaggcaggaatgttgaagtctgctgaagccgcgcccacagccaccccttcccgcaggtcctctgtcccagggagatgggagtttcgtctataagcccctgactggggctactgcctttcttttagagatgccctgcccagagaggaggaatctagagagctggtctgatattttttaatgggaaatcatttttcttgttggtgtagtttatccaagtttttttttccaacctgtaaatgataactttgtgagcttttcggaagaaactgataatttttggaaattttgaattcaatatttaccttatttgtactataacaagtaacagtgaatttaaaacaggcaaagaaaacaaacaatgagcttcatgaattataactcaggacttattttctccctcagtcaaaaagaatgttaagctgtgttaatctacaaggaattttgttaatgttgatgtaatgttggctctgttaggagtgcctgaacagagtgcagacatcttgagaagtttaacttacacaactcaattttcataagcatttcagtaactaaccttaaagtcattgtaaatgttgatatgaaaattgttttctcaaaatcttctgaataatcaacactcaagggaaaggttttagacagtattttaagaaatttgacaggaatggaaaatcagaggaagccatctagaaaattttactccatggcagtcatgaagaattctttgttagccaagggcaatactgcagtgcatcatgtactataaacaataccctccaagggtcagagagggtctttgaagttatctactgccattttctttccagggcagggattctgtctttagcatccttgagaattatcaagtattttctaggtagtatggggtacataaaagtaagagcaatgttagaggtaaatagaaataattgttatgtaagttcagaggaaggaggtgtcactgactgggtaatcagagattctttgcagaggaggtggctcatacgcaggaatttacttgtgaaggacagggagaatttcacttgagaaaaagcctggcccaagcatatatgtggaaattagaaagcacagggtgtgtttgaggaacagcagataaaattaagggctggagtctcagtaggacatgcaatgttaattgttctccgggagcattgcaatcacttctagcagggcatatttgcaatacagcaggcaaggtttaggccagtaaattttttccttcagttctaattgagttagatgtcattagtgccattcttcattgggatgaactgaagaagagtctgtgattcagaacaagttgaataaatatgcaccaaatgccctgtacttgtaaatatttatgacatgctgtcagtataaattatatttactatatatttcaaaatatttttgttagcaaacatttgctttaaaaagatgcatttctatactctctacataaagttgtggatttcatactgataaattttcaaatgcaaaacaaatactccttctttatrtgtagacacagggaatatggaggttctgcacctgtatggaagtgaggaacagaagaaacagtggcttgagcctcttcttcaagggaacattacctcttgcttctgtatgacaggtaaatgccaatcaccattctctccttgtgtagtcagtcgtcccggagttattatggatgagctgaagaaatacaggatgtggttctgtgtttcagtcaaatttgccattggccaaaaatgtgagtatgtttattttgagcctgttattaaattttggcattttcaaatgttcagaaaaatatgatcctctcctttgttagaatatcagatgatgttctctagtagcctgctatagcattagtagcagagtaaacttagtttcacaattttttgatgtcattactaaaattgctatatatgaatatttaagatcttctttgcccttatgtatgaaatatctatctttgtgataattttatattgatacttataaaatattcaactcttccataaacccagaaaaatagaaatttcaccagtactggacatatggctcaaattataatcatgtgggaaaataaaggaacatgtcaataaaaacagatttaatatcatttgtacatagaaagcattaagaactcttcaatagaaaaaaatcattgttttgtgatttagtttagaattataccaaattttgcttgtccataatttttaagtgctttcaataatggccagattttattgttttgtataacatagcatacatttatacagtactcctcttttatctgaaggggatacgttctaagactcccagtgggtgtctgaaaactgggatagtcctgaatgctatttagactatgttttttcttatacatatgtacctatgatacagtttaatctctaaattaggcatagtaagacattaataataactaataataaaatagaacaattataacaatactcagaatggtacactatttaaaaattacaaattgtttacttctggaatttttcacttaatatttttggaatgcagttggcctcataactgaaacctcagacagcaaaactacagataacaggggactactataatagcagaactgatctccgtttaaatcagtaataggcatttattgaatacctacagtaggatgtattgtctacaaagcactaggtggggtttacaaaataagtagaatacacagccctctttctaaaaaagaaaaaaaataagtcttaagttttagaaacagaacacatgggatatctgaaggactcatttaaaggggtgtcatattagcaagtgcagattgctatgattgagagctagacagttctgaagtgccatgcaataaagcagttgtctaagggtgtcccatggagaactttctgaagaccttaagtgttgaacaggctttaaagaatgcraagtatataaatcagtgaaggcattcctgatggaatttgcaaggcacattagaaattgcttaagacagtaaactatatggggggaatctgtcttgccaatcaatatttagtacatatctccattgtgagaagtagaaaacaatacttttatctacatttgctgattggagaaaggactgggttgtatcccaaatcatatatcagtgaggaagccaaaaatacagttcaaaatactgatccccaatgttcagtatacttcattcattcactcattctttcagtgcacgtttattgaatactgtgtgtaggttatgggaaaagcagggtggaatggggagtgaaaggacattgaaaaagataamgatgtctttgtttttaaagttttcatatccttatctaagtctactgatgatatctgcctgcctgtaaattcagcttttgtttatttatagaacctgatgtagcttcaagtgatgccacgaatattgaatgcagcatccaacgagatgaagatagctatgtaattaacggcaaaaaatggtggagcagtggtgagtgttcagcctaattttttcacctaacacactgatcctttgttccagatgctatgctagaatattgctatgatacatagtgatcagtttcatgatcataattctttaaattctgcatgtgtaggccaggtgcggtggctaacacctgtaatcccagcactttgggaggctgaggcaggtggatcacctgaggccaggagttcaagaccaacctggccaacatggtgaagccctgtctctactaaaaatacaaaaattagccaggtgtggtgacaggcacctgtaatcccaactactcaggaggctgaggcaggagatttgcttgaccccrggtggcggaagttgacatgcgctgagatggcaccactgtacttcaccctgggcaacaagagcgaaactctgtctcaaaaaaatgaaaaaataattaattaattctgcatgtgaaagcattttcaaacttagaaatagtggttgaaagaaaaagtaattttaaaataacatatgttggttaggtgatgtttaagagcagaaaacatgtcattttttgtagttttagagataaaattcattagtgcatactatttttgaccaatgtaattgctagcaaaatttaattttagtaggagcatattacatggattataataatttacagcaaatttttttaaaaaagataagctgtacatgttaattaacaataatttattgtggtacatatttttattactcaaaaataaagtgtttaaatgaaaataggacattttatgcatgggataatgtattttttagtcaatcggcagtggtagacttgtataaacagatgaattctttaggaagttaagaaattggaacccagatgaaaatgatagtctgaggattacacctagactatatatgataaacctaacatttgtcatgataaccagttattagtaagaaagttgacatcatagaagcaaattatgtctttaggaacttaccaggaatgttttgaaaagaatcagaaaagcttattatagtttgttttttttttattgcttttttggaggaggtggattttataaaattacttacaaatttaaaaaaaacaggaaaaaagatagttggagttctgctgcatacttattcaagtactaaaattatgcagggaaatcgttcttgtattaaaacttagataattaaaaataattataaatgccttttaacatgaacctctttaataatctgttttagatggcctaacttatagcatagtgggtttttttttaacttgttttattttgaaattattataaattcacaggaagttacaaagatggtacagagtggtcctgggtacccttcacccagttttccccaatggttccatcttacataattatactataatgtcaaaaccaggaaattgaaattggtacaatgtgtgtatatagttctgtgtcattttatcacttgtgtagatttgtataagcaccannnnnnnnnnnnnnnnnnnnctagcattgtcatttactgtataaaaaaccagctggggtatgctcagcaagatggcagccatccagacacagaaacagatgatccagcatggttttcccactcctgattggctggggactttagttactgccacatatctgtctatgctgatacaagccagaaactgcattccagagacaaagtttagtgtgtacaaggctgaagttattttgcacattattttccctaaaacccacccatgaactgcattaacagcccaaaaaggcagagtgaatagaaggagtaaatctgctacagccaaattcaggatgtacacatctgttttggttctctgtttcttgtaataggcataaattgccactaccatggaattgcctgcaagtccaatgacgaaaactattgtgaggaatacagggaggaaaactttkgcaaattctctgacatcttctttgatacagatcagttcatattgactgtagtcataagtgccattcatttcattttcctcataataataatctgttgactggttctgttccaaagccatggctccaatctagatggcaaagagaatacaggatagatatttgtctaaatatgcttaaaaggaaacagtttttatcaagctgttttgttctttccctagagtatagcctgttgctgtaacatatgtgagcctgaatctagcactctttgaaatgctttaatgggagccacattggaatatgaccccaagattagttactcaaactttgcttgtacaattctgtgtgaaagagcttggatttgaacaggacaataaacataatgccctggagaattttcttaatcattaaatcctaaataaaagtgaagacttttatgtaaaaatgatttttaaaatatgaaaatytaattagattttaactaaaaagaataaatagtgttataatctttacatacataattttgtgaatcgtaaaagtatatctacaacaaattgaataaaaacgaaaatagcaaattacttggtttatttaaattaaatttattttttattttgatgttatttataaatttaatttaaataagttaaataaattctctcagcatttgcactaaatttcactagttgccttttataaaacaagatctcctttagccaacttccctccaaaactggtcactacttgcttattgtatactgttttttagtagcaccactatcttctaatcatctaagctgtaagcctgcttcattcttgtcttctctcttaccttcatccctgcttcccaatcagttcccaagttctgattctgccttccaagtaggtcttgaatctgtcttctcctcttaatctgcactcttccacacatttgcacaattcagctattatgtttctcacctagcctactgcaatatctttcttttttaatatttaatatttaattttttttttgagatggagtctcattctgttgcccaggctggaatgcagtggacaatctcggctcactgcaacctccgcctcccgggttcatgcgattctcctgcctcagcctcccaagtagctgggattacaggtacacaccaccatgcctggctaattttttctatttttagtagagatggggtttcactatgttggccagactgttctcgcactcctgacctcgtgatccacctgcctcggcctcccaaagtgctgggattacaggcgtgagccaccgagcccagcctatttttaaattttaatccatttatttatttatttattgaccaggttatgagtctgtataactttttgtatttttgatagagacggggttttgccaggttgccaaggctggtctcaaactcctgggctcaagcaatctacctgccttggcctcgcaaagagttggagtaacaggcatgagccactgcacctggccaagcagtatctttctaactgatagcctgttgttactcctcctcaatacctccttttcaaaaacgtttttcttacttccaccagagtatttgatctctaaattgccaatctacctctcctctgttttgttcctcatctggaagacacatctcttcacctgaaagccacaatccaagctccttagcataacacccaaggctcccttcataatgtggtgccatccatggctcctgccacctctccctactctgtgtccacactagagacagtgataggactaatttctcagcagtgggctggcacccaccatgcagcagcatctgtctacatcattgctcattctgttcctttatctaccatacaatttcctgcccttccctggaagggccaattcctactcaataaacgcggatgcgacctccccagaagactttcctgatgtattagcaatctctacatacccctcagagaactgatccattctgtggaaaggatgcgtttcccatactaccttgttcctctaggttttaagttcctcaaagcatgacctatttgatttgtgtttgtaaataaaatcttgttaatgtgcctggcacaaagtagcttctcagtaaatatttgtcaaattaaagcttttgccaacaggtataaagctgttactctagaatggatagatagtatgccagaaatcttctatgtcaacattgttattgcactatgttggctactagcaccccgtagtattaagataagcttgcacagaattcgtaagttttggaatgtataaaataatgactttcagtgtttttattatagtgctgaattttgttttcctttttcttatcctttctattttccttgggttstttttgtcctctgaagtatctcaaatattcttatagaatcaataatgaaaatattatttttaaaacagtgtgccaacttatagtacattttcaaaagaaatgttcttatgtttgctaactttttttgaatgaatatagcaaagaaaagaaggctctgaagaaagacaccacatagaagaattgctttcattatgtaaaaaccgggtgccaacttttttaaatgactctttttatcattaaagttacttaaaaagttccaatctggaagactactctggtcttcatgttcttatgcattaattattaacacagtatgaaccttgttcttcctttctctttcatcagaaaatcttgaacctgatgataagaaataatatggccaaatattataatatattaaggaagggaatttttaagtaagaattaatcttactaaaaatgtgagtaaaaaagagtagaaatggaattatttgcagaaatgatccttccggcagatatatagacacgcttttaagtgtctttataattaccatgagaataaaaaaaaaatcagtacttgtaaaagaaagtgaaaaaaagtggtataataaaacctattttctccttaacaaagttttaccgacaagtaatggcatttaaaatcgtattttcttcttgctatattaagattttcatttaaggttaaactgtacagctattttcaagtaacccttttttttttttttacaagtaagcatttaaacttttatgcatcaagactccatctatataagtaaatatacaagatctttgggcttaaaaaaatattcaagtcagaataagaaaagaaataaagtaccaacctgttgtagtcggcagagaggagcagtcttgagtacagagtataaaatcaaatgacctaactccagctacttttgttttcactttacaccccgcctttatcttgtatccaagaaggctttcctgaaatttaaccttgtgagcacttgatattttatttcctgtaaaaccatctgtgaagttaaattcaacttcttaagtggtttaggttacaaatttgagaaaatccatcttttttcaaaaactatagacctttcatagtttccacttagtcaaaggggacaagaaagtgcctgcagctgagctactgactgctgaaccagaaggagaatccacctgagggcatctaggcagcacttgtaggtagcatctagagaaatactctctaaagttattttgcctaaggaagaaagcaaatatgattttaaccaaggaaaatatctttttgaagactaaattatcaaagattaaattataagtaatcattaggtatttgcaatagaatttaacatttttatgccacatcatttaatatttatttaaactactagagtcttcctggcttcactgtactttctctatccttgtcccagagtattttcccatggctttaaactctcttgctttcttgttaccttttttcccaaagctagaatatgaaccttcaaaatccttcagtctgggaggctgtttattttttccacatttccacacaagtaagttagagaaagaagagaaatttatgctgatttggccctcatggtctatttgaacttggctttcctcaaatttgcatggcagttatctattttttcatgcaaggccaggctcagtctccacctgcagaaattatttcagacccatgccattttttctatttttctcttttttaaaaaaaaacttttaagttcaggggtacacatgcaagtttgttacacaggtaaacatgtatcatgggggtttgttgtgcagattattttatcacccaggtattgagcctagtacccattagttatttttcctgatcctctttctctaccaccctctaccctttgataggccccagtgtgtttccctccatgtgtccatgtgttctcatcttagctcccacttataagtgagaacatgcagtatttagctttctgtccctttgttagtttgctaaggataatggtctccagctccatccacgtgcctgcaaagaacatgatctcattcttttttatggctacatagtattccatgctgtatatgtaccacattttctttgtccagtctatcattgatgggcaaatatttaggttgattccatgtctttgctattgtgcatagtgctgcaatggacatawgcatgcatgtgtctttataatagaataatttatattcctttgggtatatacccagtaatggaattgttggctcgaatgatatttctgtctttaggtctttgaggaattgccacactgttttctacactcccaccaacagtttgtaagtgctcctttttcttcacaacctcaccagcagctgtaattttttgagtttttaataatagccattttgactggtgtgagatggtatctcattgtgattttgatttgcatttctctaatgatcagtgatgtttagctttttttcatatgattgttggcggtatgtatgtcttcttttgagaactgtctgttcacatcctttgcccactttttaatagggttgtttttaattgtaaatttaaatttcttatagatgctggatattagacctttgtcagatgcatagtttgcaaagattttctcccattctgtaagttgtctctttactctgttgatagtttcttttgctgtgcagaagctcttcagtttaattaggtcccatttgtcaatttttgcttctattgcaattgcttcatcatgaactctcatagtagtctacaagatcccacaaggtctgcctccatccctcattgtctctctgacctcatttcacactactcacccctttgcctacttgttctgccatacccagcttcttgctgtttgagagcataccagtcacaatcctatcagggcttttgtgctggctcttctgtctgctggaatgtgctctgtcttagtaattgcaaagctcacttcctcttctctttcaagtctttgcccaatcaccaccagctcactgaggcaattcttcactactctacttaaaataaccctcatccatctggactcccagtccaccagacccatagcacttaacatgttctaatgcaccatatcatttatgctgtgattgctgtaatttgtctttcaccctgtattagaacataagcttcatcagaacagggacttttgtttgctttgttcattgatatatcccgagtaccaagaataatacctgacacataatgactactcaaaaatattttgaattaataaaaacattctactgtccattttgattattatctaacaactggtctgcaactgcagcctccataattatcagataataatctctttgatctttctatatgatacacaatactgacttttaggcatttgcaagtactattattcctgtctagagcactcttcccaccctattttagttccctaactcctatttacaattcagatttaggtctgaccttaacattaatccaggaagccttccataactctttcagattagatcagatataccagtcttttcactgtattgttggtacttatttaaattttctatcttccatagctatcttataccctgctgtatcctcagcatttggcttggtaccttactcatggtaccagcttaatgaataatgattaaattcatgaatcaatcaactgatatttaagtaacttatcctccacagacataaagtttagcaatggagctggagttctaaattcagatctttagtctattttatcatcttatctcttatatctctttattttatgatgccatctattatagaatcttgatactcttttatagattcaaaagtatctatccctttcctttatttaccccacccccaacaaccataagcttttttgtaaatgggattcctttattgcaaatcggttgtaatgctataatctttacatcttttgaatttacacattgtttttgctaattcagacacatacaaagcccttgaggcataggggatctcaggattgagcagcttcctctggtagcgtgtgtatgaatgctgtgtataaatcatagtgtatgaatcatggtgaaactagctgactggctggccttttcctgtattttcccttttctcctgatagaactaggagagacagtggtaatagggaaatttgacaaaatacgtgaaataatcatgtagcttagagggtaggcagaagcatcactcaccttaggcaacttttcaaagtacttacttgatgcttctttagctctcttctacttctcatattccttagaactgactatgattccattttgctgcttaccataaattggctcctactcttaacctccctaacatagcaatgtcccttgttcttgaagaatctctctccccacaccctcttctcatccctcctcttgtactgtcattttgctatgttgcccagcctggcctccaactcctagactcaaacaatccacccatcctggccaacaaaagtgctgggatgaatctgtaattttgatgaatattgccaaattgtattccatagggatggtattactttgttctctaccaataatgtatagaaatgtctgtttttctaaaatattgtcaatagaatgtgttgttttactaccactttgctttctaaatgacttgtaacaaattcagcaccccttacctacccttgccaggcatgtgtggaatactggataataaactgcttttgaatgttttcattattgctgtactccacgtttatttgattagtggtaaagttaagcaattttaaaaatctcttttattattcttatttcctctttttgcaattgtgttctttgcccatctgtatactgatttttaggtgttctttataatttagggagctaagtattgcatacattttgtcataaatgttgaaacattcccccccaatttttttttgcttttaaattttattttctaatgtacagcagttttatatagacaaaccaattgatctttgtctgattttgatttcatttatcatttttaagttttaaaatcctttctcacccagagatttaataaatattatattatttttcttctagtttttttatgtcttggttttttttaattttcaactctgctctatttgggatttattttgatctaaccattttctatagtaacaacagtaatagcagcagcttgtaacattattacttaattcttattatttagatgtaaacctagagatggattcagtgaattttgaagatttccctgttaaaaataacacacactctaagagaacacatgggattttttttctttaactgtgggattgtacaatgaacatcttttttcatataagggaaattttattgtaaaatagtacttactccaatttgaattgttagtattaaagctaaaaccaaatgaagttcaggtgttctacctcagaaattctatgttggtagaagaaacggccttgagaatttgtggatggctatctatgcttcatagtatgtaattgtttacatcactttcttaattgttacaaaccacactatactcaaaggtcatgtttttttatccacctatcatctctccttttgttagaaaatgattttgtgggtaaaagcctaagaaattaaaaatcatcaactaacatcagggagatgtaatttttagcctgacttaatcctggcacttgaacagccttgaaataccacagtgtctggattaaaaacaaaattactttatctaagccatctgttttcattcatgaaggcctgtgacacagcatatatgtttaaatgttctctgttctattcagatttcctctaatatattttatttatgacattgggtatcttgttcattaactaaaatgacacaaacaagcaaaactctctataaaagaaggttgtttcaactgctgcacttgccaaattctgcttgtagctaaggggagatgatatctttgggaagggtttttctcatttttctgaaacatcattgttaaatacaaatatttcaaattctacaaactatgtattcacccttacttcctctacttcatgatgacaacagacatccaacttaaaaattgtattttttagaatattaattgttctccatataagattgaggaagacagaatcaaagaattatttgccttacttcttgagtttcttcaaaatttacctggtatcggaaatctattgggcatttatataaggctgtggcaacatttttgtttctttgctttgtttggagacaaaatctcactctattgcctaggctagaatgcagtggcatgatcacggctcactgcaaccttgacttcccggggctcaaacagtcctgccatctcaacatcctgagtagctgggactacagatgtgctgcaccgtgcttggtgaatttttaaatttttttgtatagacgaggtgtcgctaggttgcccgggctggtttcaaactcttgagctcaagcgatcctgccacttcagcctcccaaaattctgggattacagatatgagtcatcatgcccggccaacatttttaaatgatagaaagaatgaggtaagaagtaatattgggaaatattagatacaaaattatatattctgaatattcgaaaaagagggctttagaccagggttcaaaggaattagaagattttacttcagctcactgatgctggatagctagcatcagtgaaaccttgaaagatttacccagatgttcttgattgccagaatggaaagtagagaaagaaaaatatctctgaaaatgggcacatagaccaatggaacagaatagagcccagaaataaggctgctcacctatgaccatctgatctttgacaaggctgacaaaaacaagcagtggggaaaagactccctattctatagatagtgctgggataactggctagccatatgcagaagattgaagctggacccctaccttacaccatatacaaaagttaattcaaaatgaattagagacttaaatgtaaaacccaaaactataaaaaccctggaagatgacctaggcaatactgtcctagacataggggtgggcaaagggtacatgacaaagacaccaaaggcaatcacagcaaaagcaaaaattgacaagtgagatctaattaaacttaagagcttctgcatagcaaaagaaactatcagcagagtgagcagacaacctacagaatggaagaaaatatttgcaaactatgtatctgacaaaggtccaatatccagcatctataaggaacttgaacaaatttacaagagaaaaacaatctcattaaaaagtgggcgaatgacatgaacagaaacttttcaaaggaagatatatatgcagccaacaaaatatgaaagaaacctcaatatcactgatcattagagaaatgcaaatcaaaatcacaatgagataccatctcacgccagtcaggatggctattattaaaaagtcaaaaaataacagatgcgggtgaggttgtagaaaaaaaggaacacttaatacactgttggtgggagtgtgaattagttcaaccattgtggaaagcagtatggagattccccagagagctaaatacagaactactggccgggcacggtggatcatgcctgtaatcccagcactttggggggctaaggcgggaggatcacttgaggcgaggagtttgagaccagcctggccaacatggcaaaaccccaaaatacaaaaattagccaagcatggtggccatgcctgtaatcccagctactcaggaggccaaggcacgagaatcacttgaacctgggagcagggagattgcagtgagctgagatcgcgccactctactccagccttggcaacagagtgagactgtctcaaaaaaatccaaaaacaaaaacaaaaaacccagaactaccattcaacccagcaatcccattactgggtatatacccaaaggaacagaaattattctaccataaagacatatgcatgtgaatgttcattgcagcactactcacaatggaatcaacctaaatgcccatcaatgacagattggataaagaatatgtggtacatatacaccatggaatactatgcagtcattaaaaagaatgagatcatgtcttttgcaggaacatggatggagctggaggctattatccttagcaaattagcacaagaacaaataccgcatgttctcacttataagtgggaactaaatgatgagaacttacgaacgcaaacaaggaaacaacagacacagaggtctgcttgagggtggagggtgggaggagggaaaggagcagaaaagataacaattgggtactgggcttaatacctgggtggtgaaataatctgtgcaacaaaccctaatgacacaagttcacctatgtaacaaaccttcacatttaccccccaaacctaaaataaaagtttgctttttttaaagaaaatatttctaatgaaaatgaacctcaaatcatgttgttatgtcctaatctgattttcagaagtatgcccaccatggagtatgcccacacaatgcattatgtggggcaagtagcgttgatccttcagcctgtaggcatctagagaggcactggccaaggcttcctacaactaaaacctcaaagatagtcccaagtagaaaaatatccagttgaaaaattagaagtgaacgctctgtaaatgattcttcctctataatttctaactaagaatcaaagcatgattgcatattattgcatagccagggataaaagattaccccaactgagcatttccagataagtcatttaggtaagatccacaatgaaaggtaagtattgtcatctgccattaaatcatcctaatgttctttgggttggtcctcagattagtggaattttgtcatagtccattcaggccactattacacaacaccattaattaggtaacttctaaacaacaaaaatgtatttctcatggttctagaggctgaaaagtctaagaacaaggcaccaatagagttggtgcctggtgagggcctgcattctggttcatagatggcaccttcttgttctgtcctcatatagtgaaaaaggtgaccaagctctctcaggcctctttgataaatacactaattgcattttaatcacttaatcaccgcctttcggaccaaaggcttcatctccacataaaatcagcttgggggttaggattccaaaacatgacttctagggggtgacatatacattcagaccatagcagtttctttacctgttagcatctataaaatcaaaaggacatatttctgtaaatataaacaatgataaacaatttgaaaatttagacgtttggataaattaggaaagccaaatagagttactgtgaagaatatgacatttaagatttttaaaacttaactttgaaatatgtgaatgggggatcttttctcattagtacaaatgaggatggtcctttctgaactgattaaaacaagattccattaaatttgaaggaatctaaattataagcaacagttttaaagccgttgcatttcaatcttaactatattttacgtatgttatttatagtatggaataatggaggagattagaattttaagctcttggttttattggttttgaaattttagagctaagatttctagttctgcttatgtgatcattttgaagtgagcattgcatttctcaaacttcagctgataaataaaactcatatatttgtcatgaataaaaatgtatatttgtattcaaatattaatgaatgtataagaaattataacactgggtaagtgaagacctgatttttggcaaagtttaaaggtaagaactctgggggagttctacgctagtctggtggagtaagtgcttaagatgaaccttcccacagataacagctaaaaagctacaaaatacctacatghatacatacatacatacatacatacatacatacctgcctgcctgaaattctcagggaagtgaacaaaggcaagctgattttgtaggggagtcaaaatttggaaagtgagatgggcacagggtgagtttttcatttttagactttagcctgaggaaacagtgtggaacaggaaagctaaagcttctttagaaaactcagatctctgtgtcctgaggaaccagaggagagtgtctagggcaaccatcactgctgggaaatgaggtgggtattcctggaaaggaaaaagccagaaaaggggagctccagctttcatgtggaaactttgcttgggtctctggctaactcctgaatgaaagtaatgcgcagggcaaactcaaagcaccttgcagctaaataataagaactacgctgaaatttgatttcccatccacctgaattgtgatagactctgcagttttactctacctaagttaattgcctgtcaaaacaaaaccatcaacattctgtggaggaatatgacagaatccagagtttcaaaacaaaaaaatcacaatgtccggaatacaatctaaaattgctcaaccaatgaagaataaggaaaacatgacccattttcaagggggaaggccaacacccaaatgattcaaatgttggaatcatcagacaaggacttaaggcagctattataaatgtgctcattgaggtcaagaaaaataaaacattaagaaatatcagaagagaaatagaaaacataaaaaataaccaggtaggaatatcagaacttaaaggtaaaatatctgaaaagaaattcactgactgggcttaataacataatggagataacagaggaaagaatgaacgaacttgaagatagacaayagaaattacccaatatgaagaaaagatgtaaagaaatgaacaatcctagggactctaaaatatgtgtgattagagttccagaagaggcaagagggagagatttgcatttgaaaaaagaataaactaaaaattctaaaactgctaattatttttgattgatataaaataaatgtgtttaacctgaattaagggtctttgttgtctaatgtcagtgcacgtaccagagttttgtttttttgttcttttttgagacagagttttgctcttgttgcccaggctggagtgcaatggcgcaatctcagctcactcactgcagcctctgcctcccgggttcaggcaattctcctgcctcagcctgccaagtagctgggattacaggcgcccaccaccatgcctggctaattttttgtatttttagtagagacggggtttcgccatgttggccaggctggtctcgaactcctggcctcaggtgatccgcccacctcagcttcccaaagtgttgggattacaggcgtgagccactgtgcccagcctattatagactttttgatgcatgataaaatgttctacttgaaaaacattacattttttaacttgtatttatgaaaatgcttgtatttttcttttagtgaaaatttattttcagtataatagtttcttattttatctaataagatgatggagcaaatgcccagaagggtagagaaaatggtttttctctctcagatgtaatatagacaataagtcatgtatttgggggaaaaatgggacagataattttgcccaacatatttggtatctgattgcagtgggacatctcttggtcaatttaatgcatgtggttttttttttattacactttaagttttagggtacatgtgcacaacgtctaggtttgttacatatgtatacatgtgccatgttggtgtgctgcacccattaactcgtcatttaacattaggtatatctcctaatgctatctctcctgcctccccccaccccacaacaggctctggtgtgtgatgttccccttcctgtgtccatgtgttctcattgttcaattcccacctatgagtgagaacatgcggtgtttgcttttttgtccttgcgatagtttgctgaaaatgatggtttccagcttcatccatgtccctacaaaggacatgaactcatcattttttatggctgtgtactattccatggtgtatatgtgccacattttcttaatccagtctatcattattggacatttgggttggttccaagtctttgctattgtgaatagtgccacaataaacatacgtgtgcatgtgtctttatagcagcatgatttataatcctttgggtatatacccagtaatgggatggctgggtcaaatggtatttctagttctagatccctgaggaatcaccacactgacttccacaatggttgaactagtttacagtcccaccaacagtgtaaaagtgttcctgtttctccacatcctctccagcacctgttgtttcctgactttttaatgattgccattctaactggtgtgagatggtatctcattgtggtttcgatttgcatttctctgatagccagtgatgatgagcattttttcatgtgtcttttggctgcataaatgtcttcttttgagaagtgtctattcatatcctttgcccactttttgatggggttgtttgtttttttcttgtaaatttgtttgagttcattgtagattctggatattagccctttgtcagatgagtagatggcaaaaattttctcccattctgtaggttgcctgttcactctgatggtagtttcttttgctgtgcagaagctttttagtttaattaattgaagtcaattttgtcttttgttgacattgcttttggtgttttagacatgaagtccttgcccatacctatgtcctgaatggtattgcctaggttttcttctagggtttttatggttttaggtctaacacgtaagtctttaatccatcttgaattaatttttgtataaggtgtaaggaagggatcaagtttcagctttctacatatggctacccagttttcccagcaccatttattaaatagggaatcctttccccatttcttgtttttgtcaggtttgtcaaagatcagatagttgtacatatgcggcattatttctgagggctctgttctgttccattggtctatatctctgttttggtaccagtaccatgctgtttggttactgtagccttgtagtatagtttgaagtcaggtagcgtgatgcctacagctttgttcttttggcttaggattgacttggcaatgcaggctctgttttggttccatatgaactttaaagtagttttttccaattctgtgaagaaagtcattggtagcttgatggggatggcattcaatctataaattaccttgggcagtatggccattttcataatattgattcttcctacccatgagcatagaatgttcttccatttgtttgtatcctcttttatttcattgagcagtggtttgtagttctccttgaataggtccttcacgtcccttgtaagttggattcctaagtattttattctctttgaaggaattgtgaatgggagttcactcatgatttggctctgaaaggaaaaagtggtaccagccactgcaaaaacatgccaaactgtaaagaccatcgaggctaggaagaaactgcatcaaccaatgagcaaaataaccagctaacatcataatgacaggatcaaattcacacataaaaatattaaccttaaatgtaaatgggctaaatgctccaattgaaagacacagactggcaaattggaaaaagagtcaagacccatcagtgtactgtattcaggaaacccatctcacgtgcagagacacacataggctcaaaataaagggctggaggaaagtctaccaagcaagtggaaaacaaaaaaaggcaggggttgcaatcctagtctctgataaaacagactttaaaccaacaaagatcaaaagagacaaagaaggccattacataatggtgaagggatcaattcaacaagaagaactaactatcctaaatatatatgcacccgatataggagcacccagatttataaagcaagaccttagagacctacaaagagacttagactcccacacaataataatgggagactttaacaccccactgtcaacgttagacagatcaacgggacagaaagttaacaaggatatccaggaattgaactcagttctgcaccaagcggacctagtagacatctacagaactctccaccccaaatcaacagaatatacattcttttcagcaccacaccacacctattccaaaattgaccacatagttggaagtaaagcacttctcagcaaattcagcaaatgtaaaagaacagaaattatatcaaactgtctctcagaccacagtgcaatcaagctagaactcaggattaagaaaaccactccaaactgctcaactacatggaaactgaacaacctgctcctgaatgactactaggtacataacgaaatgaaggcagaaataaagatgttctttgaaaccaacgagaacaaagacacaacataccagaatctctgggacacattcaaagcagtgtgtagagggaaatttatggcactaaatgcccacaagagaaagcaggaaagacctaaaattgataccctaacatcacaattaaaagaactagagaagcaagagcaaacacattcaaaagctagcagaaggcaagaaatagctaagatcagagcagaactgaaggaaatagagacacaaaaaacccttcaaaaaatcagtgaatccaggagctggttttttgaaaagatcaacaaaattgatagacctctagcagactaataaagaagaaaagagagaagaatcaaatagatgcaataaaaaatgataaaggggatatcaccaccgatcccacagaaatacaaactaccatcagagaatactataaacacctctatgcaaataaactagaaaatctagaagaaatagataaattcctcgacgcatacaccctcccaagactaaacgaggaagaagttgaatctctgaatagaccaataacagggtctgaaattgaggcaataattaatagcttaccagtgaaaaaaagtccaggactagatggattcacagctgaattctaccagaggtacaaggaggagctggtaccattcctcctgaaactattccaatcaatagaaaaagagggaatcctccctaactcattttatgaggccagcatcatcctgataccaaagcctggcagagacacaacaaaaaaacagaattttagaccaatatccctgatgaacatcgatgtaatgcatgttgttaaaaaattttctgtcccagttagttaagagtcctctctcttcctttttagtcgtakataaaatcatttatatgcatatatgattgcatgttcttacaactctgaggctgtgactatggagaaagcaggcttacaattcaagttctaagtcggtttaaggtgtctccttattctaccaccagcctggaggtgaacagagtcacccattttaggcacactgccttcctctccttccctccctttctcagataatatctattttaggtgttttttttttaaatcagttttagcattttgtcagagagtgtgcatgtaggatttctggagttatgtattacatagaagtggggaaatgactcctccacagccctcagattagatattcagattaaaagcaaattcagaaagaaaaataaaacattgtagttcactcaacaagcctctcagtctcctacttgggaatccacagatttgtttacaagatgggtttttttctttaatgtttttaaagtcattattacccagttagaagtagtaacaaaggaaaaaatatctgagagcattgtttcccatgtctccacatccaaacatcatgccctacagaaaactcttttttttttttaacagtttctgtttgtagttctctggtttccattataattgtagataaaatattttttctctttcttaatttattcattttagacagtatccattggctctccaatttgaataatgacaatttcactcatttgtctcataactctctctgctctttcttaacgtatttatcttattacattgttttttgttgtttttttattttttaaacctcaaataattgttaaagttctctgcatcctcatttcacagattctattcaagctctactttaatataagaatatgtatactcttaaccctttctacactctttatccctccctttcttattgtaacttgtatcagctacagcttatactttcacattttcaggattactaatatttatattctgtcttgcagccacaactgtagttgactacaggataactgtaaactttgaaaaccaatacatagcacttatcttagaggaccatgtaaatattgtttgatgctggcctaagtagtgtgttagattttgtgtccttctgtaactgatgcaatataaaatcacctgggccattctgaggactgtttctagaatcaaggtcaattagaatgcttttctcatatactatatattaaattcatgtcacattattttatatttggaccacagttcacttgtgcatttcaacattattttcctggagtttctaattgccatgtctctttatttgcattatttgcttttataatatctccttccccttacatatacacacatctctagattgcacctttacttctattgactttctttcctggagacttctctcttgaagactttagtatttattttccaatctggactgattaccctttaggcatactttgatgcaattattctgggattttcagataatactttcctgggatccattatcttttggattctaagacttcctttctcttgacttactcccttattttgctcgagtatattcttaattttttgagaaaaagtacataatagttaaattctctgagatcttacatatctgaatatgtatttattcttccattacataaattgatagtttggacaagtataaaattctaagttgaactattcattttcatctagcatccctggtggttgttgagaagtctgatgccagactaatcctcggtccttttagttggcttgttttattctctctgaaaccttttaagatttcctcttctttgttgatgttttgaaatgtcacaagcatttatctaatagattcttcttgctagtcaatggctttttcaatctgaagatgtttttcttcagttctagaaaatgttcttctgctcatttcttcaataaattattccctctgtttttctctgttttctctttatttgactccttttactctgatgttagacttcatgttttggctctaagtgtctcttacatttttggccagtcattctctttaatattgcaggttctttttacatactacagattcttggttttctattcacacttaagagaaaagaaagggtagctggttgaggtttcatctgttattaacttctgcccatcttcttcccataatattttgaaataaatctcagacatcatgtcatttctttcccaaatattttagtatgtgtctctgtaagggctctttaaaaaatgtaaccacaataccattagcacacctaaaattacttaatatcatgacatttccaataactattcacatttctaattgcttaataattaccattaatactttttattttgtttgattgaattaggatctaagtaaggtctaaaaattgctgttggttgatacgccttttaggtctctctcttttgatcttacaagctacttctctatctctcttttttctttttattgcaatttaattgttgaagaaactggattagttgtcttatagatttcccacagtctgaactttactgattacattcctgcaatgtcctttaatatgttccatggagtttatccttttaactcctggaattttataatattattcaactatttgacatcattcctaacatttctcattaaatctttatatgatttcaaatctcctcaaacctctttttataataaatcagaaaaaagaatccgatcatttgtttgagactttgtacagatgtgtttaacttaatctgatccagttgtgtgcagccttgtaattgaaaatctagtcaaatggtagttttcccaagggactagacttactagtaaacattaaaagtaatttttgcaaaaagacccttgtaggcaattgccacagacccctgaactgtgataaaataaaattttgcattaaaatgaaaaaatatttttaaaatttgacccttaagaaattaataaaagaaccaggcttattgaaagtgggatcacagcctcatatacgttgacatataaaatattatattagacatataaaatttctcagcttttctagcatgctgatgtctgaaatggtgtaaatgggagaggtggcagttctttcatgctgctttgacttctggttatttttgtgtagcagctttcattgatggggtccattcttggccttgcctaatcatttttcttggatgatatrgagtgttacaaaagaattattatcttaatgaatcaggaatgttctctctatttgttttctgacataggtaaagtgggaaggattagaaccttcaaggtgaaatgtcaaactagaaatttccttttataatctgcttgtgttccccttggttttaggagctgggaatcccaagtgcaaaattgcaattgttttgggaagaactcaaaatacttctctctccaggtaattaaacaawtctgattgagaaacctgtgtaggaatgagccagtcttcctcctatctaggtaatttacttaaaattcactgtttggactcacaaatcataatgtaagatatgagagtaaatgtcatatatttgtatttcacaagtattttctaacaggtgtttttggaaaacattatagggagtattgctgaacattcttcgctgtggaattttcagtattagaaagtgttgctaaattatcaaagctgtttggattaaattatcagacaaattttttcagacctgtgtaatgaagtgattagatgtttagatcaaaggcaataatcttgaaatgtttaattatatatataagttcccagttaccattgttgagcagtgagaagcttcaatcaaacaactcatttattttcaaatcattgtttctgttccagatcacagcctgcatcagactatgttggtgtacgtcttttacacagttcccattccagtcatcactgcttacatgactacatgaaaacatcaaaaagacaattgtgattctgcttattatctgttttatttttcttcttagcaaactttttctaatacaatttttcttttgactagacacaaacagcacagcatgattcttgttcccatgaacacacctggagtaaaaataataaggcctttgtcagtttttggctacacaggtaggtatccaataaatatgaccatgcattagcaagcaggaaggctagaatatgcagtaacattgaaggcaatagcattttaatgcataagatagattcttagatattcctttgtctgtgayaactgtcttaatataaatgctggtggagttcagagtagagccaataaaaagaaatagtatagcatttatgtaatttataattatataaattatagaatttatagaatataaattctgcctttttgggaaagggcagattgtatttaaggaagagcaacactaccagtcttttctctgtcattcataaaaatggattaatgcacagataatccacaataaaattatttttatctccaattttagccctcttaatcaatcaacttacaagaactgttaaaaagcaatgagtttttgacttatttgagtgcaaaattttccttcctctgcccttgggtgggacttctaagaagcaaagatccatttgtttcctgccacctactgtggcacgtgttcattgtgtacaataaatatttgctaagatcaccctctcagcaagtatttgcttagccaccatgcccagctaatttttgtatttttagtagagacgggctttcaccatgttggccaggctggtctcgaactcctgacctcaggtaatccaccctcctcggcctcccaaagtgctgggattataggtatgagccaccgggcccagcccctggctttctttttatcattgaatatgactaatgaatatgttcaagtggcagatataagacttgcagttttatagaatcacttatcagttaagatgcagctgtagagtatacccacagggtaagcataggtggcaagatgggatgagcaagcttgctggagaaaattgcatgtaggaaattgttgggttgcagcgaaacggccgcaaagataccaaaaatgcgtttataatatagttgagctgcaaataatttccattgcagaggctacatttgattattcagtatgaaaactttactagcacctctccaactccctgtgtccagggccaaaagaaacagtgtggagaaggctgattattgtctcctctgacaggaaaagggtgtagagttagcatgagattatctctaaaacttggcagggagaaggggtgatgcaaagataaaatgtgaacgtgttcctggcctcagtgtttcaaatgccagtattttcaagagacgaacacacagtggaacaagtctagactgggagtaaacctacctgaaggtctagtttctgtatcatcactaatgccaagcctgctctttcccctcaagcaggcccctgtcatctttaggcgttggtttccacaatgataaaataagaaacatggattacattactcatttttaatttttgaaacattgaaacttttttccatgcaaattgtttggaaccccatatgtaaaatatttcaaagaagcagcaataataaaacaaataaaatactctggctggatctatggagcctggtcttcctttttcctagctctctgaaattgtacttcagagaatgaattagaaaacatctggatcaaagggtttctcttcttgaacagttgatgagttttctgggctgctgggtcctggggttcagggctgaggcttacctcagaatgttcatgccatatggatctttgaaatcctattttcttcaagtaattatatttcagcagattaagaatatgtgactcttttttagtcaactccttttgctctaaattttattttctattttatagataattttcatggaggacattttgagatccattttaatcaagtgcgagttcctgccacaaatctaatactaggtgagttgaatttggaaatgattcttcagtattgtacattaatatttcagctctaaatctggaaaagataagtctttccagatttagacctgaagtctaccttgatttagatattaggttcgtgcaaaagttattgcggtttttgaactgcaattacttttgcaccaaggtaattgcagtttttggcaaaagccgcaattacttttgcaccaacctaatactttcccttcttgtttactccatttgtcaagggaaagttttctgtttggcggattttcttacatggaatggtgaggttttatttaagtgttggatgtggttttctatatcacatcaattgaaaagataatatgaaaattatataattcagagcaatacactttctcctagaacatgatctgtaggcctctatttgttttaagaaaacctcagtactttaygaattcaagtattagatataagttagaagcataaataactttgaacactgtatgccatcctcttgcttattagaatactatatccctttcaaagaacatctagaataccacctcttccaggaatgtttttgtgttcatcccatccattcaccaggcccctgatacctgccaggccctgaggttataatgatgaacagaaaatctcttcttcctttgcctttgtttctctctgtatctcttacccttacccactcttctggattctaaactcctagtacagggactatgtgttattccaactttgtatctattgcagcattaataaaatagcttatgcatagtacatacttaagagacagttctgaaatttgaaatgtttaatggtggtggttttaaaaacatagaaatcaaaattcccatgaattcatagtgaaccttattatagaactgactttttttcactagaaagccatttttattaagggcagctcatctctttcccaggatttgtataaataacaaaaggaatgggctaggccattttcacattccccctttttttcccctttcttcccaggtgaaggtaggggatttgaaatttcccaaggccgccttggacctggcagaatccaccactgtatgagaacagtaggtttggcggaacgcgmtttgcagatcatgtgtgagcgggcaacacaaaggatagctttcaagaagaagttgtatgcacatgtgaggacgattacttatttgaatttattgtagcccggtgcactacactaacattgaacaaaaacattacttgtgagagacagactttctctacatgaacygggtgattcttttcaataaggcatatttatgtctgtatttaaatatagtctaatgagaggtatttatctttatgaaaaattaaatagttcctaaaatgcttcaacacctctgcacacaagagtgtagacagttccttcaactttctcagattcttgttctttagagaacctggaacattagagctccctgtggacatgaaggagctgtcataaggaagaaggatttgccttgtccattggtttcctagaaggaattaggacacataagtgtaaagttacaggaaaacagcccaaaactcagggaaaggagaaacatgctaataaacctaaaagtggaatcagcttcttcaggaggacttgaattctgtcactggagaaacacaagtagaaatgggaccaacattttgtgagatattcatgactttttgaattatcatctrtaaattatatactactgagtctgttgttacaaatcactgtaaacatagttacatgtggcccatataataaaaattaggaaatatggccaggcgcagtggctcacacctgtaatcccagcactttgggagaccgaggcgggtgggttgcctgagctcaggagttcaagaccagcctgggcaacatggtgaaaccccgtctctactaaaatacaaaaaaaaacaaaaaaaattaaccaggcatggcgatgtgcacctgtagtcccagctactggggaggctgaggcaggagtattgcttgaacccgggagacagaggttgcgttcagccaagatcgtgccactgcactccagcctggcgacagagcgagactctgtctccagaaaaagaaaaaaaattaggaaatatgtattgagatgaaatagaaggtattatttcagacttccttaaaaagtcttctacagagaagtaggatatccacatcatctcccttctaagttttaagaaggcaagaaaaactattattaaatgttcactctttattattgctaacatgttagtgttaggtcaaatctgtggtgatggaattgtatttgtgtttgctgcacatgtatattttagtatgtcggtctccttatacatttttgaccatcttatgaaatttgcagtatgtattttttaccttaaattattataatctatgtttgctttttgtaaagtattattcagcattatatgatttatttgtatagttttttaactgaaaagctacagcccgctttatgacactacacctgggaataatttgtcaggagcccttttagtatacagcgaaggcaagtttttagtatacagcaaagttcagctgttggctgggcactgtgggaggaggtgagaaagtgtgaccctctggggccctggatacagcctctgatgctgttgaagaaggatgaagaggtgctcagggcaccaaccattacttcttacccttttgtcaagcttgcatgcaaactctggagcagggtgaagggaggacacagtaaagtcgacaaacaagcatcgcgaatgcacaaaagccctctgtgcaagtgctgctttcctgagtggtgttttaatactgcattagtaaaaaatttcccttccaccttttaaagttaatgtgtcatgcagagcaagcctggctttttaacaaatatgcctgttttcactggaaacttttcacatctggcacaaataacgtgatctggcagaaacaaaaagatgtgtgagcatgtcataagcaaaaatctgggccagcttttttattttaatttgtgaaaggaacatttcatttctttgaatttggaggctccttccagctgccttctaatttactccaggctgtaacgcaaaaaattctccatcccagttctgtcttaggaaatatatttggcagttccctagagcacctagtttctacccatttaatgcttttcagcaaatctagggtctatagagacccaactgagaatacctcctttattctaaagctgagaagtaaatgtcttctaagtctgttcatgaagttataaagttgtaattatcctgttttacagccatcaaaaaatatttattcaccaccagcaacttgtttgaaattaattcagagccatgtttcaacctctagggcagtgccatccaaaagaaatatactatgaaccttaaatgttattttaaatgttctaatagcaacatttttaaaaagtgaaaagaaaaagatggaattaattttaataatatattttatttaacccaatatatcaaaaatactatttcaacatgaaatcaatataaaaattattaatgagatactttatattttaatatttattcttcaatatggggtgcatattttatacttatagtacatctcagttcagactaggtatgtttcaaatgctcattagccacatatggttagtagctatcatgttgaacatcaccgctttagggaaactctaatcaaatatcccctgttgaagggcaaacatgaccaagcataaaaatggccaaggtgtgcatgttctcactcataagtggggagatgaacaataagaacacatggacatggggaggggaacaacacacaccggggccagttggagggtgggggcaaggagagggagagcattaggacaaatagctaatgcatgcagggcttacaacctagatgacgtgtagataagtgtagcaaaccaccatggcacctgtatacctatgtaacaaacctacacattttgcacttgtatcccggaacttaaaataataaagaagaaaagaaaggaaaataaaaggacaattaaacgtcaaaaaaatggctaagatgtaaggaaggtgcgcagtttcaatcccctgcagatggctagcaagttatcccagcaccatttattgaataagggagtcctttctccattgcttgtttttgtcacctttgtcaatgatcagatggttgtaggtatgtggccccatttctgggctctctgttacattggtctatgtacctgtttttgtaacagtaccatgctgttttggttactgtagccttgtagtatagtttgaagtcaagtaacattatgcctccagctttgttctttttgtttaggagtgccttggctatttgggctctttcttggttccatataaattttaaaatagtttttcctagttctttgaagagtgtcattggtagcttgataggaatagcattaaatctataaattgccccaggcagtatagtcattttaatgatattgattcttcatatccatgagcatggaatgtttttccatttgtttatgtcatctctgatttctttgagcactgttttgtagttctccttgtaaagattttttacctccctggttagctctattcctaggtattttattctttttgtggcaactgtgaatgggattgcattcccgatttggctctcggggagtgctagtgatttttgtttgttgattttgtatcctgagacttcgctgaagttgtttatcagcttaagaagctttagggctgagactggggttttctagatatagaataatgtcttctgcaaacagggatagtttgactttctgtcttcctgttttgatgcactttatttatttctcttgcctgattggtctgcccaggacttccaatactgtgttgaataggagtggtgagagaggacatccttgtcttgtgccagttttcaaggggaatgcttccagtgtttgcccattcagtatgatgtttgctgtggttttgtcatagatggctcttattattttgaggtatgttcctcgaatacctagtttattgagagtttttaacagaaaagtttagcagaggtgttgaattttattgaaagccttttctgcatctattgagatgatcaagtggtttttgtctttagttctatgtgatgaatcagatttattgatttgcaaatgttgaaccaaccttacatcccaaggatatagcctactggatcatggtggataagccttttgatgtgttgctggattctgttttccagtattttgttgaggatcaaagacttaactgtaaaacccaaaactataaaaaccctggaagacaacctacgcaatgccattctggacataggaatgggcaaagatttcatgatgaagatgccaaaagccattacaaaaaaagcaaaaattgatcaatgcaatctaattaaactaacgagcttctgcacggcaaaagaaactatcaacagagtaaataggcaacctacagaattggagaaaatttagcaaactatttgcatctgacaaaagtctaacatccaacatctataaggaacttaaacaaatttacaaaaaaaaaaaaaaaccgttaaaaagtaggccaaagacatgaacagactcttttgaaaagaagacagacatgtggccaacaggcatgtgaaaaaaagctaaaaatcactgatcattagagaaatacaaataaaaaaaaagccacagtgagatactatctaacactagtcagaatggctgttattaaaaaataacagatgctgggctggtgaggttgtggagaaaaaggaaggcttatacactgttggtgggagttcagccattgtggaaaacagtgtgaggattcctcaaagaacttaaaacagaaataccatttgacccagcaattccattactggatatatacgcaaaggtatataagtcattctacgttaaagacacatgcgtgtgtatgttcagtacagcactattcataatagtgaagacatggaatcaacctaaatgctcatcaatgatagactggataaagaaaatgtggtacagaaacaccatggaacattatgcagccgtaaaaagaataagttgatttcttttgtgggaacatggatagagctggaggtcattatccttagccaactaacgcaggaacagaaaactaaataccacattttgtcacttataagtgggagctaaatgatgagaacacatggacacataaagggaaataacagacatggtagcctaccagagggtggaaggtgggaggagggagagggtcgggaaaaataactaatgggtactaggattaatacctgagtgacgaaataatctgtataataaacccccatggcacgagtttatctatataacaaacttgcacatgtatcccgaatttaaaagttaaaagtaaataaaaaagatatgattaccatcagaaaaaaaataaaataaaatgtaaatataatctggaaaacacaggtatggaaggttaatatggctcgaatcaaagcaccgtaattgtctgctggtttaactcatcttgatgaacatttttctccattgtaaacaccaattctgtgtttagaattggaaaccaattctgtgtttagcttaacagtaacccacaacacttggaccaactcaattctgtgtttagaattggaaaccaaaaaactccttagagcctgctggacacgttttgtatgcctcctgggtttcattgcagaattctgaatgtttgcttgcctgtgggacttatggtgaggtttgattttcatatttttccacttacctccctgcttctcttacaagttctgacaaattgggaaaactcacagaatgttttctaagctaaacaagaagcaagtaccaatttttaaattcaacttttcactttgagataattacagtttcacatacaggtataagaaataacatatagatctcttgaatcctttgcccagtttccccaatggtaacatcttgcaaaactagaatatagtatcaggaccaggatgttgtcatgaatatagtcagaatacagagcattccattcactacaaggatccttcatgttgcccttttatagccacatttactttgcttccaccccaaccttctcattaactcctggcaaccactaatctgttcttcattttacaattttgtcattccaagaatggagtcatacaatatgaaaacatttgacactggctgttttcactcaacataatttctcggagatttatctaggttgtgtttatcagtagttggttcatttttattgttcagtagtattccttagtctggatatactacagtttgtttaactgtttttacctgttgagggacatctgggttgtttccaggtttgggttattgcaaataaaattgctgtaaacatttgtgtaggcttttgtgtaaatataatttttcgtttctcagagataaatgcccacgagtgcaattactgtgtcatgtggtagttgcatgtttagttttttttggaaactgctgagcttttctatttttgattctcactaactgtgtatgagtgattcagtttctccacatcccctccagcatatggtgttgtcactactttttaattttagccattctgatgggtttgtagtgatatctcattgtggctttaatctcagttgccctgttggtgaatcatgttgagcatcttttcatgtgcttatttgccatcttatgtcctctttggttcatgtcctgtgtccatgtcctagatcactttttttttactttgaattttgagagttctttatatattctagatactatcctgtcagatatgtagtttgtaaatattttctcctactctgtatcttgtcttttcatcctcttaacagggtcgttcacagaacaaaagtgtttaattttaatgaactctaatttgtcaatttttgcttatgtgggtcatgcttttggtgtcaagtctaataactctgccgaatcctatattctgaagattttctcccataatgtgtcactaaaagtttcacattttacatttgtgtctgcttacattttgagttaacttttgtatgaaacttaggtcaagcttcttttttttttttttttttttttttttgcctgtggatgtccaattgcttcagcaacgttttttgaaaaagctatgtttcctccattgaattgtttttgtgcctttctcaaaaatcagtcagacattatttgtgtgggtttatatatgggttgtctcttctgtcttaattatctatgcgtcagtctctgccaacactgcacagtcttgattactgtggttacmtagtcagtcttcaaataagctaggctgattcctctcagtttagacttctctttcaaaagtgtttcagctattctggttcctttgcctttgcatataatttaaaaataatcttgtctatatctgcaaacattaagaaaaattgatatctttactatgtggagttttctattctgtgaacctggtatatctctccatttatttagcttttccttggtttctttcatcatctacacacatcatctcatctgtgtgtagttttcagcatacaagtcctatacataagtatttcagttttgagcaattataataagtattgtgtttttaatttcagggtctattactagtatatggaagtatagtttttttgttttgtttttttgagatgaagtttcactgttgttgcccaggctggagtgtaattgcatgatcttggctcactgcggtctccgcctcctgggttcaagcgattctccagcctcagcctcccaagtagctaggattcaggtgcctgccaccacacctggctaatttttttgtatttttagtagagacagggtttcaccatgttgtatgtttatctcataccctgtggcctcgctgaactcacttattagttctaggagttttttgtagattgcttgggattttacatagataatcatgtcatctgtaaataaggaacagttttatttattcttttatgatatacatgctttttgtctccttcctttgtcttattgcactggctagaacttccaatactatgttgaataagagaggtgagaactgacattcttatcttgttctctgtcttaggggaatgttaggtataatgttagctatagcatttttgtagatgtcctgttgtggatgccaccatacctggccctatatcattatatttgatatacatttcttctaaataacatatagtttggtcatatttttaatccactttatcaatctttgtctttataataactgatatgttagggcttaaatcggatattttatttttgttttctgtttgttctctctggttattgtttttctgttttccttttcctgcattcctgtgggttaatttaacatttttagaactacattttgatttatttatagtgtttctcgagtgtctctttgtatagctgttttggtggttgttctaggtattatatatacatgtttatctatctatctagttacctttctctctagatcttattaaagtctattggtgtcatcattttaccagtttgagtcaagtatagacattttaccttcctttaagttcctttaacttctcccatttataatataattgtcttgggcctggcgcagtagttcacacctgtaatcccacactttgggaggccatggcgggtggatcatttgaggtcaggagtttgagaccagcctggccaacatggtgaaaccctgtttctactaaaaatacaaaaattagccgggtatggtggcgtgtgcctgtaaccccagctattcgggaggctgaggcacaagaattgcttaaacccaggaggcggaggttgcagtgagctgagatcacgccactgcactccagcctgggagatagagtgagactctgtctctaaataaataaacaatataattgtcttaattattttctctaaatacatttagaacaacatcagggttataatttttgcctccaccatcaaatatactttagaaaattttagagaagaaagcaaacgaattttattagctgtatttttgcttattgtgttctttcttctttcctgattttccaaggtttcttcttttatctttttctttccatttagagaacttcctttaacatttcctttagggtctaaaagtgacaaattctgttttgcttcttctaagaatgtcttatttcttctttattcctggaagatatccccactggatataagtttcttttctttcagcactagaaaaatattgtgctgcttccttctgacatatatatatccctgctataggtaaggtgtcatttttctctggtgctttcaagatttttttatgtctattttttcagaaacttaatcatgatgtgtgttggtatggatttstaggatttatcctgcttgggattcacccagcttcttgaatcttcaggtttaggtctcttgccaaatttgggatgttttcaaccattgtttcttcaaactttttcagccttactctttctcttcttcctggaatctggtgatgtgaatggtaaatcttttgttataattccacatgttcctatgatgctgttctttttttttttttttttttgagtttgttttctctctttggtttagggtgggctgtttctattgtcctatcttccagttcactgatttttttcctctgtcccctctgttctgctgtggaacccatttactgagctttttatttgaactgttatattttttacttataaaatacccatttggtttttctttacatcttctatttctttgctgaggctttctattttttcaattgcttcagctgtgtttgtaactgctcactgaagcatttttatcatggctgctttaaaattttgtcagaaattctaacatctctgttatctgggtgtgttagtccattttatagtgctattaaggaatacctgagactgggtgatttataaagaaaagaggttttgtttggcccatggttctgcaggctgtacaagcctaatgccaatgtctatttctggggagacctcaggaagcttacaatcatagtggaaggtaaagggggagccagcacatcacgtggcaacagagggaacgagagataaggggggacatcccagactcttttaaacaatcagatctcatgtgaactcattactgaagagaaggcataaaaccatttatgagggatattyccccatgaccctcccactaggttccaccttcatgtttcaatatgcgatttggaggagacaagcatccaaactatatcacggtgtctctttattttttaaaaattaattttgaattgttccaggtttttggtattatgggtgatttataaaattgaaacctgaacagttttatactgtgagactctggacctttttaaaccttcttggctttctttgacaccattctgtcagagaaaggagtggcatcacctcattactgctaggcagagagagaagtccagrttcccctcccagcttccatcagtacctgaagaggatgatgccctcatactgccaggtgggatgaaagtccaggcatcccatttggactgcactaacaacccataagatgkgttggggggacttattactggccagtggggaggaaagcctcaggtttttacttggcactgtctgataccttcctggcaggggagctggggcacctcattacagtgcttgccagggtggaagcctacgctccccatcctgcctttgctggtgtgaggagtggtgggggccaatgttttttctgtggtgtttggctggagtaaagtggttattctctaaaagatttttggcttgctaggctgcatctttcctgatcctttggttagagagattatacttttgttggggtgctttatgtttttgttttgttttggtctgtgctcactgacatttccaggttactagattcttcagctgccgggaagaacctcagcagctgagatatatgaggcaaaaagaaaacctaggaaacacaccactaggttattcttttggacctgaagtccctaaatagtctgccttttctctacctttcagagtcttcttatgtttgttttatagataatgcccagggttattagttgtacttaacagaaggaatagagaaaaatatatcgattccatccttgttagaagcagaggatatcagacatacttattttcttagtctgtgtaggctgtctgtaagccacaatgcagagctctctgggaaaacatggattggagaatggggtctggagccaaggctgaagtagagtctcctccattccagatctaggacttgggacccacacgctctagtatgtgtacaaagcacataaagttaacaatttagatgaagtagaccaattcctcaaatcccatgaactatcaaaactcaccgaagatgaagtagataacctgaatagttctacaactattgttagaagttgaattcaaagttaaaaagctgctgaaaaaagaaatcttcaggcccagatggtattactggtaaattctactaaacagttagagaagaagtaacaccaattttacatatctattccagaaatagagaaggaggaaacacttgtcaactcattttatgaggccagaatcatcctaatccaaaaccagacaagaacaaaccatagaccaatatagatgcaaaaaccaccagcaaagtattaccgaatagaatctggcagtatgtaaaaataatcatacagcataatcaagtagggtttatcccacaaatgcaagcctgattcatgtctataactcgataattaaaaataaattattataatctgccaaactaacagcaaaaactgcatgaacattaaaaaaatcacatgatcatatcaattgatgctttggcatttgacaaaattcagcatctgtttatgatagaaactttcagcaaactgggaatacaaaggaatttactcaactttatagagagtatttttaaaaatctaacatcatacttaatgatgaaagactaaatgcttttcccccaaaactggaaatgaggcaagaatgttcaccctcactattccaatttatgatcatagaagaattcctaggcagtgcagtaaaacaagagaaaaaaagtgcatgtagttgggggaaaaaagaagtaaaactgggcctgcttgtagatgacaatgtgattgtatagaaaatcctaaggaacgtatcaaacaaaacgaaacaaccctcccagaactaataagtgagtttagcaaagtcacaggatacaaggtcagtacgtaacaattttatttttatatacaagcaatgaacaatgggggaactgaaagttttaaaataccatttacaacagttttttttaagtactactctaccaaaacacgtacaatatccacatgcactaaaaagtagaaaaaagtgatataataaatcaaaggagacctaagtaaatatgtagattagaagactaacagattaaagatgttaaccatcctcaaattgatctgcagacttaaggcagttccaatcacagtcccaaaaggacaattttgtagataaagacagactgatcctaaaatttatatggaaatacaaaaacactaaagtagccaaaacaatttgaaaaagaagaaagctcagtgaatcacactacctaatcttaagacttactctaaactacagtaatcagtgagcaaaaggcatgtagatctttggagcagaagagagagtccaggaatagattcatagaaatataggccaattaattttttacataggtgcaaaggcagttcaatggaaaaggttacatctttacagtaaatggtgttgcagcaattggacatagataggcaaaagagggacccttgatctaaaccacacacctcacacaaaattttaactctaaatggatcatagatctaaatgtaaaaggtaaagctgtaaacttttagaagaaaacatagtggaaaaatcattttctgggattaggtaaaatgttcctaaacatgcaccaaaagcaaggctcataaaagaaagaattgacagatttctcatgtggcaaatgactagcgtcctgaatatatgaaggactctctaaatcaaatagtaagaaaacaacccaattaaaaaatggacaaaagactttaacagacatatcaccaaagaggtatagagatggcaaatcagtacattgaaggggatcaacagcagtagccattacagaaatgcaaattaaaaccatgatatctctgcacacttaaaatgactaaaataaaatatgatactaagtgctgatggtttgaggagcaactggaactctcatacactgctagtaggaatgcaaaatgtacaaccactctagaaaactgtcagcttcttaataaacatttaccactgacccaacaattctactcctgctatctgctttaaaaaatgaaaacatgtccacacaaaaacccgtatacaaatacacagaaactctatgaataatctcgcgatggctcacgcctgtaatcccagcactttgggaggccgaggcaggcagatcacaaggtcaggagttcaagaccagcctggccaatatggtgaaaccctgtctctactaaaaaatacaaaaattagccaggcatggtgatgggcgcctgtagtcccagctactcagaggctgaggcaggagaatcgcttgaacccagaaggtggaggttgcagtgatctgagatggcgccactgcactccagcctgggcgacagagccagtctgtctcaaaaaataaataaataaaatttaaaaactggcaacaacygaaatgtccttcaacaggcaaatggataaaccaactgatacatacttacaatggaatactactcagcaataaaaaggaatgaacagtcaatacacagaacaatttggatgaaactcaaaggcattaaactgaatgaaagaagttggtctcaaaacaatacatgctatatgattctatttacatgacattctggaaaaggcaaaactatagtgatggagaacctatcaatggttgccagaagttaggagtgagaggagcctgtgactaaaaaggggcagcaccagggagttctgtgggagatggaactgttctgtgttcttgactgtggttattccaatctatacatgtattataattcaactgtctactaaagaaaaggtcatttttaatgaataaataacaataacaacacagcaaattgctgctgaactgtccccacactgaaattgtgctgagaattttctagtttacctgtaagcagcttcactaccatacatttagccaagtttccatgacagcaggcaattagcattcaggagggcctttgagtggtttggcggtaaggcagttgctcagttcagccatctttaccttagacattaagatatccaaaataaatgatttttctgggaaaataaaatttctttctaaaatatttcaattttaactgtaagcattccacaagtatgtggttaggctggtgtatatcaaatgaattaactcttccatttaaaaatacatagagtaaagcttgtgaacaatctctggcttagagagtgttttcaccaaactataagactgtgttacacgtggacatcagataccagcttagctcctccttcttttgctgccttttcctcccctataggaggttgtggctcactggattgctgaaagccgcattgccattgagaagatccgcttgttgactctgaaagctgctcacagcatggacactctgggcagtgctggcgctaagaaagaggtgaggctaccttctcccctcagaccaccaactgctgagccttctccagttctctcacctgttggacatttcagttttcatggcatcttgatggcactcagaatattggaagcccccatgtgattttgggttataaattataaatgcctgtcacttgctagtctcctagcaagtgctttagggaatgattttcaggagggagaatatcttcagcattcttaagatacagcaacaaggaatgggggaaatcataggctttacacagccctggaactgcacccactctgccactttcttctagccttgtgatcacgggcaaagtacttaacttttctgcctaaggcctagggttgttgtgaagagtaaccaagatgatgtacatagaatgtgcagaagccacgtacagtggctctcgcctgtaatccaagctacttgggaagtggaggtgggagaattgtttgaggccagggattcgagaccagcctgggcaacatagtgagaccctgtctcttaaaaaaaaaattagccgacatggtaacttgtacctgtagtcccagggaggctgaggcagggggattgcttgagcccaggattctgaggcagcagtagtgagctatgatcacacctgggaatagccactccactctattctgsgtgacagagtgagagcctgtctcaaataacaaaacaaaaaatgcacagcatgatactgctacatagtaaatgtttcatgaaagagacctctcatcctttgctttcttatgtttctggattatatgaaataaagacataatcatttaattctaaaagcccataaaactgctaaaagaaacctgattaatagcgcaaagacccttggactatttttatgatccctaaggtgatgagtgtgatttatcagctgcctgaaatccttttggaaacaagacaagttagaaataaatggataaaatgtgatttggaagaggtgtctctttccagagggtctgtattgactgaaatatggcattgcagcaggatctctttgttggcttttgttaaagatcctgttttagtggtgacttggatgtgggaaagtttccttgtttcatttcccagttttgccacattgtgtatagtctaagaaagaagcattcttttcatattttgcttatatagattgcaatgatcaaagtggctgccccacgggctgtcagcaaaatcgttgactgggccatccaggtgtgcggaggtgctggtgtttcccaggattaccctctggctaacatgtgagtagatgtcatttaagaatcatctacgtttgataggcgtggaggtaaaaaatctacagatgccttgacattaattgcttatgtttattttcagtgtaattgaaggctaaatgaagtgatatacattaatatagagctcaacaccaagaaatagttgctcttattattacaataatcatttcattccattatgttaatttttacactgaggggtcccactgaggattcctgggctgtagatacagcatrgggtttcgctgaatttgtagcaggacatgtcagtgactatctaatatatagatcctgatgactgggaggcagaaaggaacattctccattccccatctgtccatctccacacataattacagtgtcaccttctctatcacaatggagatagagtctcatccttcatcaattttaaaccttaagaaagaactaaatatatagtatcataccagtcactgcctgttctaagttctagcaacatgtagtaaactgtagcaaaccaagaatgagatgaactccactgtactttggcatttaactttcccaagttggaaactttaagatggcattgcagaagccctttagcttattttcctggtaccctttttcttaccctgaccttggtggaatttaagaattaatatagtcttggttgacaatcagagtgactgatgtcaaagtatcatgttcctcttccataactccctgtgttccctgattcttttgctttttcaggtatgctataacccgagttttgcgtttagcagatggacctgacgaagttcatctttcagcaatygcaacaatggagctgcgggaccaagccaaaagactgacagccaagatataaggagggtggcactgccacatcccactggcagaaactctcctttatacaaacttcattggctccaacatttgaatctcatatttttgtagcagtttgagcacagggttaattattcatttgtggtaaagattatagcatctattttgatcagtgggttttattatttcaagggtcacacagggttaagttcagtaagaaatgctgtagctgttgtcattcaatctagtgcctccttgaggccaggagttcaggaccagcctgggcaacatagcgagacccccattgctacaaaaaatttaaaaatgaaacaagtgtggtggcacatgcttgtagtcctagctacttgggaggctgaggcaggaggattgcttgagtctaggagtttgaggttacagtaagctgtgatcgtgacatggcctccagcctgggtgaccgagtgagactgtttctaaaaataaaaacaaaaaataaatttcttcttgaggtggggtggaggtggggagcaagaatttgacctggctctgatccctggtgtgttgtgtgggcctctttaacgtttgccactgagccttaacctcactgtacttcactgtacttcacacgcattggtgttaacattttaatcttagaagaccctgacccactgagggtttgttgtgagaattgctgaagccacgtagaagcmccttgaaatctgtaaaaccacaagaaagtactttataaaaggtatccttatttgaagtggataaatcttgtaactcgaaaagttgtgatttagaagacaggattgtttttgaacattaggaattaaaggctatatctggtccttacaattttgtaatttgtttctctgtctgaggaaagctggctggattggttgctgatttgttttagttaatctattgtcatgtatctggccatccctaaggcaagtcactccatatgatctatacttacctctctcccttccctgaatttagtcagataaaattatgttaaaaagaacaccaaggattgttttgaaaaggaaaaaagtctccaaaggataaagtgagaagatcagtttcaggatcagggccccagtcctggtgagagaatggaccaacggtaaactcctcagcattgtggccatttctagggttctgtctccttaggctgtcactgggagtcactaggcagccgttcatctgggacagtctgctaggtttgccatgtgcttgaaaccacatggttttaaagagagaaactgccctttctaataatcagatggcagggagggagcggggaggagagagctcaccagccagggctctacccatgaaaacccctccaagattgccaggcggtcagcgacagagcctcgaggagggggccttgagactgccggatagggaagacaccatgaggctccctagactggtcatggtctttctccagcaaaacatttagggtgcacagggggtagctatgattgtccaggggatgagctagttaagggtctctggtaactgacctttttaactataagaacacacaacagaaagttcagcggattatggaggactgatttcctcatcaacctgtggttattgataaaagcttcttcagggtgggtcctgatcaccccagctgtttccatacaactgtggttcacttaggtgtcatgggcatgcacacattttgtccaagggaaataaagtaggtgaaaagcagtttagatactttaatggatacattgggcagggcttgcccaaaactgcttttctccttgatcttgagtgaagctacaacacagtgtcggggaagttcagaaggcaggcactttttacttaggctttctaagggctttaaattcgtaacattcttaaataaaggatataaagtgcagtgtatttatgaaaatgtctgctatgaaaaatgtcttatttcagtcaagccaggcagccccgcttggctcctccctttctctgacactagatgatccctccccaaggagcagaggaaaggggaggggggaagacctcctgttgacaggctgctgtttgtctgtcacatgtcttactccaccatttattttgcctggattactccagtagtctcttaactggaattctaatctattctcacagcagccaggatgacctcaaatgctgcggtggcttccatctcacctagaataaattcagagtccttgctttggctgacgaggttccatctgatcttgtcctctgacacttctctgatctcatccccctggctcactcgctccagcatagccttctggctgctgttccaacatgcgagcacagccatgcctctgggccgtggttcagactgttttctctgcctgaaaggatctacactgaggttttccagatgtctaggtcaaaaggcacattattaaaatgtcctttcttgaccattgcttgaaactagcaccatgactgggcgtggtggctcatgcctgtaatcccacactttgggaggccgaggcaggtggatgacctgaggttaggagttcgagatcagcctggccaacatggtgaaaccccgtctctactaaaaatacaaaaattagctgggcatggtggtggatgcctgtaatcctagctgctcaggaggctgaggcaggagaaccgcttgaacccaggaggcagaggttgcagtgagccaagattgcaccactgcacttcagcatgggtgacagagcgagactccatctcaaaagaaaaaaattagcaccacgtgcattgttattctccacctgcttatctgcctttgttttcccacagcacttatcacctgacatatttcatgtttatttgtggtctgccttctcaagtgcaaggcccatttttccctcctctgttcacttctctcacttttgtgtgtgtgtactggtgtctccttggcccctagaaccatgccttacatccagtagccactcacaaagcatatgaatgaatgaatgagtgtgcatggatgctctcctgatccctggtttgcagcacagcaagcggtgagtgagcaaagcattcatgtataggtctgccaacagaacagagccaaagcctgagccccagccggtcaacacagaggctggacaacaagaaggggttatgggtagctggagaaaacctaagcctgagaaaggacatcagtgtcctggcagtgggggtgcacagcagtttgggcaagtcagttgatggaacaggtgtttaatgagtatttaacaatccagggaaatacgcatttcatttttttctcctgatgtctaatctagtctaatcagctggagggctgtgatcagctctaggtacagagggaagtcaggatgcctaaaagaaacaaaaccacttctggtgattgttggaattttccaattttccaaagaagcaggattctgggaagtgtcctccctaattcaagacagacaaagagcacttaggatttatgatcctgccgtgatatttttatttctttttcttttcagcacctctttctcattgtggtgattatgagtttattgtgaagaaaacccacgcccattctagtgtgagagtgtagttagcataagctctgtgaaacaagggtttctctctgccttaccttcacccccaaattatgtggccaagtaaagtgtaacagtttatcctggagaggtgcatcactcctaggacaccctaaataagtacaggtgaaatggagagcagttgcttggataggatctccagaaggtattttccccagtcttccttcatctgatggctaatcacctcgatgaggagccttttgtctcattttcttaagtgggtgcagacaccccctccctccagcacccttacctctctgacttcagtttctactgctctgtttccttactctctccacacaacacattggccttctgctgttcctccagtatcccagatatattcctacttcagggtctttgcacttgcctttctgtttgcctagaaaactctccccccactgcatgtcctcaaggcttgctcctttcctgcaaatgtaacctcccagggattccttctgtaaccatcccatctaaatttctataccctcccaacacacacacacaacgctctttttccctgctttggttttcttcttagaacttttcatcgtgtgacatactatgtatttttctcttttcttttgcatattatctcttcctctccccctgctagaaagtatgttttagcagagaagggttcttgtctgttttgctcgctgccgcatccctagaagctggagcaatgcccggagcatgcacaataggtcctcaataaatatttgttgaatgcgtgaatgcatgccagctgcagaagggcagggaacgcaggatgtttgattaacctccatgtgagaagtgtagtagcataggctcatgttccctcacttgccatgcagacacttaaaaagaaaacttagggccgggtgcggtggctcatgcctgtaatcccagcactatgggaggccaaagtgggtggatcacctgaggtcaggagtttgagaccagcctagccaacatggcgaaacccccgtctctactaaaaatacaaaaattagccggtgtagtggcgggcgcctgtagtcccagctactcaggagactgaggcaggagaatcacttgaacccaggaggcagaggttgcagtgagccgagattgcgtcactgcactctagcctgggtgacagagtgagactgtctcaaaaaaaacaaaaaacaaaaaacttaaagcagtggttcttaccctggctgagcatcagaatcacctgagcagcttgctatagctacagctgcctcagccccagccctggtgattatttagtaataacgaggttcacctgggattctagtgaattgatggtcagggaagagagagcctcgcttcctgacaagtcttgattatgtcagcgttcttggctgcaaacactaggaaaagactggctaatgtgagcaaaaagaaatctgttgcattagtgtgggaagggaagactacggaattctggaatatcccgccaagacacaggcagagaaggaagcaggtctttgcagctgggaccagagcagcctgacctggccgatgagagagacacccctgcattggtgatctccatctgaccttgtccaccagatctctctgcccttgccttgctttggctctgaggtgcacatggttgacaaagctcagtctgcaggcctgccctctgtgctgtgcaggaagaggagagtgcttccagtgctaccaatagaaatataaggtatgtatgtaatttaaaattttacagtgtcacattaaaaacacatgaaattaattttatttaacctaatatatccaaatattatcatttctacatgtaatcaatataggaaaaattatcagtaagctattttacactttttccccaaaatcccaatatattttatagcacatttcaacttggaagctaaagtttcagtggaaatacttgatcttccaaaagttaactgtatataagtaagcttcataaaatgtacagttaaaaaagtaggttcacatgcccaacttgttctaaacatacttcacagttttcaaaaaactaaactcagtttttaaatttaattcatttaaagttaaatgaaaaattcagggccaggtgcagtggctcacgcctataatcccggcactttgggaggccgaggtgggcggatcacctgagcctaggaatttgagaccagcctgggcaacatggccaaaccccatctctacaaaaaatacaaaaattagccgggtgtggttgtgcacgcctatagtcccagctactcaggaggctgcagtgggagcatcacctgagcccaggcggcagaggttgcagtgagctgagatagtgccactgcactctggcctgggtgacagagccagactttttctcaaaataaataatttttttaaaaaaattcaatcacattagcccgatttcagtgctcagtagtcatgtgtggctagtggctactgtattgggccactcagctgtagccccttggtcctcacagtttcagaggtcaccctctcaccaaactcacactcagtggggagaaaaagacttgggacattattagaaatagagatggatgctgagcagccccaaacaattgtccactatgataattaagggagcatagtgtgaaccccaaatacctgagacaagtctcagtcaatttagaaagttttgttttgttttgtcttttgccaaggttaaggacatgcctgtgacacagcctcgggaggtcctgacgacatgtgcccaaggtggttggggcacagtttggttttatacattttagggggacatgagatatcaatcaatatatgtaagatgtacattggttcagtccggaaaggtgggacaacttgaagcggggagggggcttccaggttataaatagataagaaacaaatggttgcgttcttttgagtttctggttagcctttccaaagtaagcaatcagatatgcacttatctcaatgagcagagggaagactttgaattctgtctgtcctttgtccacaaggaattttcctgtggacaaattgtgagggaggtacatagcttttttgtcttagtagctatctttttaaggaatagaatgggaagcaggtttgcactaagcaaaagtctcagcttgactttcccttttggcttagtgatttgggggtcccaaaatttattttccattcacaatagtgattttatatatcttgtttggtgaaggaaaaagttgactgtagtccatctcctgtatttaaggaaagaaaaaacctagca

SEQ ID NO: 93270 - DNA, 29773 bp, Homo sapiens
atgtctagtccagatctctgccccgacctcaagacataaccaactgcttactatacatatctacttggatgtctaaaaggcatcttgaaacttaacactccaaaactgagttcctcaaatttccccctcaaatctgcttttctatagtcacctacatttcagttcacaataaccctattctttcagttaccaaggcagaaatgaaataatcttcgtctcttcctttcctagcccacatttaatcagttagtaaacccttcaaaatacagtcatgcattgcttaatgacagggatgtgttctggaaaatatgttgttaagtgatttttgtcacgtgtaaacatcctagagtgcacttacacaaacctagatggtatagcctattatgcactgatatataattatgttttatgatcataaatgtctcataatggagtcacttatgacaagtgactcagcttacagtgaaatcactgaccactcagagtagtaagcatatgtgtggtggactgaggtgataagatagcatctgctgtggccaggcatccctgacacctgacaagaaagtaaagccaaaagtcagctgaagataatggccatggagatgtctgtggagagccgtaaaagccaatcatggctgagatgcctgcagaatctctgcccatgagaactctgaggcctcctttcctttggctgtggtaagccctctgggaaaagagcagctacccaccaccaggtcagtgggcattctgaggaaaaccaaacctggttttctcagtcagtgtgctggtctcccagaatacttgctgtgtttcccttctctattaatgcctatgtgtgttggatagagttacatgattgttgtgtagaagccacacaataaatcgtgaattcctaagcatttaattggcactgattcgttgtgaaacttctcagctggttggagttagcataaataggctgatttgaacccgataggacacacctgagctctgtggtacagcctgctgctcctaggctataaacctgtgcagcatgtgactgtactgaatactgcaggcaattaattgtaacaaaatgataagcatttgtgtatctaaacacatttaaacatagaaaaggtacagtaaaaacacagtattataatctaatgggaccactgccgtatatgcagcccgtcattgaccaaaacgtcattatgcagcatgtgactatatacttacactatgaccacttcttacccattctacactcccactctggtctatgccactgatatctccctgctggaacactgtaatacattggtgtccttgcttctgcccttggccccttcagtcaactctcaacacaagaagcagagattctgttttttttgttgttgttgtttgtttgtttgtttaaagattacttccctcctctgctcaagcatgttttaagtctctctccatctcaattcaaagtaaaagccaaagtctctttattgcctgacagggtccctgttgcccttgcttacactacttcaggcatttgggctgtgtttcctcaacacactgggcacacatcccttccagggcctttgcattagcagtcccctctgtctggaacactcttttcctggatatttacatggctcacattttcatcccccttcaagtctttgctgaatgccgtgtgctcgaggaaatcttcctgccccacacccaaacatttcctattctcttttcctccatgttacatatcaacttctacattgtaaagttcagaagctgattttcctgtctgtcttctacaaatacaatggaagttccagggaggcaagattattgttacatcctcagtggttgatacagtgccagatacatattaggcactcagctgcaaatcacaagttttgttgtatcaagctatataatactttcattattgattaattctaaatattttatctttccaataagatttaatttttgcaaattttaaaagtaaatcttgcagataaaaagagtatttatgaaattggtaaggcatgaggaatagtaatgccacaaacaccattttcactacccggagaaaattactgtctttgaaaccctgtatgtccttccccttgagtgactaccattctgaattttatatttatcattcccttgaagtttatctctgtatataatatactgttaatttcttcacgtttttcattctgtgttatgtacagctgtagctgaatcattttcactgttgtatgctactccattatgtgaatatactgcaatttattcatccattctgtatctatagacattgtgttgtttcctggatttttgctattacaaacagtacaatgaacatctttgtagattgtccccttatactgtagtacaagaaaagtctcaggagtatgtatctatgagtagaactgctaggtcataggtcatgtgtatcttcccaacttcatttttacaagatcatgttgagttatttttcaatagcagctatactaattcacacccctatatgagtccctgttgccccatatcctgatgcttgatattgtcagattttttttttttttgagacggagtctgcctctgactcacccagactggagtgcagtgctgtgatctcagctcactaaagcctctgcctcccaggttcaagcaattctcctgcctcagcctcccgagtagctgggatttacaggtacccaccaccacacccagctaatttcgtatttttagtagagacggggtttcaccatgttggccaggctggtctcgaactcgacctctggtgatccacctgcttcagcctcccaaagtgctgggattacaggcatgagccactgcacccagtctattgtcagattttttaaaagtcaatttggtggtgtgaaatggtttctcattgtgttgtttttttttttttaatttgcatttcccttattactacagtataataaagttgagcatcatcaagttttcgcccatttttctggtgagctattatagttatattctgaatattttaaccattatatgcactgaaaatattttcttctgtcttttcactttaagtcttttaatgaaaatttatcagtcatttcctttgtggtttctgctgttgtctttaaaatattttcttctctaaagtcaaaaatataacttacacatcttccaaacatttatagtttaacattcagttcttttatctacctggaactgtgtgagataaagagtctaatttctatttcttcatacagataacaattattccagtataacttcttgaaaagttcttcttttccccccactgactctcagtgccaacattgtcacttatcaaacttctataaatatgtgggtctttctgtgaactctctgttctattttattggtctgtctatctctgtgctaatatcataccatcttaactcaaatttcccaccttgtggttctttaaaaatgtttctgctatccttagcccttcgctcttacacataaaatttaggagcactttttcaaattagagaaaaaaattaggattttgattgtcattgctttgaatcaatagatcaactggaagaaaaaagtttgcaatattgaatattcctattcaacaacatggcatctctcaatttttaaaattctttttaaggtcctaataaaagttttatcatttctctacaaaggtattgcacatcttttacttaggtaatttatatttttgatgctcctgtaagtttttgaaaattacattttaactgttgctaaagtagagaaatgcagttgatttctgtacactgaactttgatagtcttttactgtctatgtagattattggctctttaatccatgaatcacttaatttataaacatgtatttgttagctatcttctgttaaacttttggtattaaaaaaacacatattccttttttttttttttttttttgagtctcactctgtcacctaggctggagcatggtggtgcaatcttggctcactgcaacctccctctcctggttcaagcgattctcctgcctcagcatcccaagtagctgggactacaggcacgtgccaccacgcccggctaatttttgtatctttagtagagatgggggtttcaccatgttggccaggctggtcttgaactcctgacctcaagtgatccacgtgcctcggcctcccaaagtgctgggattacaagtgtgagtcactgcacctggccaaaacacacattttcaaaatataaagattgattcttttgagtttctgagacttccttcatggcctatgtgttttcaatttttataaactttttcatgtgtcctagaaatgaatgtgtgttctctgtgggatccagagttccatatatatttattaaaccaagcttatacaacatttctggaagcaatttttataccacaactaatttacaactaatttcattttttgaacacggttatggtttaacattcagcttggttcagaattaagtatctttcagttatgtacctcttcaacactcctacaatatgaacgttactatctcctttttgccaaagcaggactagatgttcaaagggtaacttgtccaaattccacagcaattgaaatagttgaaatttgaactttgatctgtttcagtttgttacaacacaaggcttctagcctagaaatctcagctattctttattccacctttyccttcatcttccaatatctattgggacatgggacctttaaattctacaccctaaaatgttccctgatccatctcatttattattattttcattttcaccaaaatcagtagtcaaagaatataaatgctagtgataaaataccactagcacactatgttgttgcaatttttacgccctttcacctatattacggtatttcatttcattaataagactaatcaaaataggtattacaacttaggaaactagttctcagagtgtttatgtaacatatttaaactcccagacagcaagtgacagatccagttttctgaatgataggactctttctgtagccctgtattagtaacaatgttatttttagaataaagttttaagaatgtattatctattgtaaaacatcagactaaagccagattcccggtggggaacgctactctcaggatcctctcactcagttccattacctcacttcaaaaaacctgaggcccaaagtggtgctgtgacctcctaagtggaaaagctagtactcgaattcggatcctccatctggtgtcattaactcagcctcccggaatacggccaatcaaacggaattacaccagcttctcagaaaaagatctaatggctgtatcacaaaagaaggcatctatttctcagaatttgtagccttaattgccttggtgaatcctcaagggacataaatccatcctttaacaaagattcctttggatagtagaatggtgaacgttattgcgcttccattaccgccctccaattgggaagcccccagcatcgaattcggagggccggcaatagcagctcatgcctgtagggtgcgtccactgactgcaggaaaagcaatcagggtgggagaaacttaggaaaccacccagggccaaaggaaggaaaactcaatgtacaaatttttttccgctggaggcaaaggctgacatccatacctgtactgggcaatggtcagcgtagcctcacgttcggccccaaagccagacaagtgctggtttaggtaggcctccagggacttgctgtcgaacttgtgctggggcagcacttcggccaaatcggactcgccagtagcacctggcttcatgatcacccccgcaggccacagcaacgcggcatccacaggtctcgagtgccgaagtccttcaggattggggcaacgtcccctctagagcatgggccgaggccggggtggggtctggctccagccaaccgcacacagcctacgcgccgttgctgagcaacgcttgcccgctgaatcccgaggttttagctctagtcaagtgccaaaagagcccaatgtgtgttcgggtttcaattctccagtcagcgtcagagttggaggcctcaattttaaagaaggcaaagccatggtcatcgttgcgggtaaggaacaacgcagaagcctcttccacccccaaatttaatgcaacagcaggcggaagacctgcagggtcccgttcagaaaaagggccgtcagactgtcgagcctaagaataaaaagaccctgtttctcttagatacccggttagcaaggcaacatcgctggcctcctgycctggacacttatcaccccggtgctgctgcggccgggtttagccggcccagcgaggaaggaagccgaaagagccaggtttttgatgagggggagcgatgtctgcgacgcaccggaagcggctccgaggaaggcctgtgggagtctcggagacgtgtctgtctgtgaggcgctgggtgcacgtccccagggctctgggctaggaaggcagcggsgaggtgcctccccacgtacccctcgcgggcccagcmgagcaacgtggggcgaaggcggcggcgaaggcccgggctgggagcgttggcggccggagtcccagccatggcggagtctgtggagcgcctgcagcagcgggtccaggagctggagcgggaacttgcccaggagaggagtctgcaggtcccgaggagcggcgacggagggggcggccgggtccgcatcgagaagatgagctcagaggtggtggattcgaatccctacaggtaacctgcgtcgccggtcggaggcaggcgcgggggacgaggtcaggctccgtgaggtcagaagtgaggcgcttcccacgtcccgctcatggggacgcccgccacccttttcttggtctgcgaatcctgttcccaaatgggcaaggccacatcttagtactgatcggaagatattctttctcttttttaaaaacctccagtgagtcagccatatggtgctgctcctgtgcctgctgaggacgtgtgtccagtttcctatcacccttgcctcttaattagtccgcctcgctgtgtataagactgatagtaagaactttcagaagatgagatcaaatattaaacctgctaaggtaaactttgagtttcattaaaggcttatcaatgcatcttaaatggggtcggggcgggggagagcggggttagctctattctgagatattcgggtgctccttaacatctcaaaccattcgacattaccaagactgcccaggcctctcttttcttctttcctaacaaagcttatcaattcagcagatggaatatagtgcaatggttaagggtaaggactctaccgccagactgattgcaattcaaatctaactactctcttcgtaactgcctaacctttggcaagttgtgaaactttccgcttcagcttctcacctgtacaatgaagataatagtaatatctatctctgtcatagttgtggggattgaaaaaatcagtatgtataaaggtcttagagtagcgcttgtacatggcaagccttatacaagattttattgctaggtgcatttagtagcaagcagttattgagctttcactgtgtaagcactttacatgcattgtctcctcccaccaaaaccctatgagattgctactattttacccccattatataagtgagaaaattgaggcttagagagccacctcaggttcatgccttggtagtaaataataaggcctgtcttgcattagatttgtcttaatgtaaaattctcatgaaccgtctccccagtaaaaacaattaagtcgtgtagctaaaaattgtatagtgttaaagtagataaggaagattttattgttgcttttttcctttaaagagcataacagttttgatttttaaaaaaggttttagtttgtgatatataaagccgcagtagaagtcttagggtgcactgttttaactgtgttgccaaatatgaacggttaatggtccagaatttttagagattaaataagcatgaactgacatctctaatcagaataagtggaaactatttgacatttttaaaacattttaaaattttacaaatgaagactttgaaattttccctccagaatgaaaagcagaggaatatgggtcatgaatttaagttgtctttcagacattatttaatatgagatgatcccttgacattgtaattataacaaaactttcagaactcaagtctaaatatgtagtattttctatctgatttgcaccattgactttattaaaattgctatacaggagatggcagtttgatacccaaagctgttcactgatatatggaattttaataaagttcagctttaattttttgaattgttcatacagcaaatatttactgagtacatttttgtctccagtcctccttgacaatattatttactttgtattgagtacttattgtgtgcagacactgtgaatataaagtagacatggtcttttccctctagagcttaccagatgagtgtgagataaatagaaaagtaaacatgccattgcagtacaggtgataagaattatgataaagtacagtgttattattgataaagtacaggttattgaattatgataaagtacaaaaggttataggaaagggatatgtatgtgttcaacaccattttaattgcttcaagagatacaaaagaaatataaagcacctgacttttgcttcagtttgagagactacatggaggtgggatattaaaaaacacaagtaaccgtaaaattatgtgttatggaatatagttataagcatgtggaaaaattggagaggctttgagattagaaaacctggtatcaaatcctggctcagaaacccagctcagaataccacttgccagttagctgattttgggcagttgattaacccaaaccgtttccctcatctgtaaaagggggttgccatccatgcttctcagattatttaaagattgaagggagcatcaaggtaaggatagcaaattcctgtgatggatctgccatcactttctacccaacctcactaaagtgacagtaaaggaattttttaaaagaaactcccattgaaaatataaagggttcgtattaataactgatagggaggggtgggtccctgtacttgattatagtaacaatttggaaactagagaagggatgggtgaaggtaactgatttaatagattcagagaagtttaatcttaagctcgcaacccagtttattgcaagaatcccccaaaaggctcaggaataggcacaggtacttgcagaacttcaggtagggctaaaaaaaactttcagttraaaatctgttgaagaaacaaaagccccagatcccctactccactgtgggtaactgggcaaacactccttccctaccagaagaggagagtagagatttcttcattagaaagagtaaaatagaagatttccaagaataattggggcaggtctttgtacctgaaggaaggggtaaactgattgtttacatgctgaatgctgtgactgaatgtaaactaaatgcttacatactgagtgtcgagactcccagccttgcttcttcacttccaacagctgatcgtggggttggaactccaactcaggttggagtttgaaagattattctctagggaatctgatagagccaagaggaaagactgaaagacactgacattgtgggtttctcaactaaatagtctggccagatgaccctacagtgaagtccaaagtcaaacagttattgcctatattgttacctttattagtgtcccacacttaaatatgaacagaacaaaggatgaaagaaacttctaacatgaaagaaataaaaatagcaacttggatagactatgtaagataaacacatccccctaaattatcattagtatccttagatgagagaagatatggtacaaatgatacaggaacaaggtgcaaagtatttagatgatcaggaattcttgcaaatggagatggtaatagaaatgaaaatcttaatagaagtgttggaaaataaagttgaaagaaatcatccagagaatagagcagaaaactaaaatagtagataactggagaaagaagataaaggacaaatccagatggttcaacttccaaataataggagttccagatagtccaggaaaaacaaaccaaacaaggaagtaaccagattcttcaaggacatttcccagaactgaaaatgtgagttttcattttgaaagagtccactaaaaactcagcacaagggatgagaacagattcacattaaggcacactgtgaaattttacaagctaggagacactggagcaataccttaaaatgttgaaagacaattctaactttagacttctttaccaagttaaactatcgattaagagtatatgtgtagcttcccacaattatatgccctttgctttgtcatttttataaagaatataattttgataaggaacattttcagaaatgaaagttctcaaaatttacctttgccgtaccctttgcaaaactactggaagatgttcttctaaccacagcaagagagtaagtttaaaaataattgatgacagtgttttaaactgtcatgtgcatcagaattactggagggcttgttaaagcaaattgttggactccacattcaagatttctgattcagtgggtgattatagggtagggcctaagaaattgcatttctattaaattctcaggtggtcctgttgttgatccatagacactttagaactagtgagctatagcatacaggaaacagtggattaatacagaataaagaaattaagagactttgtagtataatgatgaaggaagagcctaggaagggagctgtatgtgcagtaagtctagagacaatcatgtcagattctaggagatacatctttaagaagatgaaattgatagaatacctcatgaatatgaatgtatctagaggaactttagataactagtggaaagttggcggttgaatttgtgaaaatacataggaaattaagcatcaggagaaacatacttattaacttcagggttgggagttagaggaaagggtaagttttaatatattgcatggcccagttgtgaagagttaacatctaaccaagatgactatctaacaatattgggaagttggtgggatggaagatgtctgcgtgcagtggggatgaatgctaagagcaaaatctgattcacgtaattgactaaaactgaaaagaaataacaatgttagcatgttgtttaggaatatgatggtaatggacttaaaagtgagggagaggaaaatgggggtggaggctgaatttcctaacaagcctggtggaactatttgactccttaaagtgaagatgaatgggaattaaccatagacttaaactgcagattaccagtaactagttaaagcacctcttagagtctttggcatacagtaggtgcttactaaaagtatacatcatctattgtgggcagaggcaacaagagaatggaattccagccatgaatttactctgatgatggagatctgagtgttaaaacattaaatatttacatattctaccaaagcatagaaaaatgttgaaatttaactttgacccttaacatttaagtagtagtcgcaatcttggctgcaaatcagaatacatagcttttaaaaaccaatcttgtttcatatgctacacttgggagagtttttttaaacggtgcctgggtaatttagtttcatctggtaaaaaccagcctgtaagcatcctcctctttgaaacgattagtaatgattatattttggtgtttattttctgtgatgatgtatgtctatttgtattactaatacctaaaagactgtaagctttaaaacatatttttctttgttttaagccgcttgatggcattgaaacgaatgggaattgtaagcgactatgaggtatgataaaccctttccaagtttttgtaagattaattcagtaaattaaaataacttctggtgacatatttgatgaagagctattaaccaacatatactattttatatttcacagaaaatccgtacctttgccgtagcaatagtaggtgttggtggagtaggtagtgtgactgctgaaatgctgacaagatgtggcattggtaaggtaaaaacatttctctttgcctgtcatatagggaactactcactcctggagtaaatcaggtacaagttaggattttttttctttaccagtggcttattgacttgcagtgtattaatctagattgttctttctactcgggttgagacatatccccacccaaacaaaaggtgatattagacaaagattgtctaattgtgtttagaaacgtttttgtttgaagtaatatgcaaacaatttggacttaggtgttttagatatagaaacttaggaaasaaggctgttaatttgataaagtgtgtgaaacactgaaacatctaacaaatattttattaaacatataccaggcagaatagaaaacatgtacctttcctactcttgattttgaactagagaatgctctggatggatttttaaaaattggtactcttttacttttttctaaaattcatttagattatgggttagaaagaagtaactttcttgtaccagaattcagtctaccaatcttagatttataaagccagagtctatgatgttagatacataatggttgaatgaataagctttccacaattatatatcctttaatttgttgttctggtaaaggaagcattctcccacagtttaccaatgctttctaatatgttggtctaccccaaattcttaaaagaaggtgatttcaaaattggcactcacttatcaatatagaaataacaccaccaaaatactaaaaatatttattgaaattttaatacctttcaaaagatttacaaaacctggacaaaaattgcttatagctgacttaagcaccctgactgcttgaccagggataatagagattattgagattagtggctctcaagtttgagtatgttatcacaattagttggaagccttattaragcacagattaacagatcctactctggtggttttgatttttataggtgtcaggtggacttcataattgacattgctaacaagctcccaggtgatcctgatgctgatgttgctaggattacaccagtaagaaccactggatccttgctctactccaagtctagtccctgaagtagtaacatcagtatcagctctcaatacctacctcagacatactgaatcagaatgtgtattttaacacaatccccaaatgattcatttgcatattaaagttggagaagtgctcttgcatctctaacaagcttcaggtgatgctaatgcagctagaccacgmcattttgagtagcaaagaggtagaacagtagttatatattgctgtagttagaatcacctgggaagttttaaaaaattctggtgtccagactgcaccccataataagtgtctctggggatgaggcacaaacatctgtatttttaaaaattctccaagtgattccagtgtgccctcaagtttgtaaactgagaatctacacaggtaagtttcaggaagtctttctttaatttgtaaaacagataaatacgaagtgaattaatgaggttaaataggaaagtagaagatgttaggaaacccagagtccatttcttatccctgaaagcctttggatctctttaaagtatctggggtgccttggatcaccagatctatattcgctgctttattttagagatgaagatacaggcctaaaaagtgaaagtgatttacccacaatcagagctaattagtggcagagttacagctcagaccttctgttcccaagtttaatgtttcccgcaacttatgtataaacaagctatgaggcagaaactcatttaatacttggcctgacctaataaatattgatgagcttaaagaaactatgttttggagactcttacgtaggattagaaaattttggagagtgtgagatcttttctagtattaagggctatctaggtgttatgggttaggttaattttttttctttttagttttttattgaaaagaaaatcccatttttgtttttattgtttagtgtgctgagaattgtattaaagagtcacagaatttcatatgaagaagggacaggaagtccttggctctagcctgttcttactgataagaaatgtgatctaatggccattttagtgtgtgtgtgtgtgtgtgtgtgtgtgtgtgtgtgacaaatgctttttgaaacaggcttaagtgtatagcaggaaacaacaattaactggtttgtaattctatttggaataatgttttagccatgtcactggtatatattttgtcatatacacaaaaggagtcaggttatactatattttaagttacagcacttgttttcatcttatttaaagatttcatttatccaatggattcctggcttttagcaaaaaaatggaaatgaagtaggattttgccacagatttaaaaaatggaatgaaagggaattaatcttaatttctgagtaaattatttagagaggcagcacagcattgtggttgaggtgcagatgctggattgagaatgcttgaatttgaatcccattttcacttcatattagatgagtggcctttggacaagtgttgtagttgcctcattttaaaaataaggataatagtacctacatgcctcacatgagcattcaatgaattaatatatggcacctagtgttgtagagttagctaatattattatcaaactgctaaactaattaaatgtaaagctctctaatttattttttgatatgtttagttttttggtatgtttttcatcagaataccactattttcattttagttgctactctttgattatgacaaggtggaactagccaatatgaatagacttttcttccaacctcatcaagcaggattaagtaaagttcaagcagcagaacatactctgaggtaaatggaatagcaatcaagtaccatattcagtgaaatcttactttatgtatttgatatgagttaatataaatgaatcttaatttttctctataaaatgcagttttcacttgtacaaagaattctcttacctgttggacatgggttggcaaactttttatgtataggttagataataaatattttagtctttgagggccagatattctgttggaactgttagttgcagtttgatagcagctgtaggcaaaacaaacatgaatgagcatgtctgtgctccaagaaaattctatttttggactctgaaatttgaatttcatacaatttttaatttttttaattaaaaaataaaatttttttgagacagtctcactctgtcacccagattggagtgtagtgacacaatctcggctcactgcacctccgcctcccgggctcaagctatcttcgcatctcagcctcctgagtagctaggactacaggcacgtgccaccatgcctggctaatgttttgcatttttagcagagatggggttttgccacattgcccaggctggtctcaaactcttgggactcaagccatctgcccacctagccctcccaaagtgctagcattgcaggcatgagtcactgttcctggctgataaaatttttatagtcataaatgttcttttgatttcttttcccaaccacttaaaaatgaaaaaaaattcttagtctgaaggctgcacaaaaacaggtggtgggccagatttggcccatgggccacagttcaccaatccctgctttaggaatttcctttgtggccccaaatttgttaactgagtaaggaagtgaggctgagttgtaggtagttactggacatggttaagtcttaattcccaacacttagattgattggggtgggaacagttttgtaatctttatgacaaaaatgaacctagtccttgaagtgtgagataaaagagacagaaaaggactttgggttttctttgaatagcttgaattcgcttctctaaggtatgttaaatgccctttagctctttcatctcttttcctcacagttttttcttactacagctactagtagtagtctttttaaaaacatttttttagagacaggrtctcactctgtcccccaggttggggtgcagtgggtgcgatgatagctcgctgtagccttgaactcctggactcaagtaatcctcccaccacagcctcttgaaatgctaggattacaggcttataatcattccctttttccttcttaggaacattaatcctgatgttctttttgaagtacacaactataatataaccacagtggaaaactttcaacatttcatggatagaataaggtaaaattttaatttatgaatattttgtataatgtccagctcaagtattagaaaattattagaaaaatctatggattaatccaatgaatggaagattgatatatatttttccatttttttagtacagcaatttttgtgtaatttttatgtattagaatatcatttaaaggtatatattgtccaaaaacaattaaaaataaaaagcaaacaagcaaaaaacccctgtaagttacaatataagaagagaatgtcaactttaagttctgtgttctagattatatttctgtctgaaaatggttttcttcagagactgtcagaccaccactgaaataatgagttgcattcaattagcttttattacatttgtaatgaagcatgaataaaaatgtgaaagctggtagtgaaaaaataactgttgtgaacayactttatacttccttcacccttgtagttcttgtaaaataagtaatactacaatgatactgtagtatcattgatgttatattcataagttactcaatacttgatatatatgatatctttaatattacatatttattatgtaataattatagtcaaacatttaatgaaagaataagtgttggactgaacaagtaagtataatgtattagagtgtattttgtgtcctgatgtttttcaaacttattttctttgactagtaatggtgggttagaagaaggaaaacctgttgatctagttcttagctgtgtggacaattttgaagctcgaatgacaataaatacagtgagtattcctgctgtgcaagatatattcatggatttatctgttttcctgtatattctatcagtatataatccccatcctaaaaacagttctgaatgtaaacccttttctgtgttttatttgtaatgttctcttagcctactcttaaaatctattctaatagctgtgggacctagactgtctagccttgctgctgtgacatgtgttacagtatcctactctttttgctggtaaactataaaacagcaaatacctctgatgtataattcttaaattagtatcttataatcttggtcagcattagttttagcttttgttattttataaatgtataaatatgtataaattgcctgaaaacctggtttctcaaaaaaaaattattttccttttgaatattgtttttaacttttcagatgatattttggcattttttttgttcctgmaatgattttagaaaagtgaaatttcacattaatttgacaagaaatccaataaactttgattcaatttaataatatttactgactgcgtcttgaatactgtcactctactctttaaatagagtatggtaattaccaaggaattccattatcttacaacttgcctcatttgttctgaaaattaattttaaaagaccttggtaatccattcagttaaaagaatttattgtaaattacttcttgctcttttattttttttccttatgttttcacccatttctactaaggcttgtaatgaacttggacaaacatggatggaatctggggtcagtgaaaatgcagtttcagggcatatacagcttataattcctggagaatctgcttgttttgyggtatgcattattctttttggaatattcttcactgttagatacttgagttcttaggggcattgaaaatgtattacaattcaaagaaaaagcaaacttggatggaatactatttggaacatctcatactttttctctttttttttgaaatgtgttttatttttcatgtagtgtgctccaccacttgtagttgctgcaaatattgatgaaaagactctgaaacgagaaggtgtttgtgcagccagtcttcctaccactatgggtgtggttgctgggatcttagtacaaaacgtgttaaagtaagtcagggctaatttttctgaatagtcttgtatgctttcagtaaacataaatatatttcacaaagcatttcagaaactgaaattacaagctaagtatataatttagttactttaaacttaaatgtagtwttaaatgttttatatatgtatatgtgcaaattctattttatatatgtatgtctacttttcatatatwttgctatattaaatattacatataatacatgtgtgcatattcatacgtgaatatatgtgaatgtcagttactccctgcatttggaatagcttttattaaatgatacaatggtagtggcatatttatttatgaaacattaactgaatgatttaaatctttgcaagtctgtccagtggatggagacttaaacacacttgtttctactatcttgatttaagtcttaccaaaaataaaccaatgtgactaaacagtaattattgttaatgtaattaaacattagtgttactgtaaattttacatttacataaaatgttaacatttatattagtgttaatataaaacacattaacagtacttaaaaaagattcttgaaatctgcttttagatacctctgctatccaaaaacaaatatccagcaactgtactatctaaactgtagctaaaaagaaggaaaaagatttctttgctgctgaaatttatgtcacagtttatgaatcaactcatactttattaaaagcagagcccctttaggtgttctctaattcaggctatttattttccctcattttacaactttaataagcttagttgtattccctaagcctccaatataataagaacaaactgcaacaagacacaaggaggtaccaatcaataagaagtgtcagttgcgagcaaagaaattgaaaaaagcatacatataaactctcaaagtaatggtctagggctatttcatataagagcaaatagcctgtttagacagtagtaggccctgtctaaacaaaacattttatagtatgatacaaaaaaggagaaaagaatcatggctaacaaagtattcccttaaggatgtgtcctatttagctagcccctctattgatggtcatttaggctacttaattcttttcttttttattaacaatgctataggctacatcttgtatatatctttgaatactagattgatcactcttctttttgtttttttggagacaaggtctcactgtgttgcccaagctgaagttcagtggctcagtcatggctcactgcagcctcaacctcctgagctcaagtgatcctcccacctcagccttccaagtagttggaagtacgagtgtatgccacaatgcctggctaatttttgtattttttgtagagacaaggtttcaccatgttgctcaggctgttcttgaactcctgagctcaagtaatctgcccacctcagcctcccaaagtgttgggattacaggcgtgagccactgtgcccagcctagagttttctatagtacttttttttttttttttaaacagggtttcactctgtcacccaggctggagtgcagaggcacaaaggcacaatctcggctaactgcagtcttccaggttcaagtgatcctcctacctcagcctcccaggtagctgtgactacaagcacccaccaccacgcccagctaatgtttttgtattttttgtagaaacaaagtctccttgttttccaggctggtcttgaactcctgggctcgagcagtctgcccatatcgaccttctaaagtgctaggagttacaggcatgagccactgcacacggcctatagtacacattttttaaagtagaatttctgaatttacgaaatatttactaaatttctcctgcaaaaggattatacatttgtatcatagtttaggagtacctggttcacccatacctttgataactttgagtatcatcaaactctgtaatctgtcattctggtgggtaaaaaacaggcatttaatttttctttttatttgtgaaaaaggttgaacacttacattcttctgtgaattatctgctaatagttgttgctcttttttgtcttgtatattaagaatgtgtatttgcaaatatttttgtcatttatcttttttatgtgattttctctgtatagaagcttttattatgttagtgcaaaggtaattgtggattttgccattacttttaacaaaaactgcaattacttttgcgccaacctaataaaagacatcagattggccgggtgcagtggctcacgcctgtaatcccaacaatttgggaggccaaggcaggcggattgcttgagcccaggaatttgagaccagcttgggcaacatggcaaagccccatctttacaaaaaaaaaatacaaaaattagccaagcgtggtggtgcttgcctgtagtcgcagctacttgggaggctgagatgggattgcttgagcctgggagggcgaggctacagtgagccatgatcacgccaccttactccagcctgggcaacagagtaaaaagtatcagatttgactgggaagagggcaggagggagctggaggcacatgggatgctgaaaatgttctgtatcttgatctggtgatggttacatgaaaggctcatacaaaattttattgagctatacatttaagattgtgcattttatagtaagttacatacaaaatgttaaaattaagtagctttcttaattatctcagggatttaaaaaatacacttctcccacattttagcttctctgaaatcagcatgcttcttgaagttgttgacgtgtaattgtttagctgccagcattttatctttattagaggttcaaaaaaatagtgtgttctacagttgatgaaatggagtaatcttttctttccttcattcaataaacactgaagtatctactatgagccaggcactgtaaataagataaaatttctgttttctggatgcagatttctgttttctggttaaaaaaaatatataattacctatttcaacgttatttttaaaaaatttaggtgttctagtatttttcatgttttaaatttctttatttaagtctattttgatttttctaggtttctgttaaattttggtactgttagtttttaccttggatacaatgcaatgcaggatttttttcctactatgtccatgaagccaaatcctcagtgtgatgacagaaattgcaggaagcagcaggaggaatataaggtatatgacaatctgttagaatgcatgagggatcatattgaataggacaatacataaacagatttggaatacaagataaatggttaatttattcaccatacttcaaaaatgaatgttctttcttgcttttggtaagataaaaagcctgtctgaattcttgattaatgctttagagaactgagaatgagtaagaacactttgatgctgtttgatttctacagaaaaaggtagcagcactgcctaaacaagaggttatacaagaagaggaagagataatccatgaagataatgaatggggtaggtattcttttataaattgaaatggcagyataaaacaaaaccttttatggtagcaaatctaataagattatacaaattgaataattattgcttattaaattccttaaaaactgacataggatcaaatttacaggtattgagctggtatctgaggtttcagaagaggaactgaaaaatttttcaggtccagttccagacttacctgaaggaattacagtggcatacacaattccaaaaaaggtacttcaaaaatatgwtttacccatatgtaaatatcatataaaatatttatcatcttcattctaatttgtaatgccaatgaagtatttcctgttttagatattttatgctataggcattaagatgtgagagagaggtatgcagtgttaatatgcaaatatttatagcttaaacttttaaaacatagaataaaatggttttgttcactcattaatgaaccaagtatagtagattttgattaaatgaagatctcatttttgtttatcggtagttttagctacgatgtcgtttaaaaagctagagctgtcaagaatattgaaattactgccttgtaaatcaaaagactggtgaggaatgtaaaagactctgtctttcttctaaaaattagaagatagttgttaaagaaaatttactttataaccttgttgagcatggtcaaaacttgctgattatatattcctaagcatcaagaattctatatggttcttttttcactgtatttcccttatttgtcaatagcaagaagattctgtcactgagttaacagtggaagattctggtgaaagcttggaagacctcatggccaaaatgaagaatatgtagataatggastgggatatattgtatttctcatgttaaagcctcttcccttgaaattaaaaaaaaattttaactgataaaacttagggcaacattaattaatgtatattcttacctgaattgttatactttttgaaaatcctgtgacttgcctgtttctccccgctccaacgaaatcattaactctcctaaaatgtgtttcattctagtaagaaaacctcaaaggatattgtaggatataaatcttacttgaaaacatagctgttgaaatgttttggccttttggagtgggggaaggacaaatctgatcctgtaatctttttctttccagtaatcccttgtgtctgttgcatgaggacatggacaataaagtagtatatgatcctcagatacagggagaaggacaaggcatacagcttattgattagagctggcaagcatctkctcattatgtttggaattgctttctataagaaaattgcccactactactaacttgatcaacaatgaattcaaaatagttaacctatgaaataacatcctctcaaatgtttgctgatgaagtacaagttgaaatgtagttattggaaaagtctgtaacctgtggatcatatatattcaaagtgagacaaaggcaaataaaaagcagctattttcatgaatagacaaagttgatttcaggaagtataaattatattctgcaccgaacaaggaacagaaattattgcatctgtggaacatatatctggagttactatactttactgaagagcaaggcataaatttagactaaaatccatccagattacactcattctttaggctactcctggatacttcatttaaatttgattttcgaggtagtgagatgtcggcaaggtttgtcctgtatattaggaataaaggaaaagttctaaactgcctctgcaatgacttgtagtcagtggaagagtatcactttcccctgatcatgaccactaaactgtaaattgatataaattagttttctctcgagttacacccaagtaatgaagacttaagagaaccttggttgaaataaatttccaatagtttggagactcataaataccatgcaggtgtaaccactgccaataggctgtttctatgcttatttcctattttgatttttactttgaagataggaatatctaaattatatctctagggagaaaatgttgtaaaaaattaaaagtacatccctgattgtaaaataaagttcaaaaaactgatttcagaaagtctcaactaccaaatgttttcaatatattagttttgagatgctaggattatactgtgattcttatgtttatagtaaagtctggaaagcagaaggatagtttttttagcctggaaacttatttatgttgccttggtgagtcttctatcattttttaaaaatttagcttattgaactgtaaaatagcttttctagtatgagagatgttttgaatttaaaaaatgaaatgcagtttttcaaaaataaatttcctttggaaattcttgcatatcaatttagtaaggttttataaaattttacaatttgataaagtatcacatctagaattcactgtcttcttttatctgctctcaagttggcattgcatcactgcctgtgtcttacactgcaccaaatgttacctaattgacctaactttttttgtctaatatctttcattaaaaacaattggattatttaaccagaaaaaaaatctggtaatagagatgttgctatcctagaatactctcttgacagtctgtatgccatgaaaacttgcataagaaggcagctgattacgaaaaattaatcatcattgaatttagtattactaaactcatagcatttgtccagatttgtaaacactattgattctaatgtgaaagatggaaaagcagtcccagaattggcttagcacagagactctaaatgatagtaaaacaacatattcaactttaattcctgtcttattgttaatgggaagttagttatggttctacttaaatgttgtagagaaaataagtattactagtttcttctcataaaaatactccctggatacgtacactgaacaacacaaaaaacgtaatggccacttaagaatatttatttatttatttatttttttgagacagagtctcactctgttgcccaggctggagtgcagtggcacgatctcagctcaccacatcctccgcctcccaggttcaagcgattctcctgcctcagcctcccaagtagctgggattacaggtgcccgccaccacgcatggctaatttttgtatttttagtagaggcgaggtttcaccatgttggccaggctggtcttgaactcctgacctcaggtgatccacccatcttggcctcccaaagtgctgggattataggtgtgagccaccacgcccagccaagaatatttactaaaggaagctttgacccctgcatcacatttttttcatatttccctttctgtaatctcagcactttgggaggctgaggtgggtaggtcaagaggtcaggagttcgagaccagcctgaccaacatggcaaaaccccgtctctactaaaaatacaaaaattagccgggcgtggtggtgcgtgactgtaatcccagctacttaggaggctgaggcaggagaatcgcttgaacctgggaggcagaggttgcagtgagctgagatagtgccactgcactccagtctggaaaacagagtgagactctgtctcaaaaaaaaaggtattgatgaataaaaattataactagaataagtactctaacaattcagatttataattgagttgtctgaaagctacctttttcattgtgaaagtgcatattaatgtgaagaaaatattcctatttgagaacttcaaatatgcatacacaaagatgttccagctatttttatcttcttaagtatgcattctacatgagaacgtttgggttggtagtaaaataaatagtaatatcaaaatagtttattatgtttaaatttcattcttttggaatacataattttgagtgatcatgtctccaactacagttattcaggcacaaattttggaggtacaaagaataaataatattcttaaggtagtttttccttttatcagggttcttctagagtactggtctcattattttctaaagcagtttttctaaggtgataaaccgaacacattacttgctatgtattaaatgacttgtaccactaaataatcaaattctaagctctaacagcttaattctaaaatcattgtctggtatatttgtgttttcaattactttgtgtctttcacagctgccaaacccagaaaggtatgttatggttatagtttatcttctatttttccctcttgaactactcccaaaggaggaagaaggatgctcattatatactgcctcatttctttttaaattaccactatagtgccgtagagttataccactgcttctcatacttatgtgcacattagtcaccttgggatctagctaaaatacagattcattcagtaggtttggggagaggcctgagagtctgaatttttaataagctgccaggtggtggtgacaatgatttgtggactaccctgtgaatagtaactcggccttaagagaacattaaccaaaaccttaagctgagcaaactactgagcagcaagtattgacaacatttcaaggttttgttttttgttttgttttgttttgagatggagtctcactcgggctggagtgcagtggtgtgatctcggctcactgcaacctccgcctcccgggttcgagtgattctcctgcctcagcttcccaagtagctgggactacaggtgtgtgccaccacgcccagctagttttttgtatttttcaatagagatggggtttcaccgtgttagccaggatggtcttgatctcctgaccttatgatcctcccgccttggcctctcaaagtgctaggattacaggcatgagacaccgcgcccggtccatttcaagttctaaaaaaagttcaacgtatttctttaaaaatcatgcaaaacagccctcttgtataaactagagtggggaaaaaagaacttgaaattgcacttttattttaaaacagtgaagtgtggctattacatatttcacttttacaatcaatacatgttaggatcttacaagtattaaattgatgattttattatatataaatacacaaatggtccaaaacaatatctaaaatgttgcaatatttataaaatccataaaaatatttaattttcagtatgaaaatggcatactaatttgagtttgaggtaaatgaagagacagatttaggccatctaagaaggaagataaaggagaatgtcatatctatattttgggaaaagtcaaagaatgctaaagagcttgacctgttactgcattaatgacttcagacattatgcagatacatatactatatagtaataaataatacacaatgtagacagaacagaaagcagagggactggaccaatctgctcaaggaaaaggtaaagaattttttaaagtgcagcaatcagggattcttgtgactaatgtgtttcactgaagacaatttgaatcgttcataaacattaaccctttaatccttgaaactttcctttgaggtagagaattgggccagactactgctgaaaagcaagaggaatggcaaggctaaagtagctcttgagagctcaaaagaatcatggaattctttttttttttttttttttttttgagacagagtctcaccctgttgcccagggtggaatgaactggcacaatctcagctcatagcaacctccacttgctgagttcaagcgattctcatgcctcagcctcctgagtagctaggattacaggcatgcgccaccaggtccagctaatttttttttgtatttttagtagagacagggtttcaccatgttggccaggctggtctccaactcctggcctcaagtgatcctcctgcatcaccctcccaaagtggtgggattacaggcatgagccaccatgcctggccaagattcatggaatttttgaactccttgtcttaactactctgccagctcttgttgaacaaagaccaatccgctcttcatgatttgctcctcatgtcttcttataattctaatgtgtctacatccttggataccatataataggaaaattcttttaaacaactaaaacagacataatcacaattccaacttaatgtaatccaatacaacttcatacaaatagcagttaaatcacacgtagtaaaatttcgtacaacatttttttaaagtttcaaattcaaatgttccaaatgtttaattattttgtcttaaggtacatttgcaaagaattctaactgctgctattacctttgtccttgctgaaggaaaacattaggagaatgagctgtttttaagctaaacgtgtctccacttgatgaatggcrtgaaggagcttttccacccaagagtgatgtttctgcttcttttatttccattgcccttttgtataattcagcagctttttcaaaatctcctccttcatagctttgagagagaaaacaaaaactcttaaaatgagaatataacctcttaccaattcaaaatgaccttatgggatacagaaaaagaagctgtaaatatttgcccatttcccctctttttccagtgtattcactcaagcagaccagtaaaacaacacccaaactcttctcctttctaccagtatcagtatttttgtgtctcatatggatatcattaaaaccatgttgtaatagaggcagtgaaattgctaagcaaagttaggtattctctgcatcctgagaaaaatacaaatgagcaagcaaaagtcaacatatacttaatggcaacttcactctggggacagcaaattacccatattactcccagagccagatgtagtataaaccatccttcactgtttgccatgatgcatacatatgctcctctgcaaaatagatcatgcaggcttcatttcatttctggatactacttcagtacttcttgaagtcagtcagcaaaaaacaacccctccccactctaagaaaaaacattcagtaatacatattttgtgctattctaagacaaagctacttcgaataaaagaggctgtataaggaaagtgaaaaaaattcttacctaagcacagctaaatttttcagtgtttctccaactcgaggatgcatccgaccyaggctatcttcataaatctttaatgctctttcatataatggcaaagcttcaacgtgttttttcttattaaaaaaaatgataatgctcatgcacactgggtttctgaaattaatgtattctagactaagctaacctactttgattagtactttaaaatgttaatatcctcctaaaagatgggaataaacagattaacttatgaataatcatagsagaagcagtataatagaaagtcagatacttaagatttagacctggcttggtaaccatttgaccataatccaatactgtaagcacaaacctgttcctttattgcccaatggctcccccacctgattctcacccatcataatcaaatgccacaggcttaaatacttaaataaatattatatggagggatgtagggtatctccagaattttagaaactaagcctatgctctgaactaacagtgttttacactaagaggaagggaccttcatacaagtctaacttcaatagtttctcaagtactaaaggaagtattagaaatatccttaaattgtctttcattctatttagtgttccctatctaattcatgtttacctatgttttataccataaaatcattcactgatacaacgttaaaatatgggaacttaccatttggctataaagaacagctaagttcaccaaggcagtagctacactagggtgctttgggccaaaagatttctgtcgaatttcaacagccaattcatacaaaggtacagctttgtcaagtttcccctaaaaaacaagagttaaatctaacaaaaatataaggcaataaatactatcttatcagagctttttccataagtaaaatttcatattaaagggtaattttgagggaaaaaaatctcagaagcatttcctatcagcttaatgattaagtttatagataactgaaaatttaaagctacactgtatagaaaa

SEQ ID NO: 93271 - DNA, 56453 bp, Homo sapiens
gttgctaggctgcccgctgttgctatggaagcggctgtgctgctgtgtttgcatttcactagcttcctgtgcagagcctgggggccggtctgtctggtacctagagctcggggccattttgtgggcctgcacaggttgtgcactgcacaaatccagagccactattcatagagctacaatccgcacaattctacatggaagctttgtaggcgtccatgccttagatacaaaggaggctgggaagcacatatttttccatttctatggtgggaagaaaatgtgtttcctaaggatggagatatcccaaacagcgtatatcagttagcttttgttgtgtaacaaaccaccccaaaactttgtgatttttttttttttttttttttttttttggaaatggagtctcgctcgtttagcaggctggaatgcagtggcgtgatctcggctcactgcagcctcccggttcaagggattctcttgcctcagactcccaagtagctgggactataggcgtgtgccacatgcccggctaattttttgtgttttagtagagatggggtttcaccgtgttgcgcagtctggtcttgaactcctgagttcaggcaatcagcctggctcagcatcccaaaacgctaggattacaggcgtgagccaccacgcctggccaaaacttagtgattttaaataataaccatccatttaaccattaatcttaactctgtagtcagcaatttggactgagctaagctgggcagttgttatggtcttggctgggctcactctggtgtctctgggtagctggtggggtggctggtctccagtgcatcagctgggaggcctgtctgcagcctgcagattctcacttcaagtaactggcctgaacatgtctgcagggtggcagcagcattttggcgctgcttcaaaaagagtgggtgcacacggggccccccgaagcctccactcagagctggagcatcactctgtctccttctgtgccccaagttggtcatgaggtgagcccaggggtcaggaaatagactctgcccatgatgggagaagctgtggagttccattgcacaggggtgtgagggactgtggccacgtttgcagtttgccacttgtgtgaaggaagttcagatgtggccagaatcaggacagacatccattgtggcagggtttggagaggagagggaaggccactccaggtgaccggcaaggactgggcatgtgttgaactgaaggcctggtggcccaagtggacctgcgtcctgccagctacgatccagcccttgccgctttccctgaaggtgtgtcaggcactgtgagctggggtaggtccttctgctaaaaaattccatcacagtttgttgggggattgtggcagcagtgggtgtcgagaagacagtttctggcattgctcttgggctcaggtaccacgagggtgctgccagaccacaccgagatgctctgctcatccttgatgacctcaagctcacctcgtttccctcatcccgtgggccatgatggtgcgtggcagagctgagggaagactctggtgagggccaagcctattccaacatgtcctgtgtatctttcccgctcctgctacccctgtgctgcagccctcagtcttattctaagcctttctcatccctcatcccccatcaggcttccctgctggggtttatcatctatggctgtgtaacgaattatcccacgattaatagatcttagcttgcatggttcctgtgacccaggagcttgggagcagctttgctgggtggttctgtctcaaggagtctcaagagattgcactcaagatatctgctggtgccacggtctcatctgaaggcttgactgggccagaggatcagctgccaaggtggtttgctcacatgcctgcgagttattgctggctgttggcaggaggacttggatcctgccatgtgggcctctctagagggctgctgcatgaccctatgacaaggcagctggcttccctccatgtgagtgatccaagagcccttgatgggagaacctgcaaagtcacattgtaaagaggtgtgagcgtgaggagaggcggtggactgcgactgtggctgcatcccccacacgggaggaaaagcaacggctgcagtggctttgatggcgcagcctcggaaccacgctctgccatttctgtaaggccctgctggttgcactgggtggtcctgctcagcatggaagggatttaccaacgtgtgagtgccaggaggtgaggattgctggggccgtctaggaggctgcccaagcttgctccttagggttgtgctttttctagatgaaagctagttcatctgacccacacattcaggttatcatctgatggaagctgaagagctcaagacacactccctgagcacttgtcacgagccagacactgccagaagctctgggatgacacagtcagtgcgtgtgactctcagtgaaccctcaggtgtgcaggaaacgtgactgtcttttctgcgtgtttcccttcagctgagtggaagaaacgtattctcagtcagttctggacttcatgccccatttccctggggtcgtgtcacagacagggcatttgcaactctgcctggaaggcgcagaaagaggaccgcatgactgttttcaggcgaaggttgccatggataaagaagcgctttgcattggctgtgtaatgcggcacagcaagttagcacgaattagaggcttaaagcagcatccgtgacctccctgtgtctgtggtcagtgcctgagccgctccctggaccctctctcagcctgcagtcgaggtgtccgtgggctactctcctccctctgcggacaggaactgcttcctcgtgcactccycaggtcactggtggggtcagctccgtgctggctgctggcctctctgcagggcaggttgcaccatgacagctgctccttcagggcaataaaggagaaaaggcaggggmaggggtcaagacgtaagtcacaggcttccggaacttcacctggaaagtgacacccatcacctttgctgtgtcctgttcaccagaagtgagccactgggctccacccacattcggggagaagaatggggcgtggatgcaggtggagggggcccagcaccttgaagttgccctacccaggctggcacatgtgtcccaggagtgttgtatgagggtgggcaacatggaaaacatgcacagtttatgtgactgtcaaaggaatgactagtttgtttgtttgttttttgagatagggtctcactctattgcccaggctggagagcagtggtgcgatcacagctcattgtagccttgaactgctgggctcaagcgatcctcccacctcagcctcccaagtagctgggaatacaggtgtgtgtcatcatgcttgtctaattaaaaaacttttgtttttcagagatggggtctcactgtgttgcccaggttggtctcaaacccctgggctcaagggatcctcccgtctcagcctcccgaagtgctgggattataagcatggaccactgtgcccagccttagaatgacaagttttaagtatttgcctaattaaagggacagcattaaggaaaccactggcctcttgcagctggagccataagacaagcctcgagcattgcccctgagctctgcccctgtgcttctgctggagcccctaagcgctgccctgtgcttctgctggagcgctgcaaagcctgttgcccgctccggtgggggatgtgggtagcctgctgtcagcagagccagcgagctcccagtggaatggggcggggggaggaagaggtgggaggttgttgtgcctgaagagtggacatttcctcaacatcaggtccccacctagtgagcgggacacccacttcagccaggggctgcgcaggggtcgggaggagcccgtccaggcagccagcacctccatcatcgcaggctgatctccttgcctcctgggagcccagggaggccggggatggcggcattattctgagggtgctccagccctttccatgagaatcctcatgtcttggcaggaccaaggcaggagggttgaagcccctacggagctccgagaacagcctcacgtctggctcaggccactgctctgggaccacctctctgccagctcttgttctcctcccgccccacagatgggtccacaggacgtctgctgtgccacgatggaaagttctgtagctgtgcagcccagcctgtcgcctctgccgcatgtggctgttgggcactagaaacttacctcataagacagagcatccaaacttttaacttcactaaattaagttgattttagcgttagagaagtattgaatttagcatagctagtggctgccacgtcggatggggcagctagctggcagagccctgtgctcaacctctggccatggcccagcagccccagcatcgccctggagcttggagaaatctcaagcctcaggccgtatctcaaatctgcagcgtcagaatctgcactttaaccagctcgtaggtgatttggaagcacattagattgtaggagccagctcggtgtggagggcagaggtcagggtgtggagggcaggggtcagggtgtggagggcagaggtcagggtgtggagggcaggggtcagggtgccttcttccatggctttatcggtgccacagcctaggcttagcgaaaccacgaggataaaaataggcccttctgttctccgcaccgtgagctttgtgactgatccgaggcggcgagcgggggcactgcactgctgtggcggggaagtcacggctgacaagaactgccagggacgaagccacgtgcattaattcattaaaatacagtcagctatggaaggcagcataggatgtggtttcgttcttaaagaatttcatctggatgggcagacagatgtgtaaacatggactcaaaggccgggcgagctgagatcagacaacaggcgctggacgcatcctaactacggctgggtggcggggctgagagacgggctggggttgggggtggggttctcagttggaggtggccttgagccggcctttcaaatggctttgctttcctctgggaaagctggagttcaggaggagaaggccggtcaggccctggggaaagaaaacccaggaaggaaaaaggagcgtgtgggtgatggatctccctgggacgcaggttgtctttctggagccccaagggcccctgtgcgcgccatctgctgtgctgggttctggttccagctcagtccctccctgcgcaggtgacctcgggtggctttcctgccttcaaggccccagctgattcatctgcagagtggatagcttgccccgcagggtggctgtggtgaagcaaggcaacgtctgttactgcatgtcgaagccgggctcagctgtttctttctgcatggaaagttcttctgcagacagtggggcctttgaaggcaggcggcacgtgttgttttgtatgccacgggcctagcatccacttggcaaggtgccctttcttaagcatctgtgggcttctttaaattccatgaaaattttgtgtgtatttactttttctggggctgaggggctctagccaaaccctcccaagggcccctgtcttctctagtaggtcaggacccactgctgggtgtgctcagtgttttctgagttaatgatgattagtgaataggtgacgtctagagataaaactttaagtcaggttactggccggaccaggaaggtgggggtttcaggcccaggccagtggccggaggcagctttgttagggacagggaagggccctgggaccagcagggaccatgtctggcttcgggccttgtgcgagggtcttgcagaggcctgcttggcttctccggggaggggctgctccccctgttacttccacctctctgcaacccttgtgacatcatacaggcacagccaatctctgcaaagttctgtctctacctcaggcccctatacattctctctgagctggcactcaagcaccgtgggaccttggctggcttctggggagcaagagatccatttatgaatacttgatttctgactgctgggtgagctggagtgtggtttataaataccttgctatctttaaggtgggctttgccaaaagaatagggtgacagagatgaatttcagtcatgcaacgaaccctcgacacttggaaggtgacagagggtagatggtgacagacaccactttgtgccgttgaactgtgttggtatcgggcgtggcccaaacacctggaggggccccacaggtgggtcaggcttctgggctctggtcactgctctgtttggtttcaaatcatgtgactttggccttcttaaaaaaaaatctaaagaggctgggcatggtggctcatgcctgtaatccctgtactttgggaggccgaggtgggtggattgcttgagttgaggagtttgagaccagcctgaacaacatggcaagaccccatttctaccaaaaatcaaaaaaatagccaggcatggtggtgcgtgcctgtggtcccagctacttgggaggctgacatgggagaattgcttgagcccgggatgggattggggtggaggttgcaatgagccaagatcatgccactgtactccagcctggatgacagagtgagaccctgtctcaaaaaaaaaaaaaaaaaaacctaaacaactaaggccatggtgaagtaaacctatattcaaaacaagagtcacaaagtagaactaaatgtaaatatataccaagagttgccggtagtcaggagtctcgtgcagttgaccttgggctgctcagagtccctgctcaaggtcactctaattttgtcccaaatttgaacaaaccacttttattatttcaccataaatctcatacttttggccaaaggcttcttcggaacttattgacagcgatgacaaagcccctgaaggttttcttctttacgagggagtaactcttccatcagcacagccttccctgcttgtcagagggaggtctctctttcttgtgcttcctagacttgcctggtcatgccttttcttattttaaggctaatctcaaaagaaaaaatagtgtgagcaccacttgactgcctgaaatttcatgactctattttagagagtcattgcctcatcgccttgccgtaacccatgacaatgctcctcatttgcggtgattaagttgaaatttgcaggtaaarctttagcatgttcctcaaacatcagagctgaccctgggtctggtctcagccacagcagaaaatgtatttaagagctcccttgagcaggcagtgggaggggttgcagcaatgagcttagaagcagctgccacaggctgtctgagcactgtgagctgctgagctggtggcctcagccgaggtcgcgtggctccttcctttcttgcctagaccttggctattttatcaacagaaacggcagggaccagtgagcagagagctcagcaagctcatggcgcaagagtcgtggagctgtgacctccaccagggctgagaacggccccttataccgccagctcttggctgcctggaatctctcgggaacctccacggggccytgcacagcacaggccactgtggatacttytgggatttgtggctgaggagagaaacttaggaaagacaaatgtcacggccctttcacagcagacactggttgggcctgtgctgtggcctggaggcccagctttaaacggtctctcctttctcacatttttttatcttaggggtggggagacttttcacataacagcctttgaggttgtggggtgctatggtttggatgtttgtccccccaaacctcatggtgcaatcagatcccccgtgttggaggtggggcccagcgggaggagtctgggttatgggggcggatccctcatgaatggcttggtgccgttctggaggtggtgagacggttcttcctctgttagtctggtgagagctgcttgttaggaggagcctggcgtccctcccacgcttcctcttctgccctgtggtggctgcacgccggctcccttcacttcctaccaggagtggaagcagcctgaggccctcgctggaagcatatgctagcgccgtgctttctgtaccgcctgcagaaccatgagccaagtaaacccctttttttaatgaattgtccagcctcaggcattccttcacagcgacacaaataggctaagacactgggagaacacagagaataaattttgcgatatttggggagatgatgctgcctttactgttattataaataaagtttcggtgccgccaaagaaacagcccttgaatatcaattttttttttcttctcggcaagaccatttactgctatagaagggtgtgccctcacagatggagcaatggcgcacacctggacaagggaggggacggggttcttattcctgacgcacgtggcccctgctgctgtatcattcccctattggctagggttagaccgcacaggctaaactaattctgattggctgatttaaagagagtgatggggtgagtggtttggtgggaaaaatggttatggcagagcaggaaawcggaatgagtcagggtggggcaggaaatcggaatgagtcagggtggagcaggtgatcggaatgagtcagggtggagcaggtgatcggaatgagtcagggtggagcaggtgatcaaaaaaggttgctttatgaggaagttaagttaaaagtagaaggcaaataattgaacatactgacatactgattctttgaagagaaatttaggacttatatctaacactgtttttttcataataaagtgagaggggctgtggtttcaaacagcataggcctggggtcggactcatctgcattcacaacccgtccccctccctgttcattagctgaatgacattgggtgagagcctccgtcccgtctctgagttccttagcaatgggtataataatgtgtgactccaaggcttggagtacgggagatacgggaacagatatggagctatagagttcatgcttagagacatcagttcccttccttctgctcctggctcatggtacacacatgttttgaaaaccatgccaggcatctgacctcaatgcacgcaagcatttagctgctgggtcattggcagaaaagcctcaagcaggggttcagggaaggctttaattaagcttggcctgtgggggctgctgcctgggctggatctgctgtgaaacaagaggagcttgatgttctaggagaaatgcttggggcccaggaccatctgctggagggaaaagaatgagtrttcccagagaaacagaccagygctggggctgttccctggaattcaggttaagtgtcctgggcttgtgaactgggcacaaaagatgctgcaagtctttgctttgggaagctgtcaagggtcattgcccctctcagcctaaacctcttagcacctctccgacsatgcttttcactttggtggtgactgataactcttcttggttgttgagaagtttggatgaaaagctctaggtgtgtattatagtttcatgttgctgttattacaggyccttagtgtcttacagaatgcagatttctgatctcatggtctgtttggcagacctccaggtaggctcattggatccctctgctctgggtttcatgaggctgaaatcaaaatccaggtgggctgggttccccctcagaggctctgggagcatcctcttctgccttgttggggttgtgggcagaatccagctccttcagctggtgggactgagcaggggctgccctgacctcccaaggcctctctcaagtctctgcccatgagccctgaacttcagagctcagccatgatgtggcttctttcttttgaagcctgattcaaagtcacacttggattctttctgacttccttttctgctccacagttctgtttgcagccagagaaagtcgcctgcttttaaggccttgtgtgatgatgctgggcccacccagatcgtccagaattacccaggcccgtcttagggtctgtggcttcgttatgtctgcaaattctgctttgcatatatggtgagaaatacataggtctcaggattagrgagcatgcattctggagcacaccctgctcacccagggtggaagtgtgtactccaaggccccgcaggcagttctttgtaattagcacatcctgctcaccacagggcggaagtgtttacgccaaggccctgcaggcaggtcatttgtaattagcacattcctagtcatgagtggatgctttaggaattagtggctgatgagatatacggactaatttcaaggcgccacctgcagcagaacctatgttacagcatgaagaacccctgatattctttttttatatataatttttattttacaaatgtattrggtatatgtgaaagtgtgttatgtgtatatgatggatggtgatcagcccagggcatttagggtgtccattacctgagtacaatccattcttctagcctgcagtcaccctactctcgaaagagaatagttcttgacacataaaactggtatgaaatccaaatttcagtgtccataaataaagttttgctggaacacaggtgccttcattcacttatgtaacgtctgaagctgctttgtgttgcagtggcraggggatatagacctgcaaagtgtttattactggggggcctggcaatgctgygacccccagtgtgatggaagagcactagcttcggagtcagaggaagacatgagttcactttccatggggagtatggaaacatagtgcctgcactgtaaggtggttttagcggcagaaataccattgtacccagcaatcccattactgggtatatacccaaagaaatgtaaatcattctgttacaaagacacatgcatgcacctgttcactgcagtactatccatgatagcaaagacatagaaccaacctaaatgctcatcaatgatagactggataaagaaaacatggtgygtatataccatggaatactatgcagccataaaagatgagatcatgtcctttgtaggaacatgaatggagctggaagccatcatcctcagcaaactaacatgggaacagaaaaccaaacactgcatgttctcgcttataagtgggagctgaacagggagaacacatagacatgttggggggaacatcacacactggggcctgtcggaagtcgggaggagggagagcatcagtgatgaagaatagctaatgggtgctgggcttaatacctaggtgatgggttgatctgtgcagcaaaccaccatggcacacgtttacctacggaacaaacctgcacatcctgcacatgtacccctgaacttaaaagttggaaaaaaaaaaagactctatgtcagaaacagtatctgcctggtgcacagtaggtcttcaatggtaagtagccaaatagatggttttgcagtgtcattgagggtttcctatgttgatgaatggttactgaaaatttctaagatcactactaaaaattgatattacctctaaggtcattaataagaaaggatattgaaataatggatccttttctataacatgcacaaacatgctttgtaaaaccacacacctgtgctgtctggcagaactttctgtaatgatggaaaatctcttctgttctgttcagtatagtagccatcagccacatgtaacttcctagcatgtaaaatgtggctcatatgactgaagaactggattttgaatgtcattagatttaaatttaaataccatgtatagcaagtggttcccacgtcagtgcaaccatggaacacttagacacccactgccagcaccaaaccatgtgagcctcgtacccagcaccttgtggtgggacatctctcttagttaaaggtctgtcttttttgcctaaagacaaagtagtagaaaaggatatgagtggctgcagagcaaacggtggctgaattttatacccctgccaccactttgccacccctgctgcttctatgaaatggaagcagtttattcaaccagaggccaatgtgcctttgaaacttatctctatggtggctcctctgtaggattttacaagggtctgtttgttttgcgtttatctcaaggtaacacattttaaacacatttgagtagcagggtcttaactrcaaatggagcttggccaagagaataataaaaacagtttaaggaaatatttcttggaagctgctgaaaaggtatctttacaactcctgttctctagagaagcttgcaggcatgggggtcagtgagtggacatcgatttgtgggaaggctaaggacaaaggctatggagaatttttcaccccaagttaaattcatttctgccaattaaggcagatgtttcgggccaggtgttgtgactcatgcctgtaatcccagcattttgggaggctcaggtgggagaatcacttgaaaataggagttcaagacctgcccrggcaacatagtgagaccctgtctctacaaaaaaagtaaaaatatggtttggtgtggtggtgcgcacctgtaatcccagctactcagaggctgaggtgggaagatcacttgagcycaagagtttgaggctgcagtgagctatgatcgtgccactgcattccaacctgggcaacaaagaaagactctgtctccaaaaaaaaaaacaaaaccaaaacccccccccaaaccagatgtttccaaatgctcgatttcatttggaaacacaaacttagtcttgaaaactgttatgattttttgaggtaccacaaatggcacctcaaatatatataaatatattcaaaaatatttgtaatgagcttaaggaaagtgggttcacctagtttgaataacaggtttgatgagtcagcctgcctgttgacctcgggtggtgcctgtcgcagcgagacggatcctggaaagggcctgtctgcttggcggcatcagctgtagatggcatcgctacactgactaatgttttctgaagacgagcttttatttatttcccaaagagaaacatttccagagggagcattcttttcccttttttttttgtttttgaagtactgagttgaagtgtttttttttaaattttattttaagttctgggatacatgtgcggatgtgcatgtttgctacgtaggtaaacgtgtgccatggtggtttgcggcacagatcaacccatcacctaggtgttaatccccacatgcattagctatttgtcctgatgctcctcctccccccacccccgacaggccggagtatgtgatgttccccttcctgcgtccgtgtgttctcatcgttcagctcccacttatgagtgagaacatgtggtgtttggttttctcttcctgcgttagttggctgaggataatggcttccagatctacccaggttcctgcaaaggacatgatctcattcctttttatggctgcatagtattccatggtctatatgtaccacattttctttatccagtctatcattgatgggcatttgggttgattccgtgtctttgctattgtgaatagtgctgcaatgaacatatgcgtgcatgtatctttatagtagaactatttatattcctttgggtatatacccagtaatgggattgctgggtcaaattgaagtgttttactaagttgaatgtgagcttcagtggggtggggctacacagagtgaagtgtggaggctgctggtaccttgagaaagggtataaatgcttttctctttcttttgatctctttctctgttgaatttacagcctctggtatatgcatgtaagatggaatgctctgtgtaggttatcggaggcacaccaaaggaaaagatgaaagactgtatgcacaaaaggccagcctgcacctcccgtgccctctgcttcccagggaagccgatcaatacagatggagtgggtcatgccccacgttaccaggacccctggcttctcccaccacaggggggtggctgggagggaacattacattawtkacttaggcaaaatgcctgagcgctctgtaccggggcatagtgagcttgctggagctgatggggaaaaagttaagctgtttccagagaaccgctggtgtatccagtgttttgtagtgacttagcgtatcacacagtcggcaagcctctgctgtgtgcccgtgactggcccagcactgcgtgattttgcgtggagcagaggacaatgatgaaggggtgtgtgcagggggagcccgtggacttggtgagacccacaggccacagccaggctgcttagtctgtaacccgcccacgctgcagcctcagcatctacacccttcgacccacagcctccctgtgtggagtgtgcatgtaatcaggagaggcagataataaatatatatgcccagccaggcttgtgctgtggcacagcaaacagggcagcgcgcagtcagcatcacccagccttgatgagcmcgccgcgatgctgctacgagctctgtgaagacgcgattttaattccagccagtcggtaggttgtgtgtctgtgtggcggtttagcaccgtttcaaattctgcattgcatggtgggggcgacggtggtgggtgagctctgcgtcgtaatcttttcggagctcttccagcacagtccagtcaaatcctctttgacgacaggcctgttccacacctgtgctgctcagcagggaggccgcaggtgcctagggagcacacaaaatgtggtcagaacaaaggaggaactggattttgagttttatataatttcaagtaactgaaaagtttaaatgtgttaaatacctaggtgtggccactggcttccagattggacaatatgggtcccagcaaaggcaccatcagctcctgtrgttccctggatcattggcctccctgcctgcacccatggtctcccctgcctggttgtctgtccttccctataccacccagcctggcatccacccctaaagggaggttcctgagcccgcagagctcactgagcgtgtgtcttcagtcccccgctgcacctcgagggggcctctgtcacggcattccctgggatggtcaccacctcgtctgtcccctccactgcaccacgagccgctgaagagcaagtgcatgctcagccccgggcatggcgtctgtgcatctgggagctctgcacacggkkctgaatgaatgagcacagaaccaggtggagtttgtttaaccaacactyccgtgacactcatcgagctccagcgctcttccaggggctttccgctatcagtcacrtttggatacatcgcggttggccatatggttcactttgcagctgcgggctgtgacaacttacttgatctgtcaaagacgcgttccttttcacttgtagcatgtgaatgataccaaaatcacaggttgttctgacgatcgaaatgagataaactgtatgaacagcgcacgacattcctgtgaactcacagtaaatgttagggggttcactaaggacacactggtgaatggaacaaaacttactgccagtgtggagtgcgcatctaatccggaaaggcagataataaataaatacatttttttgagactgagtttcacttttgttgcccaggctggagtgcaatggcacaatctcggctcaccgcaacctccgccttccgggttcaagtgattctcctgcctcagcctcccgagtagctgggattacaggcatgcgccaccatgcctggctaatctttgtatattcagtagagatggggtttctctatattggttaggctggtcttgaactcccgacctcaggtgatctgcccgcctcggcctcccaaagtgctgggattacaggtgtgagccaccgcatcaggacgataataaatattacagagaagcagtgacatgtatgctcatattatttgggaacaaagatgggcccggataaggggtgttgggatgcctgggggccgtgggggctgacctgtaaataggagatcagggcagtgttgctgaggaggtgattgtcaggcaaaagcttggagggaggcaargagcaaacacacagctgtgtggggaagagcattcctggcaaagggaaccacctttgccaagttgcagaggcaggacagaagggaaagggccctaagtgagggaggtgcttgtggccaaggtgaggagagcagctttcattctgagtgaacagggaatgacttttgtttctgaaagcttgctctggggctgggctaaggayggcttgtagacaggcagggacacatgtgttggggatatttcattacccaggagggagayggtgctggtgtctctcctctccctctctgcctctgtgagtgtgtaatatgcataatgtgtatgactttttttttttttttttttttttttttgagatggagtcttgctctgtcacccagactggagtgcagtggtgcaatctcggctcaccgcaaactccgcctcctgggttcaagtgattctcctgcctcagygtcccaagtagctgggattacagacacctgccaccacgcctggctgatttttttatttttagtagagacggggtttctctatattagccagggtggtctcraactcctgacctcaggtgatctgcccacctcagcctcccaaagtgttgggattacaggagtgagccaccrcgcctggccatgtgtatgactttgattgtgaaaagtttcaaacataccccaggtgggtaaaaatatcagatggtccctgaatattcccactgtccagcagtaacaatggtcaccagcacacgcccatctcgcttcacctttgccctcatacacttccttccttctcagacagtttagaagataattccggccaggcacagtggctcacacatgtaatcccagcactttgggaggccaaggagggtggatcacctaaggtcaggagtttgagaccagcttggccaacatggtgaaacctcatctctactaaaaatacagtaattmcggccaggtgtggtggctcacgcctgtaatcccagcactttgggaggccgaggtgggtggatcacgaagtcaggagatggagaccatcctggccagcatggtaaaaccccgtctctactaaaaatacaaaaaaattagccaggcgtggtggcaggttcttgtaatctcagctactcgggagtctgaggcaggagaattgcttgaacccaggaggcggyggttgcagtgagctgagatcatgccgctgcactccagcctgggtaacagagcaagactccgtctcaaaaaaaaccctcccaaaacaaaaattagccgggcgtggtggcaggcacctgtaatcccagctacttgggaggctgaggcaggagaatcgcttgaacctgggaggtggaggttgcagtgagccgagattgcgccgctgcactccagcctgggtgacagagggagactccatctcaaaaataaataaataaataaagataattccatgttctgggtccagtgggcaggtggacaggatgctgcacagactgggtgcgaggaaggggtctgaaggtgccaccaaggcttttgctggagcgaccaggaggatggggctgctcctcccggaggtgggaggctgcgatggggcaggctgaggaagagccagagctgaggcttggacctgtcggctttgagatttgattcaacgtccaaggggagatgttttgagttgkcagatggaaattcatgtygggaaggtgctatgcatttggggataattggagtgtggatgatcttaggagcmatgactctggttgacatcaccaggggatgagggcgcaggaggaggagactccagtgagcccagaggcttcagcacaaaagaaccagcgaatcaggatgtcgggagcgccttccagcccgcaggtgtgaccaaatcaccctggaggggctgttcccattcgtgctcctgaccacagactatggaagtgcctgtttgctttaagaaagtgtccgtttcatagacaaaatggtattttagaattaattatattcctgtaatttcaaggaagagctgacttctcatatccatggactgtttgtattccttcttttgtgaatgaacataattcttagtgaggtgtttttgtgtagtttttctctttcaccatgaggggtagagaaaagggctaggaacagacgccacctcttggcttaggggcggggaggctctggggtcaggccagactctcccttcctccctcacggtctctttccatttctccaagtctctgctttctcaacctcaacatgagggtgctggggagttgggctaagtcccgtgttaggacccgccatggccgcatggccccgaatctccctcgctggccccgtctctgtggctcagtctctgctggctccagagcgtggcctggcctgcgcgtcagtggacgtctgttcccgtgtgggggtgttcttgtgggcgggtgggctctgctgtttcccacgtctagccagggcctgccacccagggtctcaatacatgtgttttgaatggcttcaaagactattaaaagcaagttattattttcaaaattaaaataatctctctcttttaaacaataaaataaaattttgcattttgtggcgatagggtttgtatagctagtgatattttatttttaaatactttagaaggaagccatgttctaattccttccccgtttcagcgtgtttaagcaaagtctctttttagttcaacctcattgagcagagggcacctgtcaggtacagttgacagtacatccagttctgtcactgcctgacttttgaaagtctcaaatcttagcgtcaggagcctagacggggcctcactcactcccgcagcccccaaggttgaccgagctgccctctcccttccaggaagcacggctgatgctccgaaggagggaagactgacccggtttctggacttcacccagctgatggacatggcatctgaatccgtaggaggaaaagtaagtgggtctctcatggccaaacaagggttgaaggcatccgtgctaagggcacaactcaccagtgcagagaacctcatgcaagaatcaacaagaatcaggctgaagtgttggcctgcccaaggaaacccgttagcgagaaagacttccaaagaatttatcttaaattggtgacaattctcagcaaggacaatactgccttagattttgtgtgtttcactagaggacagactgtggtcctctgctctagataggcaggcggtcctctagctctagttagatctgaggtcctctagctggagttaaatcggaggtcctctggctctggttagataggaggtcctctggctctggttagataggaggtcctctggctctggttagatgggaggtcctctggctctagttagatgggaggtcctctggctctggttagatgggaggtcccctggctctatttagatccgaggtcctctggctctatttagatccgaggtcctctggctctagttagacctgtggtcctctggctctggttagatgggaggtcctctggctctggttagatcggaggtcctctggctctggttagatgggaggtcctctggctctggttagatgggaggtcctctggctctggttagattggaggtcctctggctctggttagatgggaggtcctctggctctggttagatgggaggtcctctggctctggttagatgggaggtcctctggctctatttagatccgaggtcctctggctctatttagatccgaggtcctctggctctatttagatccgaggtcctctggctctagttagatccgaggtcctctggctctagttagacctgtggtcctctggctctggttagatgggaggtcctctggctgtggttagatcggaggtcctctggctctagttagattggaggtcctctggctctggttagatgggaggtcctctgggtctggttagatgggaggtccccaggctctgattagatgggaggtcctctggttctggttagataggaggtcctctggctctggttagatgggaggtcctctggctctggttagatgggaggtcctctggctctggttagatcggaagtcctctggctctggttagataggaggtcctctggctctggttagatgggaggtcctctggctctatttagatccgaggtcctctggctctagttagacctgtggtcctctggctctggttagatgggaggtcctctggctctggttagatcggaggtcctctggctctagttagatcggaggtcctctggctctggttagatgggaggtcctctgggtctggttagataggaggtcctctggttctggttagatgggaggtcccctggctctggttagatgggaggtcctctggttctggttagataggaggtcctctggctctggttagatgggaggtcctctggctctggttagatgggaggtcctctggctctggttagatcggaagtcctctggctctggttagatcggaagtcctctggctctggttagataggaggtcctctggctctggttagatcggaggtcctctggctgtagttagacctgtggtcctctggctctagtgtgtaatgagggtcacctggagaactcattaaacataatgtgcagaggcgctggggtgcaggctgtgctcagaagcagtgtgtctggtacagaaagggaagaccctgtgcctgcccccaggaagctacactctagcagggagacagatgtaagtccagaccagccctgtgactggcacaatgccagggtgctgggggagcacatggactccagccatgggtagcctgggggaattggggtgggaggggtggggaygggccagctgagtgctgctggaggcagcttgctggagagcagstggcgggcagggatgaggtgcagggtggttctggcagaggtgtctgcgaggagagcaagggagcccacatgctccaggtggctcagtgtttcaagaacacgctgcgcgtttgtgagaagagttgggagcacgagtctggagaggtaggagaggccccatgtgccctgtgaagccttctgctgaggagccacaaagagatctggagcaagggggatcctgatatgtccacctacctgccatttgaaccctggaacaggtcaacctcagcacatcaggtcttccctctgctctgccactcaaacagccagcagctctgaaacagctcgtccttcctgcctttcgaactcctgggctggagtcagagcctggggcagggtgccctccaggctgcagtgaccacagagtcctggcttgggtggrgtgaccacagcctgttttgctcaggaaaatctgatttaccttgtattctggatgtacaattagtatcattgacctcactctcaaaatgatcctgctttggtggatgaatgaccaggacagcccacctgcagggtgacctatggcggcccttgtgggtgaacacagaggccccaaccgcatacgtaacccagagcttttttggtcattgctcggtttgtaaaagtascacgaaacctctggttcatgaaaaaaagaaagttggtttatttgcttcttgagtgtaagatgttagtgctcttacctccagatggtaaaggagaatcggaaaaaagggtgggaagagaagaagaaggaggaggcagacaatgaaatggaagcatttcaaggcatcatggcttaactgcagattctgtcgcttcccctaggtgatttcacgttttctttttacttcatctcataatgtttcactagggaatgaaataaaatggtatcagatttatggttgctttatctttctttctttctttctttgtctagattttatttgcaacagatgacttttttgctcctgcagaaaacctcataaaggtattgtaaattgacattctgcaatgtaaagggttgatgtagagaaatctatgccgccttgttattaaaatctccctgtatatttgggatggagtcatgtgatgtrcactggcaaattagcatattagaatgttagaaagacatgcaaatcagcatgaactcatgccaaaacatagcagagacagggatctgagcaagtaatttgggactgcattgtttcmtggggaaaattctgaggtcctcaaatactgctcttctgggtaaggtgaatttcatcatttgtgttgggaagaaaatggatctatgtcttgaattttctgggaaatgttttacctgcctaattataaaagtgcaggacagcttattaaaaaaatagagaaaatgctgamgaacatagggaagaaatggcggccctgctggcgtcctgctcctccgtcatacccagtgtggagatgcgaactcttgtgcgtggagagacaaacacaggtgcacattgagctaatgcccacgtacagcattcatgactggcctccaytgtgggcagcggccatctggttaccctggtgaaatggttgctctctgtctgggcaggacctggctgggtccagagcaagctgaagtatggccctgagaaggcaccttacagtgttaacttacctattccccaggagaaagtgaaaataaaatgagaaagggcaacatgaattaactttttctaggtcacacagttactaaatgccaaagctcttaccattttaccacaggtccggtctttgaaacactgaaatgcatgtctaccttgacctagttgttccacagatttacatcgtttgcacaagtgggcaaaaaaataggtagaaaacrttcattctggtattgtttggagaggagataaccaacctaagtgttcattgattgatagggaactaaagaaattatagctcttccagatatggactattatgtggctactagaatgaggtaggcctggcactgtggctcacacctgtaatcccagcactttgggaagccaaggcaggaggatcacttgagcctaggagtttgggaccagcctgggcaacagagcaagaccccatttctgaaaataaaaaatattatccaggcatggctatgtgtacctgtagtccccgctactcagaaggctgagctgggaggattgcttgagcccaagacgttgaggttgcagtgagccatcatcatgccactgcactccagcctgggtgacagagtaagaccctgtcaaaaaaaaaaaaaaaagcaagctctccattcactggcaacaagagaratccatgtatattttatgagtgtaaaacagagtttgaaggcgcacacatcaaacagtgagatgtgattatctgtgaagagagaggtgggcttggaaatggggtgggagagagggtagggcactatttcttagattttatacttgagcatatatatatatatayacacacacacacatataaacacttacacactacatatgtgtatatatagtcacgctataacatcacacgagacacatatatttctcctttttgaaaaaaataacattacagataaatgtaaagttcaccgttcacctccaacttgagtgccagtccacgccctccctttccaccattcacactgttgtaggatgggaaaatactttaggctgttggggctgctgaagcaaaatactgcagatgggtggtggcttaaacacagtgatttcttgaagttctgggggctggaagtctgagaccgagcctgagacagtagcagctccagcatctggtgagggccctcttgggatggccacctgccgstgatwccctcaggtgacagagaagagaggggaagcaggccatctcctgcctcctcccacatgggcactcatcccatcatgggggctccacccttgtgacctaatcacctcccaaagtcctcatctccgaataccatcactctggggattaggtttcaacatacaaattttggtgggggacaaacattcagtctgttgcagagaattcttctaatgtattttatacacttaaatacacatatattcgtaaatatataagatattttgtattctaaatttatatacatattttcacaaagcacttagcattctgcacactttttttggtgggggtggggcaggatctcgctgtgatcaggctgtcaggctggggtgcagtggcacggtcatggctcactgcagcctcgacttcctgggcacaagcgatcctcctgcctcactgggactacaggcatactccactgtgcccagcgaatttttaaattttttgtagagatgaggtctctagctcctgggctcaagcagtcctcctgcctcggcctcccaaatggctgggattacaggcgtgagccaccgtgcccggccctaaacctgcttttctcactgcgtgtttgtgaatgccattggtgctgatgtgtgtagacccaggccaccctcttagctgccgaataataactgtccatgtcatcgtggtccattttatggccccctttccttgttgatgcacatttaggttgatgacattttgcacgtattgaaaacatccttgtacaagtgtgtgcaygtgtgtcggtttatccctgggaccagtccttggtttctctctctctctctctttttttttgagacagagtctcactctgttgcccaggctggagtgcagtggcatgatctcggctcaccacaacctccacctcctgggttcaagtgattctcctgcctcagcctcccaagtagctgggactacaggcacccgccaccacgcccagctaatttttgtatttttagtagagagggggtttcaccatgttggccaggctggtctcgaactcctgacctcaggtgatccgccctccttggcctcccaaagtgctgggattacaggtgtaagccaccgcacctgactagtttttctctttttttaaggaacacacatttttaaggaacatcacatggcatgagccagttttacaacagggctgttttcctgccactggttcagtagcgtgtgtccccagcttccctcacaccgttcagtgtcagtccaatcacaacagcagcagtagcagcaacacacctgaaacaatcaacctacccccaaaactaaacaccaaaaagtttggggccttggaggtctggggtttaagtgggaggtgtacctccttctctccttctgggttcagagcagagttttgcaattcctgatgagtaatggaaaggctggagtgtgtgctgtctttaagatgtgatttgattgtaataacattcaaaataccatcaactttcatgtataatgctaaatactgggcacttactatgtgccaggcacatttaaggttgacaacagccagaggcggtcaatagcacgatggctgtttgcctttgacagaggaggagcactgaggcacaggaaggtgggtaccgttggccacgggtcccctgcctgggaggctgggcaggttgtcacaccagggagtctggcgggatccctggttggcgtctcatgcatcagcttccatcagagcatccctgccgccctgggtcctgctacccctagtcccttcctctgctcctgcctggggagattccctaagcagtaacgtaagatcctccttgcacgacttgatggaaacagggaaagtatccccatgctgggccagcataacgatttctgagcatccacgctatttgagggtctttcatgtcggctattccaacttcatgacactcctgcgaggatgcgtgtatcctcctcattctggaagatgaagaagtgtgctcagctgtctaaggaggctgtgtggggcatcagagaccatgcatttcctcagggggttgcagagtgtgctgtgtggtttcacctggaccctgagcgtccagcctactcttcctatgactttggatgaattcctgattgaatagtctacctggcctgcttggaaatctgaccagcctctctcactttaatacccatgtaggttgctgttgggaattgcatttgtgcggcccacagagtgcctggtgatgtggttgtacctgctgctatcagtggtcaattctgtgtgctgaggcccacaaagaagtcacatttctttctctgaagatgataaaagcggaggcatctctcaatctggaaggggctagctgggcatgaaggtggtggcagaggctcccctagaccccggtttgcaccgttcctctggcactgtgggacagaagtggacttgctggaagccaggagatcacatgaatgttaatgatcaccttgttgtggtctttgmcctagagtgacagcccgtgcttcaaagagcatgaatayacggagtttgggaaatggatggatggctgggagaccaggaggaaaaggattccaggtaataacaacggttcgytcatcgaagtgcagctgacactgcaaagttaaaaacgcaggctgtggcaaagccagtgtccgttttgggtcagctttaacatggggccctggaatgctctgtaatcttggatgtccttatctgaacatcaggctctaagtcaggaaggggcagcgtgagcccgggtcactgacgtcccaccaggcacaaagggtgagaagcacgttgtcgggaaaatgaaaaccctggtgaggtctgcggatggaaaaaagagtggattctcactgagcaatgtggcaggcattaggcagcgtgcatcttctgggtccttactacagtcctctggagtaggtctctttatccccgtttaaccgccatggaaacagattcctggactcagcccagggcacactgctagcaagataagctggggactgggccagggtctgtcctcaacactgtaccygctgtcttttacgattttatgcaatttttattcattgctattactcagtctcaatcaaaatataccttctgaagttgaagaaaagcaaacaaatccaggcattaggttgataattggatttttacttgccactatctcaagtattacagaaatatttgatatttctagttttctaactttctacagtacttgaagcagtattagtttctaacaaatctggacattttaaggtgagttaatatctggcrgtaaataaccaagaactcaatagtggcagacttgacttcaagactctgaaggctttggtagatgcaggcaggtgtctgaccagtggtggggctggaggctggagggtgctgtgtcagttcctgagcttgagaggacaatgaacrcagtgtctgcaggagaaccagctctgcttactacctgctgagcttggtgaggtgctttctacatcgcacactcagtctaagctttatggaagctaacggcatccctaatttacagttgagaaaatgagattctctactgtaagaggtaaataatttgccaaggacagtcataggaaatgatccatttggaaccagaatcaggtcttcctggatccsagcctgtgcattttctcttctggctagaactgaggattttcgttggggaatggtggtcacatgtggccaggttatgagagatcctacagtcatattagctaagaaccgccctgaacagttttttctgtgatggacggaatggcccctgctgtgggtcaggtgcatgtggggtgcactgcctcgcatgcagcatctgctgtgttggccctaacgagactgctcttgtcctctgtgttgcgcaggtcacgactggtgtgtcctcaggctggggatccaaggagtcatccggggcttcgacgtggacgtttcttacttcacgggagattacgctcctcgagtgtccattcaagcagcaaacttggaagaaggtgcgttaggaaccactgtccccaaaatgagaattatgggtcacatggctcctctggccagccacagccccacaactgctcactttccctaccacccagacagcttcaggcgcttgactaaggctactttactgtaacggggctgtaggaccaggactcctagtagagcgctctgtggtttttgatttgtggcttaatagtgttaacagccagatatagattttatcattcccacggtccttcagcttcacgcagaggcaggccatcatccctggaacgtgggtgagcaggttgctggtgggcgggagggagtggtttgtgcctcagatgacccgggtgatgtggacccaggtctgggacagctgtggggtgagcagcaccagccctgctttgggctgtcccagtgtgtgtgatgggggagctgctatggcattttaggcaagggttcctatctgcatcttggaatgctggacctatgaatcctgcaggctctataaatgagacgtattctgtgaaagggccatatacacagagcagacctcaggtgctgaagaagccaagaaaccaaagaaagaggctgacaaatccagtctgttggtaacgggtattttattgggggaacttacggacagaagcgtggccttgggcagcagcgagatgggtaaatctctgcactgttactgcccggactcagggctcacatgctgtagggaaagggtctgcgtgctccagcgggacaactgaaggcagcctccagaacagggaagagggcggtgtgcgtcacagcctctgatttgtgcgataatatcaaggttgacatgttctggactaaggacagtaaatcaagttggaagcaggacgtgttcacaggattgaggctaatcagacattgacatggcagattcgcatccaagatggagtcactttgtctccacagactttctgtatttttattcctttgttaccatctgatgttgactttagcattaattaaaaaaaatatacaattatgtgtgtgtttatacatgtacttagggaagataagtcaatgtgggttggcaagtttacactgaacatgctatgtgcacagcgctgcatgaggctctgtggacacgaacgggccctgctccctgaagatggctggggcacctgaacaggaaatgatgctacaagagatgctactctaaaagcggaaatgaccagtgacaaacgagtaagattgtttcggcaagcccctcaactgcccatgagtgcttctatttctgaattgccccagtatcaattctaaggatgccactgggagaggtggtgtttctggaattgaccttgtaatagtccaactttgaaaactctagcgatgtgataaacttgttgaagtttgagctaacttggagatgacatttactgtttgacaagcaaatgtagtatcaaacatcttgtactattttttgaaatgactgttaatatattaaatattgaggaacttcaacaagtgtgtctattactttgatcatttgatacttcgaaatatctttagtgttatttgcaaagcgagaattaccatacaaaccaccaagagagtagattccctttgattttgaaccctaatcttaatcctgaatggtcattccaactacagataaactaccagaaatcccagaaagaggaaccaggacaggagctgcagccactcctgaggagtttgaagccattgctgaggtacatctcccccaaatgaattgggtcttgtcaccaattattaggagagtagggaaactgctctgcacacctggctgtgcaaggcgattctttgggacgcccagccctgatgctccccacatcatttgcttacccactgtggccttgcaaacgtctcagtggttcatcaacctgggaagagtgagcatcatggcccaaaggcttctcaaagggttccaccagcacccatctgcaaatggctgctggccccgataagcacacatacagaaactgatagtaagcgtttaaacactttttataccaacttgatgtaacttgaagtaacgtttgtgtttggagaatttaataaaagaaacgggggaaaaaaataaatagggcttgtgttttggtacattcttgtttttttaatgtttatttagtaatagtttgtattgttttttacagaaatgttgatccataacagacaggaaagtaaataacaggaacagtaaacagggccgttagtttgagaagtgctaacctagagaaaatggttgcaaggctyaggccagcagatttccccagaggtcatggagcatggcagtagccttggtttttatttgaatgttcacctcaccacacctcaaggtgaagacatttggaggggtctgagatcttgtccttcatttgcaagcatctgccaccatcacscactggctgttttgatcagtgaaaacaaaacaggcctttattctgttttttattaaacatggggcttgatatgtactatttttattaaagtgtttcattaggtatccatcattatttatttatttgtttgtttattttttgggacggagtctcgctctgtggcccaggctggagtgcaggggcgcgatctcggctcactgcaagctccgcctcccaggttcacgccattctcctgcctcagcctcccgagtagctgggactacaggcgcccgccaccacgcccggctaattttttgtatttctagtacagacggggtttcaccgtgttagccaggatggtctcgatttcctgaccttgtgatccgcccgcctcggcctcccaaggtgctgggattacaggcgtgagccaccgtgcccggcatccatcattaatttttattccaaagtatctccacaccttaagtgccacagaggcaataggatgacagaatttattgttttcaagagcaattgctgacatttctatatttattgctagctaaaatccgacgactggagttacttggttcccatgactgagcttaagccaggaaaccctgcttccggccacaactattttcttgtcaattcccagcagagatggactcatatcagactcaacattttcccaggtaatcgtgacatggacttatcaccagttccatggcttctttattttatgttgacatgtttataaaatataaaatgacttgctctttccttcttggtaattgatctctctagcatttcaggattgtaatttctcctttttatgctctagaaaattcttgttttaatccacacatcaataggtggttattgaaaaattatcaagtaaattaggwtgtggtggaactaagttgtattaggttagatagatcctaactagatttcacaagtatgttatattagcagctgaagtggtatgtacaaatgactcattttattttttaatagctttattgtgatataattaacatgcagttcacccatttgaagtgtacaatcaatgatgtatagcatatgcatagacacgtgcaaccatcaccatacctttagaacatttttatcatctcagaaagaaaccccatatcctttagctatcatccctcatcttccctatcccaaagcaaccactaatttgctttttgtcttgatagttttgactattttggacatttcatataagtaggaattatataatattggtcttttgtgtctgactttttccacttagtataatgttttcaagattcatccatgttgtaacatgtattaacactttctttctttttgtgtaaggctaatataggttgagcatctcaaatctgaaagccccaaaatttgaaatgttccaaaatccaaaactttttgagtgctgacatgatgctcaaaggaaatgctcactggaatatttcagattttggatttgggacactctaccagtaagtataatgcaaatatttaaaaaaactgaaatccaaacacttctggtctcaagcatttcagataagggatactcaaccactaccacattttgtttacccgttcattagttgacagacacttgtttccatctgctggctattttgaacaatgctgctgtaaacatttgtgtacaagattttgtgtggatatatgctttcttttgttgagtgtatgcctaagactggactttctgggtcatatgataactctgtgtttaactgtttgaagaattactaggcttttccgaaagtgctgcactattttacattcttaacagccacgtaaaggagtgctgatttctccctgcctttcccagcactctctgtcttactttttgtttatagtcatcctagtggatgtgaggtggtgtctcattgtggttttgatgtgcatttccctgatgactaatgaggaggaacatcttttcatatgtttattggccatttgtatgttttatktggaaaaatttctcttcagatctctattcacttgtcttaaatttcaacaggtttttgggggaacaggtggtgtttggttacatggataagttctttagtggtgatttctgagattttggtgcacccatcaccagagcagtgtacactgtatccaatgtgtagcctgttatccctcaccccccacccttccccacattgtatcattcttatgtctttgcatcctaatagcttagctcccacttataactgagaacatatgatgtttgcttttccattcctgaactacttcatttagaataatggtctccaactccatccaggttgctgtgaatgccattatttcattcctttttatggctgcatagtattccatggtatatgtatatataccatattttcttttttaaaatattttcaattatgggcacatagtaggtatatatatatttatggggtacatgaaatgttttaacacaggcatgcaatgaataataatcacatcatggagaatgaggtatccatccccaatccattgtgtatatataccacttttaaaatctattcctctgttaatgggcacttactttgatttcatattttggctgtgacattgtaaacagtgtcacagtaaacttggaagtgcagatatctcttcaatatattgatttactttcttttggatatatacacagtagtgagattgctggatgaatctattgttgttctatttttagttttttgaggagttttcatagttttccatagtgagtgtactaatttacattctcaccaatagtgtacatgggcttcactttctccacatcctcgctagcatccactattcccccgtctttttaaataaaagcggtattactctgctctcacgttgctataaagatactacctgagactgggtaacttacaaacaaaagaggtttaattaactcacagttctacatgactggggaggcctcaggaaacttacaatcatggcagaaagagaaggcgaagcaaggcatgtcttacatggcagcaggatcgagagagagagagagagacagagagagagagagacagagacagacagacagagagagacagagaaagggggaagagccacttttaaacatcagatctcacaagaactccctatcagaagaacagcatggggaaaaccaccccatcatccaatcacctctaagcaggtccctccctggacatgtggggattacaattagagatgaggtttgagtggggatacagaaccagaccatgtcaaaagccatttcaactgaggtggtatgacatttcattgtggttttgagttgcatttttctgatgattagagatgttgagcatttaaaaaatatacctgttgcccatttgtatgccttcttttgagaaatatctattcagaacttttgcccatttataaattattttttttgctactgagttgttagctattgagttgtccttatatattcttgttattaatcccttcttagatggatagtttgcaaatatatttttttccaactctatgggttgtcactccactttgttatttcctttgacagcagccttttagcttgatgtaatcccatttgtctgtttttcctgttgttgcctgtgcttttgaggtcttacacacaaatatttgccaagaccaatgtcctagagcatttccccaaggttttcttctagaatgttcatagttttaggtcttagatttaagtttttcatccattttgatttcattttgcataaggtgagagataggagtctagtttcattcttcggcatgcagttatctagtttccccagcaccatttactgaagagactgttccccattgcgtgttcttggtgcctttattgagaatgagttggctgtaaatgtgttgatttatatctgggttctctattgtgttgtctgtttttatgccataaccattctgatttgsttatatagcttcatagtayattttgaagtcaggtagtgtgatgccttcagctttgtttttttgctttggttattcagggtctttcatttaaattttactttttaaaaatatttctgagaagaatatcattggtattttaatagggattgaattgaatctgtaaattgctttggatagtactgtcattttaacaatattaattctttcaatctaggagcayggaacatctttccattttttctgtgtcctcttcaatatatttcaccagtgttttatagttttccttgtatagctctttcacttcgtaggataaatggattcctcagtattttatagtttttgtagctattgtatatgcgattgccttcttgttttattttgtagattattcactgttggtgtgtataaatgctactgacttttgtatgttgaatttgtatcctgaaaatctactgaattagtttatcagttctaatagtttttgggtggagtctaggtttttctaagtataagatcatattgtctatgaagaaggagaacttcacttctttcttttcaatttggatgccatttatttctcttgcataattgctccagccaggacttccaatattatgttaataaaagcggtgaaagtgggcatccttgtcttgttccggatcttagagaaaaggctttcattttttgtccattaagtatgatgttacctgtgggtttgtcatatgtggcttttgttattttgaggtagtttttttttctatacccaatttattgagggtttttttcttatcatgaagtgacgttaaattttatcaaatgctttccagcatttatcgaaatgatcatatggtttttgttcttggttcagttagtgatgtgtcatgtttattgattcatgtatgttgagacatgcttgccttcctggaatgaattccacttgatcatggtgagtgatctgtttattgtgttgttaaattcagtttgctggtattttgttgaggatttttgcatctatgtccatcagtgatattaacctgtagttttctttttttgttgttgtctttgtctggttttggtatcagggtaatactggccttgtagaatgagtttggaagtactcctgcttcaattttcttgaagagtttgagtaaaattggtattagttattccttttatgtttggtagaattcagcagggaagccattaggtcctggaattttctttaatgggagactktttaaatttcagcttttatctcatcattcattattggtttattaaggttttctatttcttcatggttcaatcttsgtagattgtatgtgtccagaaatgtatccatttcttctaggttttccaatttgttggtatgtagttgttcataatagtctctaattgatctttgtaattctgtggtcacatttccttttggctgagtacagtggactttattgatggtatgtgacaggatgtggctccctaggcccctctcttttcagggggcctggcatggaaactgtgtcagggggagattctcagtatggtgggagagtgagtgtgrcagggactccctagcagctgagaacctctctaatcttcttgtgctcttgctggggctggtggtccaggggctcttactctttggaggccatgtggaccatgaggcctccactaccctgttgccaaattcattgtcataccagggaataagcttgacaaagtagtcattgagggaaatgccagccccagcatcaaagctggaagagtgaatgtctgttaaagtcagaggagacaacctggcactcactatagcccaagatgcccttgagggggccctccaatgcctgcttcaccgcctttttgatggtgtcatatttgtcargtttctccagatggcaagtcaggtccaaaatgacacagaggtggggatatggaacaccatgctagtgagcttccattcagcttggggatgacctttccaacagctttggcagtgcaagtagatgcagagatgatgttctgtagagccctgtggccatcctgccaacgtttccaagaaggggcacccatggtcttcggagtggtagtgattgcataggctgtggtcatgagtccctccatagtgccaaagttgtcatggatgaccttggccagaagggctaagtagtaggtggtgtatgaggcactactaaggatcttgaggttgttttcatacttctcatgattcacaccccacataaacataaggggcatcagcagagggggcagagatggtggctcttttggcttacccctctaagtgagcctcagccttctccatggtaatggagattctagtgggctcaacaacataatcagcaccgctgtcatttcactcgattttgggggggatcttgctcctggaagataatgatgggatttccattgatgtcagtcttctcattctgagccttgatgatactgtggaacttgccatgggtggaagcctactggaacatgtaggccaggtagttgaggtcaatgaaggcatcattgatgatgacaatatccactttgccagagctaaaagcagccttggtgaccaggtgcttaatgtggccaaatttgtttactctggccttcattttcaccttgttgcctcaggaacccagctggcactgcataaaaatatgcaggtgtctgtcaaatggaaaagagaagagagccagtctcattttttatgtatccttctctatttctgattttttggggtcttttctctttgtaattagtctagctaaaggtccatcacttttgtttctttttaaaaaaacaagttttttgttttgttgatcctctgtattattttagttgccatttatttatcctctgatctttatttttttcttctactagtaattttgggattggtttatacttgcttttctagtttattgagatgcattgttatattaatttgaagtctttctacttctttggtataggtatttattgctataaacttccctcttagtactgcctttgttgtatcccatatatttttgtatgttgtatttccattttcatttgtttcaagcatttttaaaatttccttcttaattactgacccatttgttgttcaggagcatgttgtttaatttacatgtgtttgtgtattttccaatgtgtctcttattattgatttctagttttattccattatggtcagaaaagatacttgatatgatttctacttttttgaatttgtttagacttgctttatggcccaagacatggcctattctagagaatgttccatgtgctgatgaaaagaatgcatattctgcagcagttgggtaaaatgttctgtaatgtcagttagggccattagatctagtgtgtagttcaacttcactatttctttgttgattttctgtctggacgatttgtccattactgaaagtgaggtgttgaagtcccctactattattgtattgcagtctatttatccctttagatctattaatgtttgctttatataagacttgaaagctctggtgttggacacatagatrttcataattgacccatttatcattatacagtgtcttgtctttttttttttttaacagtctttgatttgtagtctattttatctgatataagtgtagctactcctgctcttttttggcctctggttgcatgagatatctttttccatcctttcactgtcagcctatttgtgtctttataggtcaagtgggtttcttgtaggcagcatatagttgggccttgtttcttagtccattaagcaacagtataccttttatttggaacattgagtccatttacattcagtattgtcatcagtaagagcttactgtcattttgttgcttgttttctgatcccctccccttcccttcccttccctcccccctcccctccccctccccctcccctcccccctcccctccccctcccctcccccctcccctcccccctcccctcccccctcccctcccctccccctcccctcccctcccctcccctcccccctcccctcccctcccccctcccctcccctcccccttcccctccccccctcccctcccctcccctcccctccctttcctttccttttctttctttctgccttagtggttaactaattttctctgatagtatgttttaattgacttttatttttagcaaatctattataggtttttgcactgtggttaccatgaggcttataaaaacatcttataacaagttattttaaagagatgtcaactcatcttagatcacaaagaaaaaaatagaaataaacaaagaaaaacaaaaaaaaactctacatttttaactttatccctcctcccacattttgacttcatgttgtctcaatttgcatgtttttatattgcctatcttttaacacctgttaaagatatcaacaaaaagattattatttttgatagatttgtcttttggacttcatactagagttatgagtgaattacacactataattacagtgttggagtattctgagttcgttaatgcacttaattttactagtgggttttataaattcaaatgttttctttttgcacattagtgttttttttttttcaaatggaagaactttagcatttcatttaagactggtggtggtgaattctctcagctcttgtttatccaggaaagattttctctctctttcatatttgaaagatagcttttctagatacaatattcttggatggcagtatttttttctttcagcactttaaaatgtcatcccacttctttttggcctgtatggttatcattgagaagtctgttgtcagatgaattgaagcttctttatgttatttgcttcttttctcttgctgcttttaggatatttttatccttgactttttttttttttcttgagacagggtctcactttgtcacccaggctggagtccagtggtgcaatcacaggtcactgcagcttcaacctcctttggctcagatgattctcccacatcagcatcccaagtagctgggaccactggtgcacaccaccatgcctggctaatttttgtatttgttttttwttttgtagaaatggggttttaccatgttgcccaggctggtctcaaaatcctgggctcaagcaatccacccaccttgacctcccaaagtgctggaattataggcatgagccatcatacccagcctgtccttgacctttaggattttttatatgccttggagtagtcttatttggatacaatccatttctttgagctttctgtaccaggatatttatgtctttatcaagttttgaaaagttttctattatttctttgaataagctttctaccccttgctcttgctcaactccctcctcaacaccaataattcttagatttgatcttttgaggtaatattttatatcttgtaagcaatctttattccttttcatttttttctcctctgtgtatttttaaatagcccattttgagctcactgattctttcctctgcttgcttcattctattcttaagagcctctaatgaattttttggttcagcaaatacgtttttccattcaaagttttctgtttgattttaaaaaattattgaaattttgttaaatttctctgataaacttctaagctgcttttgtgtgttatctttgaggtcactgagtttccttaaaactgctattttgaattattgatcacagagttcatatatcactgtcttattatgatcagtcactggttccttgctttgtccatttggggatgtcatagttctttgctgttgtttcttatgggtatacatctatgcctgtgcattgaagcattagttatttattccagtcttttctttctgggttgtttcagtttttgttgaatatatttgcttagatgtagggagtgtccaatattttagcttccctgggccacattggaagaggaagaattgtcttgggccacacataaaatgccctaacactaacgatagctgatgagccaaaaaaattttgcaaaacaatctcatactgttttaagaaagtttatggatttgtgttgggccacattcaaagccaccatgggcttcataagacccactgcccatgtgttggacaagcttagcttagagaatcattataaatttcctgttgattttatttcctgctaggtagctgcctacttttcagcactagatggcaccttaagtccaggattgcttcatttgtagtaagcaatcaaattactgcccatcagaataggggaggtcccagggagcatattctagtggtgtgggaaggttagctaggtgtttgtctctaggggacctgtggaacaaacctcctacaacatggtgttgctgaacagcaactctgatttggtgtttcctctggctgagttacagggtttgcagggctggggatgtctcaccctcagtgtgaagcctccaccttatggatcatgagaatgggtcactgtggccccaatatctcaaggtaggaccctgtcccatgagtcagggctgggtcaaataaaggagcccccgcctctcaaccacactcacccagggcttagcctcagtaacaggcatataggggcaggatgagaagccctgatgtcctgcctctcctgggaagacagccctgcaaccatgggctgcacttgtttgcagtctccactttgctgatctgggagagggtgtgmaggtgaggtcttggttcaaataccgcagactctcactgttcttactgaattttagcaratattcttgaatagatgttgctgaattttccgtatgcccttaggaccatttccagagacctgaagtgttttcccatccctcaacccccctaaattttaccagctccactgaggaacaggacagcaaagctctcctgctgtcatgccagaagtggttctctggaaccttattttagatgcaatgtttctctggttatgatgctttaaagtgagacatgaaaatggaaagatctaaacacgtttactaatattaattactcactgaaataatctattctaaaaacagtgcaagaaaatgaatgagcaaagcttacaagagagtcagaccttttccccacttgttaatttaacatacactgtggaataactactttgagctacagactgagcattggccataaaatcattttcctgacaatgtgtagggcagaaccaacagagtgtatgcttcatgaagaaagggctgtgagtccagattgtcatttttgtacacctgacacttagcacagcatggggaacacaggagaagctccataactatttgttgttagatttgacagagtccttgtccttatgaagtgaataacccagtgggagacagataagaaaaataactttggaaagaggccgaggtgggcagatcacctgaggtcaggagttcaagaccagcctggccaacatggggaaaccttgtctctactaaaaatacaaaaattagccaggtgtggtggcgggtgcctgtaatcccggctagttgggaggctgaggcagcagaatcgcctgaacccgggaggcggaggttgcagtgagcygagatcgtgccactgcattccagcctgggcaaccagagtgagactctgtctcaaaaagaaaacaaaagaaaaaaaacaaaaaactgcaaaatagtgatacatacaacaaaagtattttggtagagccataaacatttctatttgactatttctgatccaccaaaatagcaactttatatgtccaacccaatttgtacaggattcacgagttgagggagggtctaaaatagtttctgagtggaagccctgcttttctgggttgaatatgaagggtccctaagcacatgaaagctctttcctaattggtcagcattgatggcctgaagaggagagatgggcaatgcctgcatgcagatttcatgtcccagctcttactggcatctttaattgctccatgaggattccacctgggatccaggtgtaaagggaaaggaagctggggaaacctggctgatgttacagggacacactgggtgggaatgggttggtttaaatgagatgtactcagaggatgaagagtcatttctgggattccttggcagctgtgactaaaagcaagtttggatattaactctgtaaagaagaatcttattttttaaaatgtgaaatcgacttcactttcaacagacraatatcttctatgccattaaagccaattataatatttaatgaactagaatggcagtgatattactctcataacccggctcctgctgaatgactccctctaggatattttctagggttttatgccaatgaagtttttggttttatttgttgtaaatagcaagacttccattgttttaccaaaaaattttcagatcactcattttcactaaatttgtaaaataaaaacatatagggcatgttttagtacaatattttgattaaattaattttctatattaaaaatgcttggtttccaccttctagcaattaatattcgaagaaacaaaacattcgttctactagaatcagatgctgtgagttgattttggtagctatttgctgctctgcagacctaatttcaggctgctgtggttctcagcagcaatttgattttgtgaatattatcttttgtattctgaatcacattgctaagcagggtggtgttgtaaaaataaaaacataaggttctcttgtctgagtctgtgtgggagtcagcgatgcttatttctagcacgaaacattatctgtatggtgaatttcccgaatgctgtttgaccttggagttgttcatttaatgaaaaaaacttcaatgcctactatgtgcccagacctcttctaggtagagacgatacaagagtggtacagaagtgaacaacacaggtaagtggtctggcctacaaggatttcgcattctgggtattggagactgattttagcaggaacttaaaaagataatttcaggctgtgattagagctctggagtaaataacaaagagatatgataaaatgtaacctggggagtcaggcagtggctgaatggaggagggaggagacaacttcagagcatgagagggaagacttttctgaggccatgcctttaaggtgaggaacataagtaatcttttggagagctgggaaagttgttctggtacagggtaatatcaagtgcaaaggccctggggcagtgggcttgttgtatttgagaaacagcaggtgggtgtggccaaagcctaccaagagatgacactggagaagacaggagggtcctgtagtgtatgatacacaagcagccatttttacaaacaataactaaggcacctttccttttcagatggtggaattgcacgacttagagtattcggtactggacaaaaagactggactgcaactgaccccaaagaacctgcagacctagtggccatcgcttttgggggtgtctgtgtaggatttagtaatgctaagtttgggcacccaaacaatataataggtaagatgatattcttggagctggcttatttaggaagtctgggtaccggcattaaataccccaatatggtcagagtgatttaaaaggaaaggcacatctcaaagcacagcagtggatgagattaatcttccatgtgtaggatttgatgcctttatgacatgaaataagtcaacattaccaatttttctacctaattttggcctaagtagctgctttaaaaggaaaagtaaaatttaactaaccctatgattgtttgtgaatttactgaaacattaactttaatgaaaataacttatgtagcaatgctcagatgcataagatctgtaatttaattacagcaatgtattcatcctcatagttaaaatcatgcagtttaccattcaacaatgttattttctgtaggagttggcggggcaaagtctatggcggatggttgggaaactgcaagaaggctggaccggccaccaatattagaagtaagaagttaaaaataactatggtttaaagtttttcttaaaagtattttttggaactttttcttttaaataaacttttgcacattttagaaacctcatatgcattgttctaaatgctaattactatgatttatattttccaaatttcccactgttttcataatatcagggcagagactcagaagcccaaacatactggtcattgccagctacgccaatgcatttttggaacattcctctgtttcttcaataaagaaacaaaaggagctgcgatttaataatacaaaagttatgaataaatgtgttgggagatctggggaagaaccactagtttagcaatgtttgatatctgtgtatctcaggattacaccacttatgtgaacttgtgatggacagggcgctctagagtccatgcagctgtttaatttggccagtaactaatttgagatagagaaaccaagatgaagtgaaacaaaaaatacaatgcctttcaatttgcaaatcccaccaaaaacttggtcagaaaagtgccctccccttcctaagttagatttcatgtcacctgatgctttgagatatcaatgaacagactctccgttctcaaaactaaggtttgaacgcacatcatgtatcagtataggtttgaccaacaaaatatgtaccttaaaaggtcaaaacaaactaattagaggaactatggactggaatagacgaagattgctgcacgtataacattttgcagggatctataattgacatagaaatttagaaaaacgtatctgggacccartgaactcacaaattggcaagagacatttaagaaatgatagcaaagaggcaatttacatgaaagtgatttacacatcaggccacaggaaacactcttctatagtaagwaataaaagaaacacrtcaacytttttcacctgttggttttcgggactggtttcttgaatgactccaagttcgtttaccattttcttctcttctgaattccagaatgatgagaatggcattctcttggttccgggttgtgaatgggcagttttccrattggcacatcctggagtaataactcgaattgaaattgacacaaaatattttgaaggtaaatgcaaagccataaagaagtaccctataattggtttgtttattctaaagactgagttctatggaagtgggactgaggacactggactttcggtgtggattccccgtttaagctgtgtaattttgagcatgctactttaacccttagaactctgtctgtctgtctrtctatctatctatctatctatctatctatctatctatctatcttttatttatttttttgagatggagtcttgctgtgtcgcccagsctggagtgcagtggcgcaatctcagctcactgcaacctccacctccagggtccaagcgattctcctgcctcagcctcccgagtagctgggattacaggcatcctagacaatacccagctaattttgtatttttagtagagatgggtttttgccatgttggccaggctggtctcgaactcctgacctcaggtgattcacccgtcgcagcctcccaaagtgctgggattacaggcctgagccactgcgcccgacccttatttatttatttttgagatggagtcttgctttgtcacccaggttggagtgcagtggcatgatcttggctcactgcaacctctgcctcctgggttcaagcgattcttcctgcctctgcctcctgagtagctgggattacaggtgcccgccatcatgcctggctaatttttgtattgttagtagagacggggtttcaccatgttgaccaggctggtcttgaactcctgacctcaggtgatacgcccgtctcggcctcccaaagtggtgggattacaggtgtgagaccatgcccagccaaccctttgaactttagtaactcctctataaaattcacatttgggctggatgacccccaaagtcacacaagattccatgacactgtccggctctttaccatagaggctctgcatcccccttggaaaaagagcctgtgaaaagcaccgggatgggaggcacctttttacagagaagggtcctaagcagattgaccggggaaggggagtgaccatttcttccccaggcttcacttttaaggcagtggtttacacatttttaaaaccgtacacctctatgtgtttaaaaaatatttggacaaacaaccttgatattctgtatttactttcttatgaaatacatatgtgtattattaagacaattcaaaagaagttggtacacttctacaattgttatgtgacattttataaatactggattgagtattccacgttagccatctttgaataaatagtggcattttgtattcatgttttgggtgagtggtttttatttttatttatttatttatttaattatactttaagttttagggtacatgtgtacaacgtgcgggtttgttacatatatatacatgtgccatgttggtgtgctgcactgggtgagtggtttttaaatgtcttgggaattattgtgactttactcaattactaaccattatatcaaattcaaggccaggctcatcattaacagtagtgcctataattatttcaagaagtcttggtaattttaacttattttggaaagacggcattttatctgttttttcttttaactattattttaggttcaagggtaaatgtgcaggtttgttatrtaggtaaacttgtgtcatggggttttggtgtacagattattttatcacgtaggtatcaagtatggtacccgataagtatttttgcctgatctccctcctcccaccctccaccttcaattatgccccagtgtccatgtgttcccattatttagctgccacttatgtaaacatatagtatttggttttctgttcctgcgttagtttgccaagaataatgctctccagctgcatccatgttgctgcaaaggacattatctcattcctttttgtggctgcatagtattccatgttgtatatgtatcatattttctttagccagtctacaattgatggacatttaggttgattccacgtctttgctattgtgaacagtgctgcaatgaacatacatgtgcatgtctttatggcagaatgatttatattcctttgggtatatgccaaataatgggattgccgagtccaatggtaattctgtttttagttctttgaggaatcgccacaacactttccacaatggctgaactaatttacactcccaccagcagggtatatatgttcccttttctccacaaccttgtcaacaactgttattttttgattttttcataacagccattctgactgggagattgtatctcccagtggttttgatttgcatttctctaatgattagtgatgtcagccattttttcatatgcttgttggctgcatgtatgtcttcttttgaaaagcatttgtttatgtccttggccaactttttaatggggttgttttttgcttgtaaatttgtttaaattccttatagattctggatattagacctttgaaagaaccataggttgcaaatattttctcccattccgtaggttgtctgtttactctgctgatagtttattttgctgtgcagaagctctttagtttaattagatcccatttgtcattttttttgcttttgttgcaattgtttttggcattttcatcatgaaatctttgccagttcctatgtccagaatggtatttcctaagttatcttccagggtgtttatagttttgggttttacatttaagcctttaatcaatcttgagttgatttttgtatatggtgtaaggaaggggtcctgtttcaatcttctgcatatggctagcccattatcccagcaccatttattgaattgggattcatttccccattgcttgtttttttaagactgcattttagatctggttatgtggccatggtttttacttttcaatgtggctgactgagggtcaggtgaaatggcagttctggattttcttgttcatacatacttgcattttttatggtatctttaatccacagttctctgcatgaatggtttaaaataacttacttatttttgtgagggatgctttagttaaamctagataacaaacagtaaatccacttaagcagacacccaaaactgcaacaggtcatgaatctaccactgtcaaacactcaggatacctctggtacatacaatatgatgactgtaatggaaatgagggagcatggcagtatccacttatagcaataatatagtaggttatatcaaatacacaaagcttaatatacacatacatatgtaygtatatcagacaaatagaaatagcagctctaatgttctctacttgcatcctttgtgtccgtatgcaccccaggggcatgttcgcccaccctggagactaccgttttaagagatgggccacaaagggggcatgtgagccacagtctcctcttttccagggttcttgattagcagctcctcctctgttgatcctaaagagctccagtagaagttctctcttctcaaagagagtgggacctttccctcaaggtcctctaaccccactgagcccacgattcctatgatattccaaagagagaagaatctcaggaccatatactctcacctgaagatgactcagaaatccccaaatacacgtgtgtggctggtgcccagcgctagctaacataaaactcagtatttccttttgattgtcatgttaaaaaatatgtcataggaaaatattttccagcttcataataatttcagatgagccacatagcagtctgcaagtaattaaatctgcaattgaggaagcttatcaaatacattcagatttcaaagtgagaacgctatacatgcaaattgaaatgcgccagccccttcacatatggcggactgcttctgagtcctctgaaaaagaaatgtctatttcatgagacaatctgagcctcacaaaccrgtttgttccttccctcacatacttcataccttygcttttgctcaggaagagcagggacttgttttttgctgggtttttgatcttattaaaaaagcatgatatcctataygccaaactgagtgcaaatgcgggcagaaaatcacgcygtgttttgctccaacaggcaatgctcctgacagcygtaaagtggatgggtgcatcctgacaactcaggaagaagaagccgtgatcaggcaaaagtggattctcccggcccacaagtggaaaccactgcttccagtgaccaaggttcgtgtggcatgttattcggatccagcactcagactgtrctatttccctaagattctcttttgaaggattaggatacgctccaaagtttctgctcagtttaatggtaaaacgaatgaggtttaaaacccctatctgcaaactttaagaagaaaggctctatttctctccacttttgtatttccaaattttattagaacaaaattgttaartgttcagaatacatacgtggaaacatgtctctgcatcatgtttaactttgtagaaggggcgactagcacatttaaagctctaatggcgtgtccacctgcaggatggaygctctgagatattccacaagtgtcttctttgatttagaaagagggtcaggctagaggtgagagctgctcccatgtaaagataggaaataatctccgggagagaccaagatggtctcttccttcattttcttatcaatttgcttatgtataatcaactattagaaacaactgatgggcatttaggttgcccatcaattgtttattggggcctgcttattcatgtattatttgggcatcctatccctactagcagattttcatggaaagcccaattatcatcaattaataacttattttaaagccccttcggttaagtctaagccaaaggtttgcccgggccgtgggctcattcggccacacatgtcctgttaacagactaggacctctgcatctgcttgcttttcagttgtctcccaaccaaagtcatctgttcgatagcctgaccctagagctccaagatgtcatcactcacgccaggctcaccatcgtccccgacgggggagtgagccgccttcggctccggggcttccccagctccatctgcctcctgaggccccgggagaagcccatgttgaagttctcggtgagcttcaaagcaaacccttaacacacacaaagccccggtgtcggacacacagcagtaatttcccagtcatagtcttcttttcaaatgttttgaacacctggtgatttaataaagtggtcgtctcacaaattgatctctgtatttaatgttgctatgaggcatttagtagcttacatactggctatggctgtgactggtggtctctacggaactactttttttgaacattataagatattaatactcataatatcaatatctgtaccttcggtgtggacttccagccgtaacatgtagcctactgactgtctagaatcactcaaggggactggcctatctttacccagagtaggaacgattcttccaaagaccccctctccctttgaatcattccccaatgaggatgcgttctgaatggcacgcgcctgacaccgcacaccagcggctatagcgcggttcctcacggcctcccagtggctctgcacacctcctcctctggtggaaaagctcaaattccccactctgggccaggagtcctggaagacactggggctgaaccggtcaaattcaacctaagatcaaagaaacagaggctcaaaaaatgtgaagcagatcccagcacccatccaatgttgattgtcaagatggtcctggtccctccctaaccctcctctctaccgcttctacagaggaaggcggcgagtgtagggggaggaggcacggtgggcgtcccggggcgctcagcacaatcatgctagccgcctcctcctcctcttttcctgagctctgccgccacgcccctcacctgcccgggctccccgttgccccctcacctgtctccgccctgtgccgcgcctcacctgcttgggctccccattacccaatcacctgtccctgccccgtgccgcctgctcacctgcccgggttccccgtcgccccgtctcctgccccggccccgagcccctcgccctggcggccaggcggtcacaatcgcccagggtcgcgtcaacacgcagcctccgcccgcctggcagccccgtcccgtccccgtccagcccccgtcccgtccccgtcccgtccccgtcctgcgccagcggctggagcggacctcccgtcggcggtgcccgggcctgggcgcggctctgcaggcgtcgctgcccgcgctgccgcagcctctcggccccggcgagcgaggagcggggcgcggctatgggaacccgcgggccctccgcgccggtggacaccacgcccgccaagaccatcgtggtgtaccgcaacggggacccgttctacgtgggcaagaagttcgtgctgtcgcggcgccgcgcggccaccttcgaggcgctgctggagcagctcacggagcaggtggacgtcccgttcggcgtgcgccgcctcttcacgcccacgcgtgggcaccgggtgctggggctggacgcgctgcaggcgggcggcaagtacgtggcggcgggccgcgagcgcttcaaggagctcgagtaagtgcgcccgcgccccccacgcgccctgcgcccctccccgccctcttgggtctgagcgtggtcagggccgtgccccccaggtgtcctccccaggcttccctcccggctcgggcgcccatctttcggcgtggatccagcgcagccggcgtcgggccgccccaggccacgtggtttcctgggggcgaagccgaggcagccccgcccccagggtcccttcctatggggcagggcgggccctggccggcagcgattcaggaccgccccagagacggccaggagggcgtgggggaggggcgtggggcagaaacaggggtgtggaggagggcgtgggggaggggtgtggagaggggcgtggggggcgtgggggaggggtgtggagaggggcgtgggggaggggtgtggagaggggcatgggggaggggtgtggagaggggcgtggggggcgtggggaggagtgtaggggagggggaggggggaggggcgtgggggaggggcatggggcagaaacgggtgtggaggagggcatgggggaggggtgtggagaggggcgtggggggcgtgggggaggggtgtggagaggggcgtgggggaggggtgtggagaggggcatgggggaggggtgtggagaggggcgtggggggcgtggggaggagtgtaggggagggggaggggggaggggcgtgggggggaggggcgtggggggcagggcctgggaatggggcgggttgggcagttcccatttgaaatcgctcagggtgacccctctcactctgtgtccatcacttggtcctgcgtgcattttcaagcttgcctttaattaaactattgccctcccacggtttgtgtctgtaatcccattattgcagcctgtgtctgctttctgtgatctcagctgcttttctctcctgattctctgtttccttgtaggtttacttattttttgactgtgaactactccttttgtatagctttgtgtggggacattcttcagggctgagataaaagtgagattccccagagagaatttccattttcttctttcaaatgctctccgttcaaaaatgctctgaattaaatcagcagcttgagttttgtttgttgttttttgaaaaagtagtaggatttagtatgagggctggtgtatggttccaaattcttagtggcatttgcaaagatgtgaatttaccattcagttgtttctgaagaaaagtcgtaagtcacaggcatcacagttgctaagaggtagaatctggattagcatatttcagattgaaatttattactatgataatcctgttatgtattagaattcatggacaaaattatattcctttatagccatgtgatttgtgattattttttccaagctagtcagatggtgtgaatatctagaactgacatcctacccaggatccagtgttcagtgctgatttacaattaaagaatatatctctacaaaaactgcctttaaagtccctttcgatacatatataatgaaaagtatttaattttatcccaagacattttcttgtaaaattggcctgtgttttacatgttagcaaatgaggaaggaaacgtatcaagcacctgccacgaagcctggagtgtgcctgggagatgttactctttccccttgctgtggggctggatattttctaaccagaccgtgttgtacctccagttttgtagagagagtctcgagtctcatggtttatttaaaatgttttggacatgtagcaaaaatattgagaaaaaattgagatgtttttcttcccagtgctcttactgtttattttactttttgggaggaaagaaatgtcacccactgcagagggaggggagttggggtccgtgtggcagacagcctgggttattttgcattatctattatccatgcatcttcactgctgtaaaatagatgagccatgtctgcatgtgaagttcaacatagagagcacgtggggttccttttcttcagttttttttaggtcagtgagtctgaaattggaattcagactttggtgaacaaagctctgaaaaatgtggctggattttcactggtattagtaaagtaaactagctcttggaaatttatattctgtaattgctaagccattgagcagttcaattaattttcactggaaaataatattctaattgtgtcaccagcaaatgaactttgaagtgaagcctgttgatatattagtgatccgggagctcccctcataatagtggtttcaagatggtgcattaaaaagacaaacaccaacaaatctatccaatatccagccattactcagacatttcctgcattttctggaagaaaataatttgagacccaaaggacataatttttttctttataaaacaaaatattataagataataattacttttcaaaacaatgacgtgtcatataaagcctagaattaatatttcttttgtggagaaagccacatttacaacaaaatctaaatcagggtgttgtgtatgtgtgcacgcatgtgtgtgcgtgtgtgtgtgtatgtgtttaggggagggaccccaaagaatttgaatgcttaggaatattaccctgtttactttagagcttgttgctgagacatgaatgtgaacatgctatttgaatcaaagtctcctcgttcttcctcaacccagccttttcctctcatctccctggccacccatttgtacctgggaactagccgcagatgacaggagaaagaggaaaagtgggtggagaggaagttgtgatagatgacaggaatgttggcctcagagccagagactggtggaatttaatcctggctttgtctacctgagtaacgttcagcaagtgaaataacctctccaagacttggtttcctcatccataaagcaggctggcttcacatccactctgcggtacggttgggagaatggaatgaatgcagtagggtaaggtgcctggcacggattctcatgggtggtttcttcccttcctttgttctctggaagtagccgggagggagcttgcacctcatggtcccatcactgcttcacagacctactccccgcccacctcagagcaagccaagcccacccagcaggcttctctatgtgcctgagttaaagacctcaggtcatgggctgtctgaggaactatttgtcctttctttctgtttttataagttcttgggagtgcaacattgaaataataaatagtattttgtgtttttgtaggatctttttatgctttttttctgtgttaaattttattttttggttccatgtaatgaaaatcagatgtctcatttgggagattaatgttcataaacaaatatggaatttgggaatttagaacaaatttaaaatatttatttggaaaacaggaagactagactaagctagtgaagagtgcatacaagggcctctaagcaagtggagaggctcaggctgaactcagccagcagccatgttttgttcagttcatacaattttcaaagatttgagttggctgcaacattttataattgggagaactcatgtaataatatgaacttttggtctcccttggaaaaaatagaggatttgattgttcagaggacttggttgtagctgcgtgcatctccgctatctggacctgtgaggccctgtccgcctcagaagggaaaggatggtcccaccagccacagcccccaccagtccctgagaccacccttggcgagtgccatcatttacttgaccagtttctgtggggatctgcatccgtgactctttatygaacacttagttatttcttccccttctatttaccagtctaagttgacccttctctgaatattgctgaaactatcaaaaacaataacaatctcaaatacatatttttttaatcaggaagaaaccttagtatcagatataaatttgaaggtattatttattacccatgaaaacattttatttttgaggaatatggaagtctcaaaagtccccaacagtaaaaaaaattgtgttagtagggctcagacacattttatgctggtgactcttttccagtttgcagttttggcaaaaggagaacagtgctgaatttctgtgagcaggagggagcggtgggggtgcagaggagctggaggagagtctgggtttttgttccgaccttagcctgtcatgggaacattgatgagctcgcagttctgggccttcagcgacctggttaaagaatgctgttgaattagatgatttctcaggtttctctttaataaaattacgtgagggaaagcaatgtcacttaagagacactttcaaggggcagtgccagtggtacccagtgtgaaaactgtcctacagcagcattgctattgtattctgatgtggattctaacaccgagaaaattttagatcctagttccaaattgctgtggggttgtatctattaagccggaaaaggactcgtttctaaggagtctggaactttctatgtaaatatcttccttctaatgatgttttcttctttcttcttttgcagttatattcatatagttccccgaaaacctgcaaagataaggaagttgaaggaagtaagtgtttgcttctaacaactaataatggaataaattggccaacttggtaaaaatttaaatgtcggcacg

SEQ ID NO: 93272 - DNA, 50367 bp, Homo sapiens
caggctggagtgcaatggtgcaatcttggctcactgcaacctccgcctcctgggttcaagcaactctcctgcctcagcctcctaagtagctggtattacaggtgctcaccaccactcctggctaattttttgtatttagtagagacggggtttcaccatgttggtcgggttggtcttgaactcctgacctcaggtgatccacccaccttggcctcccaaagtgctggattacaagtgtgagccatctagcccagcctgattctatatttttaatagaggactattctatttcacttttttctttctttccttctgtctttcatttattcacctaacatttatttattatttattttattttattttattttattatttttagacagagtctcgctctgtcacctgggctagagtgcaatggcaccatctcagctcactgcaacctccacctcccgagttcaagtgattctcctgcctcagcctcctgattagctgggattacaggcgtgcaccaccatgcccagctaatttttgtatttttagtagagacagggtttcaccatgttggtcaggctggtctcgaactcctgaccttgaattcacctaatatttattgaatagctactgtgtgctaggctttttctcttttaattctctttccaactccatatttcaattttgtagatgaggaaactgaagttcagggaatttaggtgatttttttccaggtctcaccgcttctatatacctgttttattttattttattttatttttgagatgtgggtctcactctgccgtccaggctggagtgccgtggtgtaatctgggctcactgcaacctctgcctcccagcctcaagtgattctcctgcctcagcctcgcaagtagctgggaccagaggtgcacaccagcacaccagctaagtttttgtatttttggtagagacagggtttctccatgttgcttaggctggtcttgacctcctgggctctggcaatccacctgcctcggccttccaaagtgcttggattacaggtgtgagtcaccgtgcccggctctatctatctatctctctgtctatctatctatctagcagatgaaatattatcttttggaaaaccaagctgagatcataatacactgctaaaaatacatacattttggtaaatattccattttggtgtttcaaattttacagtttatttaatagcaacccttaagtagatatctcacttttttttttttgagacagagttttgctcttgttgcccaggctggagtgcaatggcgccatctcagctcaccgccacctctgcctcccgggttcaagtgattctcctgcctcagcctccaaaatagctgggattacaggcatgtgccaccatacccggctaattttgtatttgtagtagagacagggtttctccacgttggtaggctggtctcaaactcctgacctcacgtgatctgcccgcctccgcctcccaaagtgctgggattacaggcctgagccaccgcgcctggccagatgtcttactttctaagttctcaacctgagtacaaattccttggtctttttcattaaggaggcagcaggagttagagaaggtgatggtgttacaaggggggaaacacatgaaggcctctatccccaaggctgcttataaaagggcagcctcccatgaggagtgaggctgtcccttgcctcctgcctctttcccaaaccttctggctgtccttttgggaaacctcttcattccttcatactttccctcctctgagctctgaaatcctttatttgtgcattcactatggcgcttatgactctctgcattgaaaaagaaacctcttctatctctattattgcactataagccattaaggacacagaatcttttgattccctagaatgtctatcacaaagtctagcacagagcagccaaataaacatattttgagcaaacatcagtttgttcttttttgaatgctgaaaacacgccagtttgcgcttaagagaatagttcaacttcagagacatccatatataaacatggagggatttcaggcaatgcccgctctgtacaggtttctgtgctcttcatctaagcctccactgtatccaactagaaggctgagaatcacagaaaaacattttcctatcattattcccgtactaaggaggcacagttgccaccataaacagcacttaccggtggcatttacagcttctcaggtgatgtggcattctgaccagatgccagaaggcttgtgacatggtacagatatgctgttctgtacactgtcacacctttcctggatcattttccttcagagctgtgtgctctgtgggttaaagattttcttttgtgttggactggtaatgaacaactccactgttggttgtattttaaaattttatgtaatttcaatcttacttgaagaacagtataaagaagttctaaataccctttaaattaactgtgttttcctccatttactttactattatttactttgcctcccaaatttctttcttgcctacccccatgtatttatgcacatatatttctttctgagccttttatttatttattttttgagacagggtctcactctgtcacccatactgcagtgtagtggcatgatcacagctcactgcagcctcaacctcctggactaaagcgatcctcctgtttcagccttgggagtagctgggtccacaggcacatactaccatgcccggttaatttttatgttttttaataaagatggggttttgccatgttgcccaggctagtctcaaattcctaggctcaagtgatcctctcgccttggcctcccaaagtgttgggcttacaggcgtaagccattgctcctcatctttctgagccatttaagaattacagacatcatattcttttacccctaaatattttagtatgtctttcctaggaacataaacattcttttacataaccacagcacaatgaccaaaatcaatttatttagtcatttgttcatatccgcaacacacatgaaatagctccagaattttttcatttgatcaaatatcttgtgtggcttttaggcatcttttataactctccttacacagattttgcacattttgcgctaaatttatacttaattttttttgttgctgttataaatgggattttctccaccatcgtgtcttctaaatgttataatgtgtgtatatgagagctattgatttctatatgttcattttataacttgctaccttactgatatggtttgtctctgtgtccccacccaaatctcaccttgaattgtaataatcttcatgtgtcaagggccagaccaggtggagataattgaatcactggcgtggtttctgccatagtgttctcgtgatagtgagttctcattagatctgtttttttttttttttttttgagacagtctcgctctgtcatccaggctggagtgcagtggtgaaatctaggctcactgcaacctccgcctcccaggtttaagcgattctcctgcctcaacctcctaagtagctgggactacaggtgcgtgccaccacacccagctaatttttgtatttttaatagagacagggtttcactatgttggccaggctgatctcaaactcttgacctcgtgatttgcccgcctcagcctccaaagtgctgggattacaggcgtgagccaccgcgcctggcagatatgatggttttgtaaggggcttccccctttgctcagcactcattctctctcctgctgccctgtgaagaggtgccttccaccaggatagtaagttgcctgaggcctctgcagccatgcagaactgtgagtcaattaaacctcttttctttataaattacccagtcttgggtatctcttgatagcagtgtgaaaacggactaatacactaaccaaaatttttctgtggtttgttagtcttattgttgactctcaagggctttccaggtattctctcttgtcatttgcaagtcgaagtagttttatgactttttaaaattcttaaaaaataattttttaattcttatatattttttctaatttataagcctcttaggatttctgttgtctaacttcattagctgatacctttggtgtaatgtcaaaaaatcataggtagtgtgaacatcgttgccttgttttcttcaatcagctcttaaaagaccatgtatataaaaagtatttcgaaggacagaaataactctagtgttagacatttctggacatttagctggcaagatgagattatggcccctcttatgcctagtaaccagaataacaaacaaatgaaacttcagcaaaaaagggtaaaagtacaaatgtgattttatagtagttcattaaaaacattgagctggacctcagttctatcttttttctttaaaggattgctaactaataattttgctctttactcagtcattcatctatgacttatagaatgcctataatattccagacattatcttaggttctttctcattttttactatacccatgtgaaataggtattagcttcatttcataaaaggacattggagtttggagtggttaaatgacttacccaaagtcacacagttagtaagcgtagactgattttgaatctgggtctcctagtttgaattaataagtgctcaataataaataataactaaaggttatttagtgtttactgttttacatacttcatttatatcgattggtttaatacaaccaccaaatggcattttcatctttattgtctgttttttatagatgagaaaactgatagcacaagtagcttgccaaagatcacaagcaataaagctgaaattgtcttcagatcccatgattaagaaaccaatcactacactataaaccaatcactacactattcttctttcaaagaaacgaaggaagttctaggatcatgagagatggagagtattcaatctcctgaatgtaaatctaccagcattacttaccaagtttaagtttttctgttgttacttgaggcagtgggtgattatgcaattggtaaagggaatgaaaaggcctttgcacccaagaaagtagaagaaaggcgcctgaatctctttatgataggtggtatgttaaatctaggtattttcgtatttcaacatattccacttcttgcaaaagctgcaaaatgcaacacaactttaaatgtaaacatagcttccaagggcacagtgctgaacatataataacctgtgtgtgcacacccacactaggttatgtaacaggactgtaaacactggtcctggaatggcctgggaggtcatctaggtcctccaccatctttctgcagagtactgaggcctagcgacgttaagtctgcaaactcacaaagatgaccccgggcttatactaccttaggttacctactacctttgcttgcatttcctctctcctttcctgtctgtttgtgcaaaagaaaaaaggcctggcttcgccttcttgggagccaaaacacaaccaaacagagagcgagtttggagcccggccaggcatcttgtgaactgcacacaaaataactagcccaaggtcagagagcgcgccaggcccgccctgaaagtttctccgcaggaaaatccaccgccctttcccaaccacccgcgtgggtggctcggaaatccgccaccctggggacacagctccctgcccatctctgtggcccgcttgtgccccgtgccgctgggccgactaagagcctcgggctcgcacctcccagtacaacctagggacgtcaggggtcctgggacccacgagccgctctctgccggccggctcctggcccctcctagcagacccaaccgacatccttcaccctcagttagtgcgcaggagggaccgggacgccagccgactgcgctccagaactattcccattgggccagagaatgagtgacgcactaggccccgccccggcccggtgggttactcctttcatgcccggcccccatccctagccccgccccggcgccccgggccgcggccgcctccgcgtccgcgtcgtcgtctgtgctcccggcgctgacgtgtctgggcggtcggcttccactccttcaggcgtcggcagccactagtcgtggcgagaggggcggggtggccggggctggcgctccacttggcccccgctcccggcccgccccgccgccgcggccccccgcatgagggtatatattcggagcgagcgcgggacgccgatgagtggccgcgcggaaggagctggagacggtcgtagctgcggtcgcgccgagaaaggtgaggggctcccagcccagcgaggagacggcggggctcgggacccgggcgggcggagggcctggccccaccgcacacacggccacgcgctcagacgtggacacgcgtcgcacgaacgtgcacagcgcgggcagccgagcacacgccgaggagcctcccgctcgcccgcagacacacaccccagcccgtgcgccccgcagtcgcaccccatcctccgccaccccgcgagagggtgtgtgggctgggcagccgggtggatggcggggccagggatggaatgagcgcgccccagatggactgggggcgttgtgggaggaggtctgggccagtgtctgagtccgagggggtcgtgtaggcgtgtggggttgggagtggggcctctcccgggtgggcagtagagacctcgaggctctcaggctaggrccttgtggacagttataccaagtgtgggggcctgtagtgggacaggagatcgttggcactgtcaggtggaagcgagttggtgtgtcttgaatatatgaggaaaagatttgagaggtctgacaaagacaggggatacatttggaggacaggacagtgggacaaaacctgtttgcttgccacttttttctttcttttttttggtttggtttgccatgatactggtagtgagagagaattgaaatttctgggtttcccctctcttggccaagcagaaggatggtattggagggctgagcacacgtatgctgaacatatggctgcttgaactttggcctgtcgctgtgctacacttacttctacatggtttatgaaatctgaaatcaggtaataggattatgatcatatgtgtgtgtcatttggtattgcaaaagtttaaggacttttaggtgaaattcactgggtgtggatccaagagttcgccggaaactcaaggcagttgtctattccttcacggttagtcagttggctcacttagctggagcaaagaaagacttcataggctgtgctgccaagcatttataggattcagttggtggttatgtctcaactctgatactgtttttcaaaagctttaagaggtttacttattcatttcgagggcatacgtataccagcagagataggggctgggtgggggaagccagaaaaggagggagaaatactggatttctttaatactggtatttaaattctaataaaaatatatttgataatggtagattattaccaaatttttcatatattttgatgcagatggattaggctgtgggcatgtaccaagttttgtcataatttctcgagcagattttcaactttttcagatttcggttgtcaaaataaaaatccatatcttttaactcttctgttaattgctgcttaccattacacgtgcctctaaacatcgttaatgggaaacatgctactatttttgtggcatgaaggtgcttatatctgcctcaaataaatataatagatgaattgtgcttgtccaaaactcaagtatggtcgttacattatgaacattatacaacatgtagatgaacacatgttaccagtggtttacgcccagatatcaaagtttaacctatgaggtacccttttttttttwatttttattttttgagacggagagtctcactctgtcgccaggctggagttcagtggcgtgatgtcggcttactacaacctccgcctccccggttcaggcgattctcctgcctcagcctcctgagtagctgggactacaggcgcgtgccaccatgcccagctaatttttgtatttttagtggagatggggtttcaccatgttggccagaatggtctccatctcttgacctcatgatccgcccgcctcggcctcccaaagtactggaattacaggcgtgagccaccgcgcccggccctatgaggtatcttatttgcatggattcattttcccaagtgtctgaaggtggaggagtatctaatgatcttttaggaaaagtttggtttatatcttaaaatgttatagtaatatgtttgtgtatgccttttatcagacagagcactctttactcttgactatcttgaaggcatgtgagaaaggttggttgtcttatattcatgaggaaatctatgcacagggaggtaaaatgattgcatagaatcaaatgatagagaaggaccaagaacagggacttcctattctttggttatctggttccttgctgatcttcctactacaatgtactcccttaaatcagaggcaaagcagcagcataaataaggtcttgggaaagactacattccttggaaaataatttaatataaatctgttcctctcaagtgtcttttttaatgtgattttttaaaattaaaaaataatagcatcatgactcttgaaacctatataaatcaataggaatgccttttaataccataatgaacattgaaagctgagtgttgttattaccacctcagggaacacacagatgtaggttctctagacctgagcttgtaaatggagtttgatgtttaatgatcctggtgaggtagatactattattaatctcattttacagataaggtaaccgaggcatggggaaattaagtggctcagcttagcctagaattgtgctctgaactaccatgtgtattacttttcactgttcttataggaagagaagataagtgtctttagaacctacttttaacctctgtctctcacatcgaagcaattataatgcagtgatgattctttacagtgaccctcaaatttattcctttcactctcattttctctgccactaatctggttcagacctttggtatttcatacctgcagttgtcttttaacttcttttcctgcttctagttgtccctccttacaatctattgtatccattgctcctttctctcatctctttaaagcatggtaacactgccctgtttgagaatctactgttcgctttctattacttattctctgaagtctaaattcttttggttagttttcaggcttttcatgatctagccctaccccaggccattttatatcatttgtcatacgttaaccttcttactgctttccatcccacacgtgcttgctcatcatggccaccaggctctgcttgtttcctaatcttttatttttttgagatagaatttcctgttgctgaggctggagtgacatgattacgcctcattgtagcctcgaccttccgaattcaggtgttcctcccacctcagccttccaagtagctgggactacaggcatatgttaccacatctggctaatttttgtgttttttgtaggggtggggttttgccatgttgcccaggttggtcttgaactcctgagcccaggcctgtgctgggattacaggtgtgagctaccatgcctggcctctaatcttatctatgtagtctgcccaacccttaacacatggctagattgtgcctgtttgtgaactttctagacagcacctatctcctgttgcatttgtctgtattgggcaagtagattaaatatttccccattttcttattttttagcactatgaagtttaacattttactatattatcacagaatatagctctttagaaaacatttgtcttattcactgattgttatatgtgtattgcttgtctctttaaggaggatccaagtttttartgagtagagaaaatagatgtgttattgcttctttgcagaagttgctaatgaaatgaaatgtatttttccttattataggttgttctgtcttcctgaatatttcattatactgactacaacaacacatgatagtatttctatcattagagatacaaggaaaacatttaaatattaagcagtcaggtgttctttcagtggtagcttagtggtcagaggactaatacagagacaactaagtgtggtrgagagtgtgaaccatgtcatcaggctgcctgggttcctgtcccagctccactcacyggttaggttacttagcctctctgcctgtcttctcagctgtaaaagagtggtaataatagtgcctatgccatagtgttgttgaaaattaaacaagaccatgaaggtaaagtacttagaagtgcctggtacatattattgtcttacaggtttgatctcttacaaatattgagtgatggaaaagcagaagttaatttttttaacatcgttttgaaatattcttatttttagaggggaaaaaagccctcaattttggaggttggattttgacatgccrttaattacttttctcttttaggtttacaggtacatacattacacccctatttctacaaagcttggctattagagcattatgaacattaatgacctcaaactcacgttgtccaaagctgggcaagagcacctactacgtttctggaatgagcttgaagaagcccaacaggtagaactttatgcagagctccaggccatgaactttgaggagctgaacttctttttccaaaaggccattgaaggttttaaccagtcttctcaccaaaagaatgtggatgcacgaatggaacctgtgcctcgagaggtattaggcagtgctacaagggatcaagatcagctccaggcctgggaaagtgaaggtactgggcatgtacatatttcttactgaagtttatttgagatatactaaaattgttcaggtagctggatcatgtcactaatattttgattcatactacattaaaccaggtgacctagcagaaagtgacaaaattgtctttttatttttgatgctccatttaaggcttctctcattcaagtcttaatttgcctccagtctctttccctcctcaatttccatacttctgctagatttcttttcctgaagcacaagttaaatacttaagtttaagctggcttaattttttttttttttaagacagagtctcactctgttgcccaggctggagtgcagtggggcgatctctgcttactgcaacctccacctcctgggctcaagtgattctcctgcctcagcctcccaagtagctgggattataggcatgcactaccacgcctggctaatttttgtatttttagtatagatagggtttcgccatgttggccagcatggtcttgaactcctgacctcaagtgatttcgcctgccttggcctcccaaagtgttggggttacaggtgtgagccactgcacccagcccagctggcttaatctttaaacctgccctaacctgatcctaacccatatttccaatcaacattttagctgaaccaaataattcacctttccctgaacatgataccatgccttccctgcttttgctcatgtttatccttagcttgatgtgccctttgccctttctctacctagctaggtcaccttgtaaggtcatttcttgcagttgtgcagtgcagtagttctgccagttggggaacttacactcattcattaaggtttaccacacataatattttatctatgaccttttcttttgtgtcccaagttagaattagttgttcatgcttttatttcattctagcttatcataagagttcttcctcaataaattgtaaattcttgaagaacagcccatgtactagttgtctctgcatgttacgtagcatttagaacaagagttttatagttataagttgatcaataagtgtttgttgaattgccccaatgcttttcattctaaagcatgtaaaaaaatctttccccttaacctaatactaatttgtgcttttgagaatggcaaaatagctcaactgtagcttttggtggagttgaaagctgtgttttttataatctattactcctctgtaagtaaaatgttgactaaatattgtagctgattccctcagtgttggtacatgatccttgtcaaatctgggcctcattttctcaactgtgaatgagaacttgggcaaatactttccttagctttttaagacattattttattgcaaaaataatattgaaataacagattgcccataatctcatcaaagctatatttttatttgctcacattaccacccagtacttgattgtgtacatatttttttgtttctttgtggttttttttgagacagcctcgctttgttgcccaggctggagtgcagtggtgtgatcctcactcactgcaacttcgcctcttaggcttaagcaatactcctgcctcagcttcccgagtagctgggattacaggtkcgtaccaccatgcccggctaagtttttggtatttttagtagagatggggtttcaccatgttggccagactggtctcgaactcctgacctcaagtgatccgcccacctgggcttctccaagtactgcgattacaggtatgagccaccgtgcccgggcagattgtatatatatttgatttcatagatgtgtagtaatactatacatacaatcttatagtctatatttacaacatggctatttttattttgttttccactctttggcatccccttaccccctgtaaaaagaaagattactggcattatcaacctgctgtatacctctctctgtctttctccaggctgacaaatttactgattttcaaagggtgttccaaagaacccaagggttttcactgttggggaagctgcctcttatagggagggagggagcagatactaaactggtaggtctccaacccctttatcctctactatgagtagttctgcctttttctgttctgtgtgtttgatctttacatgaggttttatttaaaagagtttagaagtttaaaaacagtttgaaaataattggatcttcttcaaggaggtgcttttcagatgtaaaatgcttggtagtagctaacctagctttttacttaggatagggctctgccactaagatgtgagagaatgatgcctaggtatgtccttgtgaatgaagagtttgataccatgacttctattactttggattcactaatccttcccttcttccctgggtttcaaaaaggctactattccaaaccaaaagccacacaggcctttctttaccctctagtatcccagttgcctatatttttcctggggattttaaggggatgaagtcttagtagtaactcttatggaaagtcaacactttgaccttgttggggaacataagccacaattaaggtatcctataatttgagtcttctttatgtcctttttgttggactatgtggagctagtctacatttatgacttttcatgtaaactaaaatccggaactattagaaccaagtatagcataacacggtgcaaacttccttttggcttagtgtcaaaggaaagatatttatctgtagcttaaacagtaagggtggagaaggagactttatgttgacattatatccttttcacttagccagaaactaccgtgtgtctgcaaattcataacaaaatgaagtttctgcagtaagttatcaaagcgaagagaagccattgtgaagatcatggcattgtatttcaggtagtaggaagatcctggtaattgtatcagggacagtttttacttccccacacccccacctcctcagaatgggggaatgaaagcattgtccagtaattgcaaagtatctggtggttattcagatgataatggacatttttacaactggagtggaaaattatttatttctgaaggtcgaatataagtgaccactgtactccttgttgaagagagatcttgctttatttcttgaagttttctgggcagttgtagaaaatggaatgtaaaggagcaactagaaaatctttattttacaaagctgagatcttgaaagagaagtaattataagctttgagaatgctgtattagtaaagatacactgggaaaacctgtttgcttgataaaaattcccattctttattaaaacaaatgcatgcttatttgaacacagatctaccaattttatattacaatatctaattagtattcagtcttagctttttttgcctatgagacattttcctattaatcataatggtgcttctctaccatatagcactatagtaaagtaagtggattatttagaagaaatgcattcttaacattatctcctctacattttttgaaatctagggtactgatgtttttaatagatttgttttattttaaaagtaatacagccgggcatggtggctcatgcctgtaatcccagcactttgggaggccaaggcaggaggatcatgaggtcaggagatcgagaccatcctggctaacacgatgaaaccccgtctgtactaaaaatacaaaaaattagccaggtgtggtggcaggtgcttgtagtcccagctactcgggaggctgaggcaggaggatggtgtaaacccaggaggcggagcttgcagtgagccaagatcgtgccactgtactccagcctggttgacagagcgagactccgtctcaaaaaaaaaaaaaaaatacttattttagagaaattggaaaatactaaaaattacaaaggaaaaaatactaatctctctgattccaccatacagagatactcactagtaatattttacagtcttttctttmacacacacacatatgcatatattgggattgtgtatagttttgtagcctgcacaagaatttatcatgaaaaatgtcaaggatattttgaaacaaatatttagtggcaaatttagtatagtgaacccccacataagcccccttgattaaaaattatgaaagttttgctccttttgctttctctctccctcttttttttcccctttgctgcagtattttaaggcaaatcccaaacatcatgttatttttatcctcatatagtttggtatctatgtctaaatatatgggtgttttcttactaatcacatgccattattatacctaatgaaattcatctaatgtaatctctgctatcaaaaactggttcagatagagattttcctgattagtctgctttttgtgcttactattttggggaaatattgtagtttctttcagctataacgtgattaaaaattaaagacttaaattattctctctaactttcttggatagctttcctttattcctaccagttgagtagcctgtttacccaactccactcatcctggagttctgataatttaaatgaaagttctgacagtgctttacttcaaaaggacctgtgctatcttccttgttaaagtgtataggaggaactagtctaagtaggaagttatccaggaagcatttgacctctgacaggccactgtaaacttttctctctgtttcttgtgaatgttatcagaaaaagtgcttagattctcttgggcccacaatgcatgactctccaaggagagagatactccagccctagaaatgtgtcagtctggctttctttttttttttttttttctaacttctgatttttttgtttgtttgtttgttttttgaggcggagtctcactccgttgcccaggctggagtgcaatggcatgatctcggctcactgcaacctctgcctcccaggttcaagccattctcctgtctcagcctccccagtagctgagattataggcgcctgccaccacacccagccaatttttgtatttttagtagagacgggggtttcaacatgttggcccggctggtcttgaactcctgacckcaagtgatttgcctgccttggcctcccaagtgctggaattacaggtgtgagccactgcacctggccgctttttaaaatttcaatttcagttttgcctgtgttgagttcccttgtgtaggaaaattattaacccttatgtcttatcatggagagatagaaagggtgatacagtgttgaacttttcagtgtttttcagtatttctgcagaggtagctttaggatagaaatttataatttcctaattgtcacatgggtttaaatacatttatatttagttaacatttttcaggtaggtgctgtgctgcccatataaaatttatgttatgacaaaagcagtcccaaaaagcttattgaattttattgggccacttaattcaaaacagcattttatctgtcatcataagacagatactaatttatgtgttacatacttttgataaacattgcaactttatcgtagtaacagctgaagtagatgagtactgagtacttcagccagtgtacacacaatttgatactgtgaacaatagctgtagctgcatttcatttgtgaattacagctggccttgattctccaggaactgctgccttttctcttgtttttcactgtttgctcataagtgagatgtgtaaacaggaagaagttaatgaaaagcctttttattgcaaatatatgtggattgtgttataattcattataatagttgtggttaaatagagatgagatgtaaatggatatctacctggtagtgtacatctgattggcatcatctcagtgccactgttaattggtgacttgactggttatcaggttcggagatggaaagaagcactaaagagcgaacaggagtttaggaaacaaacacatgccatttatctgaataaagaatgaggccactgtgagctgctggttagcaaaactttaaatgtgaaacaactggagagtaggaatgaagcagtaatttagggaacccatctaaggaagagaaaagtttatacagggctattttcatacctggttagacctatagaaagcactgaattgatgttgaatgccatcaggtgagcaggagctgagacatggagctggctctgggagtgtagcttttacctttttcaggtcagttagctgagggaaataactttcctgggactgagagtgaaagtaagaagtcaggaagaaggttggcaccatgttaagagtaaaacaacttaaaacacatgtgccatatgaagaaaatgtactgtataaaaagaacagagatctctgtgtccaaaatgtaggtatttggcacttcttttgaagatgttcagaaatattttttattataacacctttgatggtatgcaagtgtccagacaggagttctttatctgcatttcgaaaatggtacaaaacctgacctgaatagacatgactatttgtcaactttatttatcccacttaatgtgattatagggtgctgtttcatatctgctggggacatatataattataatatagcattttatatatgtactatagtccttttataaattttgaagagttctgcgttctgaaacaaatctgacccatgggtttaggtaagagattgtggactcatattttaaaacaatgctttgtaggtgacagcagaattaaatttattttctagaaaccatagtttatttgatataattcagggaataaccaaatataaaacagttttcaaatgtcttgaaaggttccctgttccctttaaatttcttcatctcagtttttgttatatagtggtttatgggtcttgcttaaggcacatacaaactcagaatggctgttaaaaatttcagtgtttgggaagttttggagaatgttggctcttcttgctcaacagttttttcatttaggatggtgggtaagacagactaaaaaaaaaaggcagcacaacctctggtggcagggtggtgtggtggtgaagaggccctggagtcaggtcctaatcctgattcacatttactagctatgtgaccctgggcgagrctcttaacttctctgagttcattatctctaaagtggtgaaaattacacagtaactgcctcttagattatagttactattttgggttctattttggtacacctgattttatgttcttattttcaaactctgatgaggtacaattaaatgctatggagttaatgaggacaattctggttttagggaaggaagaaagaagatttaactctcaggtagctaaggtcagcttcatatcaaaggtgaaaattatgaaaatacataatgtgctgttgggtttttaaattgaaaaaatagcaggaataggctgggcagggtggctcatatctgtaatcccagcactttgggaggctgaggtgggcagatcacttgagcccaggagttcgagaccagcctgggcaacatggtgagacccctgtctactaaaaatacaaaaattagctaagtgcgctggtgtgcacctgtagtctcagctgcataggaggctggggtgggaggatcactcgaacccaggaggcagaggttgcagtaagccaaggttgtgccactgcactccagcctgggtgacagtgtgagactctgtctcaaaaaaaaaaagaagaaatagctggaatgattgctgaataatgttcttggactatacttactaataaaggaaaaatagagtcagaactggctctaaatttataatggagttatttttttcttttcttttctttttttttttttttttgagacggagtctcactttgttgcccaagctggaatgcagtggcacgatctcagctcactgcagcctccgcctcctgggttcaagcagttcatctgcctcagcctcctgagcagctgggattacaggcatgcaccaccacacccagctaatttttgtattttcagtagagacggggtttcaccatgttggccaggctggtcttgaactcctgacctcaggtgatttacccaccttggccttccaaagtgttgagattacaggtgtgagccactgcacctggccgggtttatttttctttatgttgttgacctactagtgtattagctttaagaaaacccaatatgtcaaaaacaaagcacaaagttggtaaatgaaataaacccacattacctaaggattttaaaataattgatagttgccatcactgactgcgtcgtctggcttagcctataattgtggccagtggccaggtttgttcacagaatttctaagaattctaatgaaagtatgaaactcagaaaacaagaacgaaactgtttaccatggttttaattttatagtttttctagcttgccagagacccaatttccacatagcctcttctcacaagctactctgccttatggtactgagactgtccacttttgaataataagatgggtcttaggaatggattatggcaagatttttttttttttaattcagactgagagctcttttgtagcttttatagttacatttatttgcatttggatctcaaatcatcttgaatttattttggtttgaagaataacatttttattcaaacattatgcttgatgactatttattgctgaatattcaactggcaaaaattgacaggcttccagaccaaagaaataaatcagtaatgaagatagtctgagtcttacattcttcttagctggtatagatggcccattttttaaaaaggcattttatttatttatttatttttgagacagagtcccgctgtgttgcccaggctagggtgcagtggcacgatctcagctcactgcagcctccgtctcccaggttcaagtgattctcctgcctcagcctcctgagtagctgggattacaggtgcttgccaccgtgcctggctaatttttgtatttttagtagagatgggatttcgccatgttggtcaggctggtcttgaactcctgacctcgggtaatcctcccgccttggccttccaaagtgctgggattacaggcgtgagccactgtgcccagcctacaaaaggcgttttaataaattaatatatatttacatataataaaatgcattagttgtaccttttgattttgttttgtttttgagaaagagttttactgtcacccaggctggagtgcagtggtgcagtcttagctcactgcaacctctgcctcctaggttcaagcaattctcatgcctcagcctcctgagtagctgggattacaggcatgcaccaccatgcctggctaatttttgtatttttagtagagatggagtttcgccatgttggccagcctggtgtggtctggaactcctggcttcatgtgatctgcctgtctcgtagttttatgtttttgtattttgttttttttttttgagtctcgctctgtcacccaggctggagtgcagtggcgcgatctcggctcactgcaacctccgccttctgggttcaagcaattctyctgtttcagcctacaggtgtgtgccaccatgcctggctaatttttatatttttagtagagacaggtttcgctatgttggccagactgctctcaaactcctgacctcaggtgatccacctgccgcggcctcccaaagtgctggagtgagccactgtccagccaattttatgttttaacaaatgtatactcaygtarctaccatcccaatcaacataagcacatttccatcaccatacaaagacttctgatgccctttgcaggtgataccccaagcgcattctgttgagttgggtttcaaaccagaaatcctaacttcagagcctgagttctcgcccattatactttactactttcctaactgaagatttattttctttatgtagcttacctgctatatttgcatgctcattgattatttattataggctggaggtaatttgatagtgtcatcattcatcccgaaactttggtattttctttactctgtcttttttttgacttgccacatcaattagtcatcaaatttttgcgaaacatttattatatctctcggtycttacctcctgacattatcagcaaaaaatatttagttcactaaaatgcatcgttcattgtttggtgttcggttgggttatataaatttaattgttttaataatagaaatgtttttattagcaaggtagtcatccacgattctatgtagattctgtattctctgtgccttacgttgataagcccctatcttgttatttcagtcccatgtgatcaataaaagcagcaagcaggctttggtccaagccagattctccaccactagcctgtacccmaaatcagcaaatggcctcaggacaagacagctgtatagccttacttcctttttgatgagtctttgctgctacctatgtatatttaatactaaagtgttgaattgtagaggttttgtgatacaagtgttttcttttctaggacttttccagatttctcagaataaagtagcagttcttcttctagctggtgggcaggggacaagactcggcgttgcatatcctaaggggatgtatgatgttggtttgccatcccgtaagacactttttcagattcaagcagagcgtatcctgaagctacagcaggttgctgaaaaatattatggcaacaaatgcattattccatggtaagataygtctcattattggagtgtgtctgaacatatattgttttataatattcaaaatgcatatatactttatgcactcacagacatayttcttgttactgttgattttcttgggaggtataatttactatatatgttaaaagtgctatatattattgcttgatagatgaccactattgacttaataagcaatatatactcaccgccaacttttacattcctgactgagtaccttaaagtactcagtgagctctctgcatctagaaactcatattttcaggtaccaggttatttagctctcccacacccatgcgcctcttccgcatacacaccaggtgaaagctgcactgacttctgtgctatgggccatacttgtgtcctcagcctctactagtatgctgtattctcaggttctcaggggctccaccttggtcagtgttagttccttccctttttttttttttttttttttttttttttttgagacagggtctgtctcggtcacccaggctggagtgcagtagtgcagtcttagctgaccgtcacctttgccttctggtctcaagccatcctcctacctcagcctccccagtagctgggaatacaggcacctgccaccatgcctggctaatttttttttctttttgagagggagtcttactttgtccccaggctggagtgcagtggcgcgatttcggcccactgcaacccctgcctcccgggttcaagcggttctcctgcctcagcctcctgagtagctggcattacaggcacacaccaccacacctggctaatttttgtatttttagtagagatggagtttcaccatgttggtcaagctggtcttgaactcctgaccttgtgatctgcccgtctcagcatctcaaagtgctgagattacaggcatgagccaccgcacccggctatttttttttgttttttttatagagacagggttctggtctcaaattcctgagctcaagtgagctgcccccctcgacctcccaaaatgctgagattacaggtgtgagccactatgtccagccagtgttagtttcctaaggaccaagagattacagaagatcctgctctgctttttataagtttttggttcagctctttagtctctttccccgagcagttttggaagttagcatgttttgaggggaaaatcagctgtgtgtttgaggtcccccaagtccctatcttgttatttcagtcccatgtgatcaacaaaagctctactagtttctgtccccgagcagcagcctttggtccaagccatattcaccactagcctgtaccccaagtcagcaggtgccctcaggacaaggcagctgtatagcctcagttcccttttgaaagattctgtctctggacttacaatctattttgcctctgaagttctctgatgcctttaaaaaactgctttttgtaattttcgtagctcttctagctcttctcaccacgagtactggcctgctgtgaactgttttgttcatcttgatgcctgtggggaatttggaggaacatctgtgttctaagtggccaacattctacttacagccctggcctcctactatcatgttgaattttcttctctctctttcttccatctcttcacaactcaatttctgttcttatgcagagaagtttagccacttcttctgtcatcttctaaatatatccaaaccttttgtacctaaagttcaaaatatccaggataatttgttaaacagacagatacctcctgtggtatgaaattataccattttgtttattcatttaacaaatattaattgagtgtctttttctaggtattgaggataaatcagtaacccaaacaggcaaaaatcccttcttatatgtagtttacattctagtaagggcaaaagctaccacagtcactaattatagttttagaaataatttttttcttttttgccacactagcatgggttggatttttgtgacaacagaaagtataattatacttttatgatttttaaatggagggttagcagagcccagactgcatttcagatttcaataaaaagawccccaagagatcattaaactgtattgcagttacccttttcttcctgtttattcagaataggcatttcaaatttaaaatacactttcacagagttctaaaatgtttacttaagccattttataggttctcttgaaggaggtgtgtttagtatgtttaatattgtaagtagatttatttcatacgtaagagttgatgaaattactgaaagaaattccccttgggtaacagctaatgaatgtgtcttacccaggaaaaatatgaaggaagtcaaaataataagcaagtgctttcaaagatatctttagcttaggaaatagacgaaactttattttgccctagtccacctagcacggttgcttagaagatctgattttctcttgtaaggtatataatgaccagtggcagaacaatggaatctacaaaggagttcttcaccaagcacaagtactttggtttaaaaaaagagaatgtaatcttttttcagcaaggaatgctccccgccatgagttttgatgggaaaattattttggaagagaagaacaaagtttctatggctccaggtttgtaatcatccttatttaatggtgactagaaaggataacaacataaatcatcaaatgttgattttctttttaacatggtgattttgatatttaaacattaatatatatgtgttttttgcagcttggaaatgatttaaaaagatgaaaatgcccgttggtgtaatggatacacttttatgcttgttgtgggtgtctgctctatggagcaatttgaggagcattcagggtattctttctctataacaagtattttattttttattttttacaatttttgagacagagtctcactctgttgcccaggctggagtacagtggcgcaatctcggctcactgcaacctctgcctactgggttcaagtgattctcctgcctcagcctcctgagtagctgggattacaggcacgcgccaccatgcccagctaagtttttgtatttttttgtagagaagggctttcgccatgttggctaggctggtctcaaactcctgacctcaaatgatgtacctgccttggcctcccaaagtgctggaattacagccgtgagccaccgcgcccagccatatagcaaatattttatgtatactgcaatgttcatggctacattgtttattatagtgaaaacttggaaaccatatgctatttaataaatgagaggctaaattatagtttaaaaatagcattaattcttaaatagcattaaaataattggtggcattaaattctaaacattatttcagcaagttaagtaagagaatgcaaaatgaaaaactgcatacagtctatgattagggccactgctttgcacaattccaggtagtgcatacacatcatggtttgttaatgggacccactagaattggacagtgtattgcctgtgtagccacattcagtgaccctgagtacaacctcagtctataaaaatagacctactgacagatttatgtttatgagaatctgtacttggaggaaaggctgaaaagaaattaatagtattaacagtggtgctctctagatgtaggcttttatttcatcttaattattttggttaatggaagagttactattcttagctgtattttgtgaagttgtctaatttttcatcacttaagctatggttaaggttgttattggacaaagtacattaaagcagcattataaatagatggagaaagaagaggctttatttatatctcgtttaaatcaccttaggcctccatatcaatctgtttttttaacaaatgatttgatacaaaatacttacgtatttttgagatgggtgaaattgtcagcattggggttataaatacagagctaacttgaatcatacaaatgttaatgaaacttgaaatgttatgaaataatcattgcctgataaaggattttatatcatacaatatattactaaaaggggctgagttaaaaagaaagatatggtttttggggttgcctgatcttacattgatagtgttattctctggatagttaatgctaagtaaccttcaaaatcctatagttcaatttttttgacacctgattccttccttatggatattcagttttcttgcctttgtaaagcgaattttgttttttagggatcttaaccctagtttggaaacaatctttgtgttacctttatgatggattttgatatgctactaatgggctattttgttttccagatgggaatggtggtctttatcgggcacttgcagcccagaatattgtggaggatatggagcaaagaggcatttggagcattcatgtctattgtgttgacaacatattagtaaaagtggcagacccacggttcattggattttgcattcagaaaggagcagactgtggagcaaaggtaatgcctttctcaactatggtgaggcttttgatggtcttgctctgtcatatacgcattccagaagtcaaaccaagtttattagggtgatttgaatattttagaaccatttatctctctaaagtaactaaacggtcccacacccactttttttcttaaattggcaagacttgattctagatgtaatgttgtatacttatcacaggtaagagtttaaactatgtgaggaggatttgtaagtacttcggaaagtggtcatcactagacctgggttggattcattaatatcaaattgtgttcaatcagattaacccaacttttttcctgtgacaaagttattggagtaggtaaggaaaatgtggwagaaataacagatttagacttcctaagtcaggtgacaaggtatcttacgatgttctttcgaataagatagaaatatgcaagttgggcataaggacaattaaagaggtgaataactgcttgaatgaccacacacagactgatactaagttggagggaggtttgtaatgataygtaatgagtctgttcttggcattgtacttttcaacacgtttttagttgtataggtgatggcatgtctttatggtagcaaaaaatatatatattatagctagaaataaaatagacagcaaacatgcaaacctttaaaaacactttggaagacctaaaaatactgatataaacattactagaagtctgtataggtatccattctcatcaaaaacagtgtaataaaagcccagtcaaaatctcagtgagactattttggggacacttgacagaatgattgcaaagtttagaataaacatgtaaaggtggccaggaaaatgttgaaaaaggatgaagataagggaggaaagggggccgaagaccatctatcaagcattaaaaggaattgtaaattaaaagagtgtggtactggaaccagaatagaatgacagattaatgaaaatagagtaggtcagtcagaaacacatctgtgtatgtataagaagaacacattttataaaatatggcattttgactcagtggaggaaatgaatgaaataactggctaacaataaagtaagatctctctgtcaaagctcatacaaatatcagttttaggtggattacacagttaaatatttaaaaatgaaatcataaaggtattagaagaaaattagaagaattttataattgtgatgcaaaaggaagacctttctactgaaagcagtaaccatataggcttctgacaaaaacaaattcgatttcaaattattttgaaatatctgtatttaaaaagaagatctgccaaagaagttatttctctcaaagttaatctagaaattttatgcaaagtctcattggaagccgaaatcttaaatttactgatacaagttttgagagattaagctgatagacctaataagcctcctctggactctgaaaataagtgttggtttagttcagttatttaagacttctatctgttccaatactctgtgagtatctgaactgtattttttttttttttagccacagactcactatgtcatctaggctggtgtgcagtggcaggatctcggctcactgcaacctttgcctcctgggttcagtgattctcctgcctcaccctccccagtagctgggattataggcacacgccttccacttggtgtcactcttttttttttttttttttttttttgagacgcagtcttgcactgtcgcctgggccagagtgcagtggcatgatcttggctcactgcaacctccgtctcccaggttcaagcaattctcctgcctcagcctcctgagtagctgggattataggcacccaccaccaggcccagataatttttttgtatttttagtacagacggggtttcactatgttggccaggctggtctcgaacgcctgacctcatgatccacacacctcagcctcccaaagtgctgggattacaggcgtgagccaccgtgcccagctggtgtcactcttttttcctaaaatagaaacttaaaattgtactgttacgagcttcagaaccaatttaaactttatgcaatcagagagtgttcaacctggaagggaccccagagatcatctggtcaacccctttgatctcagaaatgagaatcctgagttctagtactttgtttgtttatttatttatttatttatttgacagggtctggctctgttgcctaggctggattgcagtgatgtgatcttggctcactgcaacttctgcctccaggctcagcaattctcctgcctcagcctctggagtagctggtaccacaggcgtgcaccaccacacctggttaatttttctgggtctttttgtatttttagtagagacagggtttcactgtgttgcctaggctggtcttgaacttctgacctcaggtgatctacctgctttggcctcccaaagtgctgggattacaggcgtgagccactgcacccggccagagttctagtactttataagactcaggctcaaggttctttatcacattaacagagccaggattagagttcatgtttcccaacttcctagtcttatattatattacattatagaaccatactcttcagattagtttttgctgacagttcaaaaatctttaaactggtgtgctaacttttgtgagtacactaatcatgcaaagatgcaagtgttaagtcactcctctccattacctgtgggctctgtaggataaatccagactcagtcttccttgcaaagacactcactgtttagtcctgtgtctggcatgtaatgtagtagtcattcagtgaatgaataagtaaatattcagatggaaccaaaacatgactagactggcatatattaaaatcttttagaaatgttagaagccgtttacataattgctcccctgcccttttaaaataagaaaatcaaagcattaaaatatgtatcttaaagcacctaagttaggggatgattcatactgtggtagtagaattatttgcagtactttatttttattgtatttatttattctgagacaggatctcactctgccacccaggctggatatgcagtggcattatcatggcttcactgcagcctcgacctcctgggttcaggtgatcctctcacctcagcctcctgagtagctgagactacaggcacccagcaccatgcctggctaatttttgtattttttgtagaggtggggttttgctacattgcccaggctggtcttgaaatcctgggctcaggtgatctgcctgcctgagccttccaaagtgctgggattacaggtgtgaaccactatgcctggcctgcagtactttaataggcccctgtcttggtgcattaagtattttttatggagtgaagaacatgagaaaagactgaaagagtgaggtagtttgcaaaagtacaaagttaaaaaggtaggaaccattgttaactgaagatcattttgtaaagcaattatagtaactctgaggttaaagtgttattttggactcagcttttctctcagctcactgcaacctctgcctactgggttcaagtgatcctcctgctcagcctcccaagtagctgggattacaggcatgtgccaccacacctggctaatttaccatgttggccaggctggtctcttaactcctgacctcaagtgatccacctgccttggcctcccggagtgctgggattataggtgtaagctactgtgcctggccctggactcagtttttctggattaaacttatgaaatattgagtacaccttttaagtttatactgtatatctttttttttttttctgagataagagtctttctcttgttgccccagctggagcgcaatggcgcaatcttggctcactgcaatctctgcctcccaggttcaagtgattctgctgcctcagcctcctgaatcgctgggattacagtgcctaccaccatgcctggctaatttttttttttaattttcagtagagatggggtttcaccatgttggccaggctggtcttgaactcctgacctcagatgatacacccacctcagcctcccaaagtgctgagattataggtgtgagctaccacgcccgttctatactttatatcttttctgtataatataaatggattcccacttcattcagtttacaaatgctttcttctgtaatgtagacttttaaaatatttagaggttaatagttgccatagaagtaaacctttgggaaatgtaaaatgtgaatatgtatatttttatttttatggctggttgggagtaggagtatatagtggtgactggaaaataaacctgtgtgcgttaaaaaaaaaaagagagagaataaggggaatctatcccaaattccctgcctagtaagatacccactgtaggtagagtacatgaagtaagagatggtgatgggttggtagataagaattgtaaataggcccatgattgatttaaataatttgctgcataatgttccccttcagtttaatctacttcctcggtagaaagtttcttttcattaagaactgtgttcctttcagggtggcaaacagtgaaccacacaacaggcttacttatccagcagtcctgcctcactgagctggactcagtgcctatatctctaattgctgtgtaaatgaagttctcaatagtggctttagttttctggatgagactgttactgactgtatttattttaagaaatcagttgttgaagaaaagtcttaactttattaatataatttcatgtctacttaggatagacttgtcaaattggggacagagttttaaacatattttgaagcatgctgaattgataattagactggacaaacaaaacaataccttcaaatagatagggatttttgagacagggtcttactctgttgcccaggctcgagtggagtgcagtggtgcaatcacgtttcactgtagcctcaacctccccagactcaggtgatcctctttcctcagtctccctagtagctgagactccagcatgccaccacgcctggctaatttttttattttttaaatagaagccagggtttcaccttgttgcctaggttgacaaatattttttattgtttgtttcttcggttggatatttatcttatctgaaccttgattttatattagtgcattgcatatagttcttttataattttcttctaaacacttaagtcagtgatgtgtgggattagtgtggtggcataccaaaatcacttgtgaggtttttaaaaattacatattcttaattttccctctgattttagtataccctcttttctcagctccccatcagcccagagccattgataaattatcacatcactggttttcagaattatttttttgaagtatagaatcacttatttcaaacaaaattgagtatacaaaacagataaatatgggtgggttttctaattaaagttggagtgggaggctagtgacctgcctgctctaaacccctttacctcctactcaggtccctgaaacacaaggaaaatgccaaaattaaagaaatgcttttttcaaatgaaatatygggcaatagaaaatgagagacaaaatgcctaacttaggtcttttgtcttgtgaatcccagagaaatttcattttatttattatgaaagtaattgaggtggttaaggataaattaaataaaaagtacaagatacatgggggatgttgactcctgatgtaattattcccactccaatgtgatttactctgtgctagatatatgtatatgatggaatttctagcccaaggtttagttaggtgataaataggaaggaaatratatacctcatttccagttggaaagtgcctgtcaaggtatataaagatggatagttgattgtctaaagttaaagattcttcttggctttataccttttagtgtaagcaaagttgtaaatgtcatctttgacaatggcaaatctccaaagaaacatttaattcaatttcctcctctactgtttttctctggtggacaggtggtagagaaaacgaaccctacagaaccagttggagtggtttgccgagtggatggagtttaccaggtggtagaatatagtgagatttccctggcaacagctcaaaaacgaagctcagacggacgactgctgttcaatgcrgggaacattgccarccatttcttcactgtaccatttctgagagatgttgtcaagtatgggcaagatgggggccttttaaaattatatttattgttaatcagaaactaagacacttgagagggatgcagacaccccaagtccatatcccacagaattcatctttcctgaggatcacttatcaaatggacatttatctcatgttgtgattgtttttagtaagatgtattgtaaggtgggaatcatcggagcccattccccagcgcattaatgggaggccaaagcatttctcccttctcaccctcccacccccaactatgtgctaggttctgttgaagcaaagcataagaaatgaaactttctttaccacagctgtgagctttttaaaaatacagatgttcaccttacaccaactgaattagaatttcaggaggtgggttcggggcatctatatttttagaaagctgcccacaaagttctaattcagctgattcccaggctggcatttagaaactagtgtgctaaagagtgaagaaattacttgacacctgcatgaaaattagcgggtagtgctacaaaggataaaataagagctattttatcccaccatagttttaaatgaaggacattctcactatcgatttcacttagcttttagacattcaagatgacttgtctactttttaaaaagttaatatgcattactttagaatatcaactccagttccaaaatatttcccattctatgccatttgtagctgtgttactgtttcatccatagtaacttaatgcgttttttaatgtacatatatacagttttaaggcatttgtaatgaatacagttttaatgcacacgtacacagttttagtggagactgttatttgatttttttttaaatataaagagatgattgggggaaagctattcatttactatttaaatatgaactgaaacttaaatgctcttcactttgaaaatcttagtattggttgttgacacatttgctcctgaatgttgtaagattttctggcattttaaatctggaacgtgattatatcttttctcctcctgcttcttagtgtttatgaacctcagttgcagcaccatgtggctcaaaagaagattccttatgtggatacccaaggacagttaattaagccagacaaacccaatggaataaagatggaaaaatttgtctttgacatcttccagtttgcaaagtatgctttgaatagtaccaataaggttaaataaatgtcttaaaatgctgcttttcactctcttaggcatgaaactgttttyaggaaacatttgatagcacatatctcacatggcattttgattgtgagtatgtagtctagattcattatagttctctggaataaaaccaggagtgtgatctgagttgcctatgagtacaactttttttttttttaaatcaactagtttctggctcctataaagtttttttcatatgtatattaaatatatatattatatatatattttatatatataatttatatatttatataatatatattatatataatatataaatattatatataatatatattatatattatatttaaatatattatatataatatttatatattatatataaatttatagttatatataaatatatatttatttataatatatataaatatatattgtttatattatatatataaataaatatatatttatttattaaatgtgatggggtcttgctatgttgagcaggcgggtctcaaacttgtggcctcaagcgatcttcccatctcggccgcccaaagtgctgggattataggcttgagccactacgccccgccttggtctcctgtaaagttgttaaagtcatttattttggatgagaaactgaaaaggttaagataaagagttgtctcgttttgtatttaggatatcttcttactgccctgtgaatagatgtttcagtaaacatgtttttagattatatagctctctataaagatcacatttgatgttgagatgcttgtctcagaatttgacgagtgcaaaaatgagaaagacaaataagctgtataaagttaatgcgtggtggctcatgcctgtaattccagcagtttgrgaggctgaggcgggtggatgacttgaggccaaggagttggataccagcctggccaacatggtgaaaccctgtctctactaacagtacaaaaattaggtgggcgtggtggtgcatgcctgaagtcccagctactcaggaggctgaggtgagagaatctcttgaacccaggaggagaggttgcagtgagctgagattgtgccactgcactccagcctgggtgacagagtgagactccgtctcaaaaaaataaataaataaaatgaaattaatctttccatttctaaatcattttttttgcctgtttttttttttttccagaacagatactaatgtgatctttgtacattaagatttctaatctttccgacttaagatgaactgttctatagttgaggggggaaatgatttctcattttgcattgaaaaagaaaatttcagctttctttagtccaagggtgagcaatattttattcatcattcagattggaataggaaagcctattgttgagaccaaagccttagctatgttaaagggttagaagctgtgtatgcagtttcataataaagaggtctttatatggtttcgctctaggmagtttgtggtatatgaagtattgcgagaagatgagttttccccactaaagaatgctgatagtcagaatgggaaagacaaccmtactactgcaagrcatgctttgatgtcccttcatcattgctgggtcctcaatgcagggggccatttcatagatgaaaatggctctcgccttccagcaattccccggtaagtcagtatcttttctcttttgtatgaatcctttcttggacttttcctcttggacttctctctctctctctctctctgtattcctagatcttttttaaaaagcaaagttttgatgtgtgaacagttcctgatgtgaaataacagtagctttgcctattataaagagaatgattgttttactttcttgtgaagaggagtctttcagatctctctttttttaatttttattttttggaaacattgccaccatgacagcaaaaagacttctactaaataatgatcagaagatttttttttttttggtgtgccatatggttaaagcccatcagtaacacactataccacagggcaagtccttcagccacagaggattgtttgttgttgcccatatatctgtggcctcaccactattttttttttttttttttgagacagagtcttgctttgtcaccaggttggagtgcagtggcacagtctcagctcactgcagcctccacctcccgtgttcaaatcgattctcctacctcagcctcccaagtagcagggactatacaggcacatgccaccacacccagctaatttttatatttttagtagagatgggctttcactatgttgaccagagtgctctcgatctcctgaccttgtgatccacccgccttggcctcccaaaatgctgggattacaggtgtgagccactgggcccggctgacctcactactgttaatagtactgtctgtgagacccactcatagctccaccacccccaggctacctacaaattgtagtccaatggcagttttcactgtagcactttcaggtcactgaggaaggtgtctagaagagaagtaaatgtcagttacattcactgatacttagaaatggctttggttttgagaagttaaaaaaagaaggtattgtagttatttaaatccaagataaagtacttttcagctaaatctgtttttttgtttgtttgtttgttttttggagacagtttcactcttgtcacccaggctggagtgcaatggcacaatctctgcccactgcaacctctgcctcctgggttcatgtgattctcctgcctcagcctcccaagtagctggggttacactcgcctgccataaagcccagctaatttttgtatttttagtagagacaggatttcaccatgttggtcaggctagtcccgaaatcctgacctcaggtgatccgcccgctttggcctcccaaagtgctgggattacaggcgtgagccgccatgtctggccaatctttttttttttttaagacaaggtcttgctctgtcacccaggctggagtgcagtggcgcgatcttggctcactgcaaccttcacttcctgggcttaaacaatacacccgccttggccacccaaagtgctgggattacaggtgtgagctattgtgctcagcctaaatcttgtattttatgatgaaaccttcactggcacctagaatttccctttctgaatcatctggtatatccgtacttatgtaaaaagcattctggcatttaatttatattcctaacggataagatggctggctgcaagaatgcctcaataaatggtaaaatattgggctggacacggtggtttgtgcctgtaatcccagtattttgggagactgaggcaggcagattacctgaggttcaagaccagcctggccaacatggtgaaaccctgtctctactaaatatacaaaattagctgggcatggtagcgcatgcctgtatcccagctacttgggtggctgaggcaggagaattgcttgaacccgggagggagaagtttcagtgagctgagactgtaccactgcactccggcctgggtgacagagtgagactccatctcaagaaaaataataaaatgttagagaacactgaacattggaatttactggtacataactggttttacaagaagcagcagtggtagctttcatctcccagtccaaggccacttttgggctctgtattgtcaacaagcttgctcttggcatgtcacattgtcctcatgtttcatctttggccattgagttttatttttatttttttacccccttttggtctcttgggacgaatttatgatttaccataaatacataccattcaatcaagtatattttgcaactccatttcattgttattgtttgatttgcttccattcccattaatccttatttattcccacatagcagtgctacaaatgggaagtcagagaccatcacagctgatgtcartcacaagtaaatataccagcctgcctacagtgcatggtgatggggctgtgcttccctccatactaactggcatygtagtttagtgctctgccttttgggggtctggagggaggatggttgaarctttggtgtgggtgcactgcttacttggtggcaggtatctctctggatgacactaactcagaatcttgttgcatgctggaaatggrgagcatgctttactaaagaatctgaccacaggtgttagagctggaactgacagattttcagatgataggtaagatccagagcaggttacaggtcagggagaacacattttgcacctttaacataagcttatacggggttaaaaataccattctgaagatgtgtcttgtggaattgggtgtatgctctcagtatacaggctgattgttcctgtcatatttgatggcccttaatatggagaaaactgttctgttgatttattctcacactaacagctctcctttttggtcactgcattaattttagtcagttactttcttgcttctaaagaatctttttatcttaatggcagatcatttttagttagaagtaacacatatcctctcccatctgggtactgacagagtttggaaaagccattatctttatagtttaagagacagcttgatgttattgttacactttgaaagttaaagtttttaaggttgggtgcggtggctcacacctgtaatcccagcactttgggaggccaaggcaggcagattacctgaggtcaggagttcgagactagcctggcaaacatggcgaaacctcatctgtactaaaaatacaaaaattagctggtgtggtcatgcacgcttgtagtcccagctactcaggaggctcaggtgggagaatcacttgagcctgggaggcagaggttgcagtgagctgagatcgcaccattgcactccagccttggtgacagagcaagactccatctcaaaaaaaaaaaaaagaaagaaagaaaaagtttttaaggtaatttgggaaatatatgcagggcaaaagatctggagatggaagttatctcagaaatagagtagcaccttcatcagtgtcacccacgtgctttttcctgtctgtgccattcctctgcccagacaaattcctgtgagtgtcagtgtttctgggatgtgattctgtaaacaaggaagtggactcaaagatctgatcaatttcttataggtgctgtagatcagcggtctccaacctattttggcaccagggactggctttgtggaagacaatttttccacagacttggggtggtgagggtggtttcaggatgattcaagcatgttacatttatagtacactttatttctattattattacattgtaatgaaataattatacaactcactgtaatgtatagaatcagtgggagccctgagcttgttttcctgcacctaggtggtcccatttggggatgatgggagacatcatcaggcattagactctcataaggagcacacaacctagatcccttacatgggcagttcacgatagtgttcacattcttaagagaatctgttgcggccactgatctgacaggaggtggagctcaggcagtaatgtgagtggtggggagcatctgtaaatacagatgaagctttactcacttgcccactgctcatctcctggtgtgtgatccaggtcctaacaggccacagagtagtaccggtccatggcccaggggttggggaccgctgccatagatgactgttgtctctcctgccttgggaactgggatgcagagccctttatcactttctgtctcatccaccatttttaatatatggaagcaagctgcttttatatttaagaaataaaactttgattaaatttctttgtcattgaaccatagcttttaacctaacagtgtaatagattgttaattatataactgaagacagcatctagctatcttagttaagatacaaaaagctttaaacattattcttactcttttgtttaatatcccccatcgcccagtttacttcattttagccatttatagaataattaaagtgaaatcaaagtttggctttaaatgataccatgcactgaaaaagagttcctgcgtaatccttagcaccaaaggatgaccttacacagctgaagaacatcatgtaattgtgagagatgaaaaggaagtatattatgtaaaagagggaagaagcaactaggaggtattctgaaagaatggaaacaaccatgctgagttttgactcsatattatttttatttctcaccttaatgcttactgaatagtgttagctaccaaaaggatgcatggctaaagaattgtggggcagtaggtttattgggctaatttgcttatatcctgagattttacatttggtgatggtagcttctgttttccctccttcagggcatccaattttgtttactgaagttcactccttartttcttggggtatctttgtggtagtagaatggaagttacatattcaggccagctgtatatgtgtttcttgggttcacaaccaccttctgttcctgctacactgaatccttcaggggtttaggtgggactgggctatatacatcttaatggggtgggccctcattttttcctttttttttcctcggcatgcctactcaagattcatttggttttgtatgactttgagttgccccagaaggtctggactagacctcttgagctcttgtggtagaatctggcatgtatgtagagaggtgtgtgccccactatgcctcctcttttcccttcattagtttgtcatcattttcatagtgttatttgttcagacaacaagcattcgtaggcctgctcataggtttataggtgctattagtatcctaggtgctgaagtatcttatacaagagaaataagtcacttcttacagactactgggatgttcaagatgcacatacataaaagttaagtaacattttcaggcagtatgtgattatgtgctaaatgtgtgctatagcaataattactctgggaggcagtgacttagcaggtgtctaatacatttattttttatttattattgttattattatttttgagacagtgtcttgctctgttgcccaggctggagtgcagtggagcgatctcagctcattgcaaccttcacctcctgggctcaagcgattctcctgcctcagcctcctgagtagctgggattacagatgctcgcctccaagcccagctaattttttgtattgttagtagagatggggtttcaccatgttggccaggctggtctcgaattcctgacctcaagtgatctgcccaccttggcctctcaaagtgctgagattataggcatgagccaccacacccggccacattaattaaattaattaattaatgtatttatttattttcgagacagagtctcgctctgtcaccccggctagagtgcaatggtgcaatctcggctcactgcaacctctgcctcttgggttctagcgattctcctgcctcagcctccggagtagctggctttacaggtacgcgccaccacacccggctaattttgtatttttattagagacagggtttcaccatgttagccaggctggtctcaaactcctgacctcaggtgatccacccaccgcggcctcccaaagtgctgggattacaggtgtgagccactgcacccagccacatttattttttatatgaataaatggatggagacaatcactatgaaatgcagtggtcaagagaagattggggcttgagccaaatcttggaggatgagtatggtttttatgggaccatagttgagaatgacttggaataatccaaagagtgtgactgatctggtttgagtggagagtctcaggataagtaaggtgaagtaggatagagagtgctttgaatgctagagaaaggttgacctgtagctaaactcagaagccctctgatttttattgactccagcaaagtttgagactacgtacttggggaaagcacagaaagagctatggtttgacaagagactaatatttttgtgccctgtgtcttattggtaagattcttgaagtggcaaataacaaagaggtctaatgactgcaaactcattgactatttattgacttttgtgttagataacttagaaattcagaattgctgtaaatgttaggttgtgacctagatgaaacaaatagggactttgaccttgccttcgcttgagtgcattctgccttagctctttaaaaagggacttttggtaacagagaagtactttgaaacatattgaataaattagctcagctaatctaggacatttgggttgtacagaaaaaacatgtactgggaaataatttaactgtctgatagaactttctgcagtgaaggaaatgttgcatatctttgttgtccagttttgtagtcattggccattcatggcttctgaacactcgaagtgtgattattatgactgagaaactgaattttaaattttaaattagttttaaaaattttaattaaatttaagtagccctgtgcagctattggcttctgtattggatagtacagctttagaatgtttgtcaacattaatagtaccaaggtagtggtgaagattaaaatgcaatatgaaggcttcagagcacctagcattgggcttggcatatagtatatacctagtaagtagtcacctttttatcaaattgaaacttggaaatggttaaaaatgagatgtatgtaaggggacagtgtgtaaaaactagtgaagtgctgtaaagagctaccagtaattattggcacttgccccaaatagtgtccttctgacctgagaatttcatattaacttaatcctcagggaatttagtgatcatcagggtagcatctattccatttgtttaactggaagaattatctgcaagcttctcagaggaaagttatggtttgtacttttgctctggcaagtaacatgggaagcaaagtctttaacacatacttgttttttttcttagcttgaaggatgccaatgatgtaccaatccaatgtgaaatctctcctcttatctcctatgctggagaagtaagtctgctttactttttcctctattcttttacaaagctttgtatatttcaaaataatgaaaaagtggattttaaatgttctcaccataaagaaaggataagtatttgaggtgatagatatgttaattggctttatttgattattcgacagtgtatatatgcattgaatcatcacattgtatctgaaaaatatatacaattattgtcaattaaaaatgaaataaggttgggcacagtggctcactcctgtaatcccagtactttgggaggctgaggcaagaggattgcttgagctcaggagtttgagaccagcctgggcaatatagtgagacctgtctttataaagaaaaaaaaaattacaaaaaaagaaataaaacttttttaaaaagtagaattctggcattgttttatgtttaagtagggatgtccttagagaagatgcagcattttctgatggtcctgccctgaggagctcttcctgggaacaagttgagaagctgcatttgttctgaattcttctctttgagaattcgtgttatggctttgcatctatcccataagtgggttagttgccattaacagacatctgcaatatctagtccatttcacctactcattgaaatgtagtaggcttttgaaaaatatataatcagccttgttttttagatgaatcacctggctttttttaaatgcaatgtaagttttctttcaaggattctagtttgttcaagtacttagtactgtcacttttaaaacttggggatttagaggtctctactcttttacttatgtaatatttttcctggagatctttgtattgctttgttgtagcattagagatagctttcttgcttagaaagttaactctactggccgcttgcagtggctcatgcctgtaatcccagcgctttgggaggccaaggcaggtagatcatttgaggtcaggagttcgagaccagcctggccaacatgataaagccctgtttctactaaaaaatacaaaaacttagacgggtgtgatggcaggcgcctgtagttccacctacttaggaggctgaggcacgagaattgcttgaarctgggaggtgggggttgcagtgagcataggggtgagactactccgtctcaaaaaaaaaaagttaactctgtgagagatgattataggaaaaatgtttatcttattaactgtagaaatgatcagagtaattttctttttatatttttgttttatgcttttacaagtcagtcattaagtctactctaaaatgtctattaaatagattttgacttttatattctgcatctcaaccttttttggcatttgtgctttaaatcatcattatagcaagtccagcactgcatgacaagtgcamattttctaattgtgtttcatttcaatcctctttttagggattagaargttatgtggcagataaagaattccatgcacctctaatcatcgatgagaatggagttcatgagctggtgaaaaatggtatttgaaccagataccaagttttgtttgccacgataggaatagcttttatttttgatagaccaactgtgaacctacaagacgtcttggacaactgaagtttaaatatccacagggttttattttgcttgttgaactcttagagctattgcaaacttcccaagatccagatgactgaatttcagatagcatttttatgattcccaactcattgaaggtcttatttatataattttttccaagccaaggagaccattggccatccaggaaatttcgtacagctgaaatataggcaggatgttcaacatcagtttacttgcagctggaagcatttgtttttgaagttgtacatagtaataatatgtcattgtacatgttgaaaggtttctatggtactaaaagtttgttttattttatcaaacattaagcttttttaagaaaataattgggcagtgaaataaatgtatcttcttgtctctggagtgtcatttgtacttgaagaaattatttcattgagaaaatatgaaacttgggagaaactttaagataatgcataaaaacaaattgatgcttcagtgaggttgcagagtcatagaacttctttcagtgaatatctaactttgggctttatcttcttatcactttataatagtagctctcacccaaagattattttgtcctccacccaaaggggcatttggcaatgtctggagatatttttggttgtgacaagtgggaaagtgaagtggtaccactggcatctaatagggattagggatgtcactaaacatcctacaatgcacaggatggtctcctacgacaaagagttatctggcctaaagtgtcaatggtgtcaaggtcgagaagccttgtttcaaattattcatttactctgttttgcccaaatatttggtggcacttaggaattcaaaagaatgtagtttctgaattttctctggtaggctattccagttttttgttattgttgttgttattttagaggattaaaaaaataaaaagacaaaggtggttctttaaatatgggccatagatcattggtcattagtaagggttctctgtgtctaaaatgctgtttgcatgaaaagactgagctttataaatgcatcttaaataatatttaagtattgaccaaaagtataaaaaggaacatctggataaatgattctaaaaattatatctagaaaagagatgaataaatttcattttccactaacaagttgtcacaagataggatgtcattcatggggtgggtcttttgtttaaggatcacttttttttttttttgaagagcatgtgatgttcatatccatcaatcttacctattttttttttaactaaggcctaaatcattcatttagcatattttctattttatttcaataacagctcaattttgctattgttatctattccagttttcaaaaagattagtgaagtttgacttctcattgaaatgagctccaaatgggttgtaagaatggaattgcagagtctttagctcctgaatgccaaaaactgatactaatggtatgatccgtttctttttttcttgaaccttgctatttcctctgctatttccacctgctatttattcttctcctgttgtaagaaaatactagtgatgctaggaaaagggaagaatggaaatgggattgtgtagtggttttgttggagaggagcgatggctggggaacattgggtagttaagagcaaactctgagagcctctgagccatgaaatgataaggtgatagcattatgtatttttatgagttcttgttaaataattgttataattcagaaaatacagaattgggtaaaatgtttatgaaaataaaagctagaataatttggcagtaacagtatagaatttatgtgacagttgatagtcattttgagtctggcttgatcgactggctgtgatttaataacttttttgatagtcacaagtgaacatataagcccaatgggtatgttacttgaatatttgatttttgttcaatttccctcttaacctctctaatttaatccagttttgatgtccacaaaggaatttttagtgacgtctattggaagataaagaaaaattcagttttcaacttctacctcttctattcctggaagttttggcttttattggtaattttgattttatttctaattccagcttactattgctagcacttcctctttattcatcacagtacagtcagatttcagttatccaggtaaaaagaggcaaggaaaaagcatgcatactcttagaagagtgactaaaacacaaatcattcagttagtttggaaatctgtttttctgttggccaacgtggacatttttgcaattcatggtcctgttttgagccctggtttaggaaatacatattgggaagtgatgaatgaatgagttagccaataaggactgagtgcttgtcacgtggccagcaatattagatggggtataaaaagtataacacagagacttgtccttaaaaaacttacattctggttaaagggacaaaattaacccacgtaacaatgaaaagataatttattactaaaatgtaaggaattaagctcagtaagagttaaacaaaggtaatcataaattggagtttatcgtgtcctcatcgaaggatctcattgtattaggattctccagaaaaacagaactgataggatattaaaagtaatgggaaaaactgcaattacttttgcaccagctgaaatatgtagatatatagaaagacttattttgaggaattggcttatgattatggaggctaagtcccatgatctgccctctgcaagctggtggtgtggttccagtccaaacccgaaggcctgagaaccaggggagccaatggtgtaagtcctagtctgagtctgcaggctggagaaccaggagtgcagatgtccaagggcaggagaagatggatgtcccagctcaagcagagccagttgacccttcctctgccctttcattttattcaggccctcaatgtattggattgcccacactgatgaaggcaatcttctttactcagtctcctgactcaaatgttaatatcttctagaaacaccctcaaagacatacctaggaataatgttttaccagctgtctgggcatgccttaacccagtcaagctgacacataaaattaactatcacacccatcattttgagagtagagctatttccttctcaaattggggttagatgtttatttttatttatttttttgagacggagtttcactcttgttgcccaggctggagtgcaatggcatgatcttggctccctgcaacctctgcttcccgggttcaagcaattctactgtctcagcctccctagtagctgggattacaggcgcctgccaccatgcccagctaattttttagtagagacggggtttcaccatgttggccaggctggttttgaaatcctgacctcaggtgatctgcccgccttggcttcccaaagtgttgagattacaggcatgagccatggtgcctggccagatttaattacctctaagtgcaaatgtgtattgtgatttagaagtggatcatgaaaggaagatttataattattttggggaggaaaggggtcccttaactgcatcaagttgccaggtgattcatgcccaaaatatggggttaattaggaaatctataactgatatttctaagtgtggtcgcctgaaccaggtacatcagcatcacctggaaacttagaaatacagattctcagaataactacattatgcatatgggggtgcagcctagaaatgtgtgttttaacaagccatctgcatgattttggtgtacactaaggcttgagaatggtcactgtaagagaatttggggaggctgactgaaagttcagagatgttcctgtgttgatttgtttaagataatggcctccagctgcatccgtgttactgcaaaggacatgatttcattcttttttatggctgcatagtattccatggtgtatatgtaccacattttctttatccagtccacctttgatgggcacctaactggattccatgtctttgctattgtgaatagtgctgtgatgaacatacaagtacatgtgtctttttgggtgaacgatttatacatttttttagttatatgcacagtaatgggattgctggaccaaatgccacatgttttcacttataagtgggagctaaacattgggtactcgtgaacataaagatagcaacgatagagactggggactgcttgagaggggaaagaaagggttggaaaaccaatagtttttcaccagtagttgaaaagctatgcttactacctgggtgacagaatcaattgtaccccaagcctcagcatcacacaatatattcatgtaacaaacctgcacaggtactgcctgaatcaagaataaaagttgaaattattaaaaaatgttcagggatggtactaaaaaggaaacataaattagggagagagactgagaggccagtgtttccagagcaataataaattaagctagaaaccaaatagataaatcttatgtgagctttgttctttcaaacacccgagggggcggtactgatcgtggtaaaagaatgaaagatgggctgcgtgcggtgactcacgcctgtaatcctagcactttgggaggccgaggggagcggatcacgacaggagttcgagaccagcctgaccaacatggtgaaactatgttggtctctactaaaaagacaaaaattagccaggtgtggtggcgtgtgcctgtaatcccagctactcaggaggctgaggcaggagaattgcttgaacccgggaggcggaggttgcagtgagcagagatcatgccactgcactccagcctgggcgactccgtctcaaaaaaacaaacaaacaaaaaaactagcaagacatgaccaggagaattgtaattactagaacaatggtttccaacccttaggatcctctgaattacttggagagatttttgaaaaatcttgcaagtttttgacttcaatcctagagattatgattctcagtctggtagaaggccagagcatctaatttataaaaagcattagatgattccaaaaggcagctaggagtgagaattactgacttggaggcatagacttagcttagaaatcaacaaccaaggatgagagggaagagactggatgtgttctggctttgaaagcttagacgaggagaagagtgaagaacatttcacttgagaacagtacaagcaaaagatgaatacaggcattctggggataattccactttgcaaatatctcagactgctagaaacaaccagcctaaatgggggtctttctaaattttatccctgtctgactcaacatcttctgaaatgggaatcagggtggtaggcagggaagagaaagaggaaagttagtgaacagtttggtttaaaaatattacaggcacttctttcgggctgaatgagaagtaaaaagtataataatgtgttaaggccaggcgtgatggctcacacctgtaatcccagcactttgggaggctgaggcaggtgggtcacctgaggtcaggagttcaagaccagcctgggtaacatagagaaaccccatctctactaaaaatacaaatattagccaggcgtggtggcacacgcctgtaatcccagctactcgggaggctgaggcaggagaatcatttgaacccaggaggcagggggtacagtgagctgagattgcaccgctgcactccagcctgagccacagagcgacgctctgtctcaaaaaaaaaaaaaaaaaaaaaaggtgttaaggtgatgacgttatgggtgggtttttttctctctataaatttttggacaatacattcttaattttatgattaaaaagctttatcttttataaaggctcaaaggaaaaattaaccaaaggtgttcacattagccactttggtacagctgtgaaggaaatctgaggtaaaattggctgtggtgcagttgaggtggaggatgtaaacatactttcagagagcggaatgtgcattgttgcagtataagaaagcgtagtctccattatgctattgtctttggcattgggcatttaatagagtcttcatttgtgaaatatgataatgccttatgattcagaggaatatacgaaggaaatatatagaaatttaaggtaatgcagtttgaggtaaagctttttttcaagaggtttaatatgagccctctgatggaatgtatacattcagtattatgtctttaaagctgaaaggtctaaaaggcttgccaaaaaactcagtgagtcagtggtgacaatatgtttatgtgaacagtgttttccaaattatcaacaaagttaggacaccataagaacaaaaagtctatccttgtagcttcatgactcatcttttccacatcagttcttcaatttctgtctcagtgattccacttcccaggaaatgat

SEQ ID NO: 93273 - DNA, 20054 bp, Homo sapiens
aaaggatacagattaaaattcagcgaagggaaaaggcccaggggtgaagttcaagagaaaccaggtgcaagcttccaggtatggcctcccagaagaatttgtacagagatgtgcttaattttcccagcaatgatgcatggcaacatgtgtgaagtattgccgagcaggaagctcacccaagccttgggtttttattgcgggccagttgcatgggcatgcgtcacctgcatgactgaccttacctactcaatttccagcctcccggaggtcaaactgatacagcatggcccagggcctcaggcatacggaaacaggctttaccatagtcacgctgttagcacatctagtcaaactgatatagtgtggcatgaggagttggtcaagggccagtcctcccgaagacagaccattccttgaacttgcagggcttgagcaatcagaacctgcagagttaaccctttactacacatacgtcttttatatttatgatctgaacactgactaggccttcagcagcccgttcccacaggtctgcttccatgtatgctctccacagagagtattcacatattcgccactctcctcaggcaatttttcctcaaactggctattcttctcacagctctatcctcacagcatataaactaggtttttatttcacccagaaaatagaaaccatcagaagagaatgcctttaacttcttgccgccaaaactcctgagcctcccttcatccccacccattattttcttctttcctctggttaccatggaaaaggttaatcatccactgggctttggatcccattccaccccctaattaattcaaggactccttttctcctgtatctttaactgttttccctcttctgatatgtctacaacttttcctatagaaaaaagaaaaagaaaagaaacacctccctctttcacacttccctttgggtatggtctcttctttctttcatcttgaaagttgagtccacacctaccacctccattttcctgctttccacttcctccttgcctcctgcaatcaggttccatttccccaaccccactcccaacaatctcaccgaaactactctcactatggatactaagaccttgtgattgttaaacctgatgaaagcttttagtcctcactttatttggcctctctagtatgactcatccttggtttctaagataccaaattttcttattatctgttccactatgactcagtttctgttgtgggttccttttgcttatgtgtcccttaaatcttatttttcctcagcaattgctcaattctttttgtattttattctctcatcctaggcaatctcatcaatcctagttcattcataaaatgatgactggggctgggcatggtggctcacacctgtatcccagcactttgggaggccgaggcaggtggatcacctgaggtcaggagttcaagaccagcctggccaacatagtgaaaccctgtctctactaaaaatacaaaaaaaaaaaaaaaaaaaaaaaattagccaggcagggttgtgcgcacctgcaatcccagctacttgggaggctgagaatatcttgaactgaggaagaagaatagctgaggcaggaaaatagcttgaacccaggaggtggaggttgcagtgtgctgagatcgcaccactgcactccagcctgggtgacagagcgagactccatctcaaaaagaaaaaaaaaaatgatgatgatgatgatgattggatctcttttttatctcttttctgagggtcatatcccagtctccagccagcccagccaatgatgacatttacttttctccaaactgtccctcctcctttgttccccatcttggtgaatgaaatcatcatccactcaatcactcaaactagaaataaagttatctcttattcctccctctttcctctctcatatccatttggtctctaagcctcctcccttctgcctttttaatcgctcttaaacacattcccttcctctgtgtttcctctaccagcacccttcattccttgactcaattattgccttaattcttaaccagactctgcctctagaattgtcctcccagcctattccacacactgtagtcagggttgttttctaaaatacaaatcaagtggcattattctgctgcttaaacttctttagcattctgcacgatctttaggaaaaatttaaaacttcttagcaaggcatacgttgcccttatgatctggtcatgcctatctttccagtgtcctgaaagcaactgtgaacaccatctgcatcatccttctttctcccttttccaacaacacatttacacttcgatggggctttctggcctttgtgcctttgaagatgttggtccttccggttagaacttctttcctcatctccctcctttttccctgacaaattcccactcatccttcaagatgcagatcaagcatcacctcctctgggaggccatccctaattaccctccttccattaggattggatgcctccatgtgctcccttagtacacggcccttgcctctactataacactaattagctatttacttactttcactccagcatttcaccaagttccttgagggcaaagactgtcatacatctttatatcctcagcatctacagtcgtgccttattttacttagcataatgtcctcaaagtttttattgttgttgagatggagtcttgctctgtcacccaggctggagtgcagtgatgcgatctcggcacgctgcaacctccacctccggggttcaagggattctcctacctcagcctcctgagtagctggattacaggcatgcaccaccatgcccagctaaggttttgttttcatttttgttttttaggatggagtctcgctctgttgcccacgctggagtgcagtggcatgagttcaagggggttcaagtgattctcccgcctcaccctcccaagtagctgggattacaggcgcctgccaccatgcctggctaatttttgtatttttagtagagatggggtttcaccatgttggccaggctggtcttgaactccggacctcaggtaatctgcctgccttggcctcccaaagtgctgggattacaggtgtgagccactgggccccgccttttttttttttttttttgtatttttagtagagacaggttttcgccatgttggcacggctggtctcaaactcctgacctcaggtcatctgccagcctcagccccacaaagtgctgggattacaggcatgagccaccgtgcccgacctcaaagataatctatgttgtagcatgtgacagaatttccctctttttatatggctgaataatagttcatcatatgcatataccatctttctttctttctttctctttttctttctttctttcttttctttttctctttctttctctctctctttccttccttccttccttccgtcttccttccatccttccttccttccttccttccttctctctctctctctctctctctttctttctttcctttcctttttggagacagagtctcgctccatcccttaggctggagtgcagtggcatgatcttggctcactgcaacctccgtctcctgggttcaagcgagtctcctgcctcagcctcccgagtacctaggattacaggcacccaccaccatgcccagctgatttttgtatttttagtagagatagggttttgccatgttggccaagctggtcttgaattcctggcctcaggtgatccacctgcctcggcctcccaaagtgctaggattacagacgtgagccaccgcgcccggcccataccacattttctttatccattaatccatgatggacatttgggttacttctacctttttgctattgtgaataatgttgccataaatatgggtgtgcaaatatctttgagatcccactttcaattcttttggctatataacctagaagtgagattgctggatcatgtggtaattctatttttaatcgtttgaggaaactccgtactgttttccctggtgggtgcaccattttacattcccttcagcaatgcataagcgttccaatttttccacatccttgctaacacttattttctgtgcttgaaaaaaatactagccatcctaatgggtgtaagatgatattattattgtagttttgatttgcatttctctaatgattagcaatttgagcatcttttcctatgctttttggcctcttgtatatcttctttggaggaatgtctattcaggtcgtttgcccagttttttgaaaattgggttacttgtttttctgttgtcgagttgtaggagttttttatatgttctgcatattaacgtatcagatatatgctttgcaattattttttcccattccatacaaattccttttctctctattgactgttttgcttgatatgcagacactttaaaatttgatatagtcccatttgtctattttcgcttttgttgcctgtgcttttggtattttatccaaaaaattgagggagaagaaaaggaaaaatcagttaggtagacagctaaggctagcccttggagaagcagtctgcctgaaaaatcacagctacaaacaaaatagagcagcttaggcaaaactcaggctgcacctgcacagataagcaggtagggtccagcacagacgcttttcattcttcgtgtaattggcgagctcccaggaaaaactttcctccccttttcaggtatatacacagtggactccgtgggaacttgcacaggaaggaggggggcttacctaaaacaaacctacagtgatacaaacaagagaacccacgctttgtgcttgcctagagacatacccacatcggcagaagataagggaagttgcacagacagatttattcataagagaagttactcaaacaactatagagatgagaggagtttcttataataggttttgaattcagctgtaaaaatggcaccccacttgggctccctctctgctgtggagagctttcttcttttgcttattaaacttttgcttcaacctcactctttgtgcccatgctccttagttttctcggtcgttagacaagttcggataacaccttagacaatgagaccattaacccttacctgtttcaacatttttatcaaatccaaggccatgaagctttccccctatgttttctactaagaatgttatatttttaggtctttaatctatttggagttattttttgtgtatggtccaaggtaaaggtccatcttcattcttttgcatgtggatatctagtttttcccaacactgttgaggagattgtcctttttccattgtgtggtcttggcactctttttgaagattattctaacatatatgcagtgttgcaggtgattagcagctttctgggctggtgacatgggtggtaggaagaatttaccaacacagttgtaggtaaagaaaggcaggtttattagataaagtatgaaaatacattgcaagggtgcaacaggcaggtcagcaagagagaagctgactgctaggaaacaaaggcttgctggggattttgtagaatggtgcttatgttgtgggtggaagagggctttgtgcagtactaataatgccagggttgcagtgaactaacttccatttttctatcagctgagggtctggtgatggctgggcacaggcagattgtgagttatttgcacagcagggctatgtgtcctggaccacgaagaaaggcagacttatggcttgtctgctttctccttttgcttcccttcgtccagccagcctgactccttttccctaattaggactccacacgcaagggtttgttctgttccagaatagagacaggtcgatgtatctatctttataccagtactatagctgctacttcttgaccaattacagctttagtatctctctcacctgtcctccctatacaaaagatatataaaatatactcactgtactgagtatcttcctgcagcattcagtctggagcaaagcctgcttccttcaaccctttccaaaatccccaaataaaagcccaaaatctgtakaggatcttcctaacatcctcgtgctgagatgccctgaaattctccataactcatgactgagtaataaaaccaacttgcttaattaaagttggtttcttgtagtcctggccggaggacattgacttacaaaaatataggattagtatcttcaaaataaatagacagtaaacatcaacaaggattcacaccccaataatgaaattgggcagaaaaaggaaaaataatcatgaaatgcacagtaaagatggctccataatattgaaaamaattttacttcaaatgcataaaatgatgcttctgattcagctggtgcgacatttatttcacatttgagttcagctgcwcctgatgtctctttcctgaaaatttcaatactaagagctcgagaaaccctgtatttggggaagcttatccttcaccatcaactttrggggtaggggtcagagggaacaagggtggaaaggccgcgctgaatggggccgaagctccgcccctcagcgataagtccagattcctgcggccgacgtggtcctccgagggagcagcagagccgccgaggctggcgagtcccaggggaaggatgttctagccggagtctactcgatggtagggcaggaagccgccttgtctctgggcgcggccatgttggaggctccgggcccgagtgatggctgcgagctcagcaaccccagcgccagcagagtcagctgtgccgggcagatgctggaagtgcagccaggattgtatttcggtggggccgcggccgtcgcggagccagatcacctgagggaagmgggcatcacggccgtgctaacagtggactcggaggagcccagcttcaaggcggggcctggggtcgaggatctatggcgcctcttcgtgccagcgctggacaaacccgagacggacctactcagccatctggaccggtgcgtggccttcatcggtcaggcccgcgctgagggccgtgcggtgttggtgcactggtgagtggccgggtcagtgggtgacgtgccccgccaagcttccagccggcccccgtcgccccttaccttccgaggccgtcgggaggacaagagcgcggtcatgccgcgtgaacctcctcccgctgcctcccgcaggaggcgtgtttccaagagaggaggagggttgaggcgggcccctggtgtgtgcaggctttcattcattcatgctttagttggttcttcctgcagcagcagagggcgggggaggtgtcatctgataaatgacaaattacctacaccctaaggagtttacagctctgttggagaagctagacacccaccccgattattgtaatgcagattaggttgcttggtgtcttgtaaacgggatttacaaagatttagggttaaatgtttttgtttgggatgggtggcgggtggttgatgaagagatgaattggtttggatctaaaggatccctgggctttgcctagggaggagatggttgcagcaaagacaaaaagaaaatgggaatcccgcagggcgcggtggctcacgcctgtaatcccagcactttgggaggcaggaggatcacaaggtgaggagttcgagatcaggctggctaatatggtgaaaccaaaaatacaaaaattagccgggcgtggtggctctcgcctgtagtcccagctactcgggaggctgaggcaggagaatcacttgaacctgggaggcggaggttgcagtgagccgaggtcatgccacagcactccagcctgggcaacagagcgagactccatccctccccccaaaaaaagaaaatgggaatccctaagcagttcttggttggattggagtataataatcgtttaaatttattgagcacataaaagaagatagtgatgaaatcaaaagaagtctgggaccagattttgaggtccctgaatgctaagatgaaaggagattggatttgtttttgttttgttttatttatttttattttgatatagggtcttgctctgtcacccaggctacagtgtagtagcgtaattacggctcactgcagtctcaacctcccaggctcaagtgaacctcctgcctcggcctccagagtagctgggactacagaccccaccacatccggctaattttttgtagaggtggggtctcactttgttgcccaggctggtctccaactcttggactcaaccaatcctctcacctcgcctcccaaagtgctgggatttcaggcgtaggtaagccactgtgtctagccaggagtttggatttgttctgagccattataaaaattttaaaaattactgttattatttttgaataggtaatagattcacgtggttcagaattcaaaaggaaaaaggaataattattttgtaccttgataatatttcagaggcaatgggcttatttgagaagcaraaatgaagtgggcctaaactttactattaatagggggctgggctttgtgtgtttttttttttaattgttgctatttgctgttttattttaaaggtctctttttcagtcatgcaggagtcagtcgaagtgtggccataataactgcttttctcatgaagactgaccaacttccctttgaaaaagcctatgaaaagctccagattctcaaaccagaggctaagtgggttctttttttatagtaataattatgcttttgtgatataattttaagaaaatgaaactttatatttctttatcattacaggatgaatgaggggtttgagtggcaactgaaattataccaggcaatgggataygaagtggatacctctagtgcaatttataagcaatatcgtttacaaaaggttacagagaagtatccaggtaagtaataattgctagtgtgtaatgggctttctagatgacatttactttagcattgtatgctttaccttacttccagcaatccctgagaaactattgtttctttttgaaactgatttagccagaaataacctattcaaaatcacatggtttataaatggcagggtcaggatttgaattcaggcagcccgtgcccagaacctaagcacttaaatcactgtcctctcctaccttagcctgatttctcaacactggaatttgatttttttttttttttaatttttgaggttagcacttgttgcctcaatttgacattaactgaatttatctgaaaatgcagagttgattttgacaaataaatacattttaattatgtcatatagaattgcagaatttacctcaagaactctttgctgttgacccaactacygtttcacaaggattgaaagatgaggttctctacaagtgtagaaagtgcaggtaaactattttatatcmtttggatattttatcttgtctcagtagctgaaaagtacttaatgttttattttcttaaatttctgtaggaagattttgtttaattgaaatttttagttcagatctgttttcagaaagaatataaattcttaaaaagagaaataatcagattgtaagggttattgaaaatttaagtagtgtaatcaatgttacattattttgttctctaagcaatattgcacattttgctgggcgcagtggctcacgcctgtaaccccrgcactttgggaggccgaggcaggcagatcacctgagattgggaatttgagaccagcctggccaacatggtgaaaccccgtctctattaaaaatacaaaaattagttgggcatggtggctggtgcctgtaatcccagctactcaggaggctgaggcaggagaattggttgaacccaggaggcggaggttgcagtgagccatgatcacgccactgcactctagcatgggcgacagagtgagactctgtctcaaaaaaaaaaaaagaaataccgcacatttcatccatgttttcatccttttggaagtcattaatgcttttgtttgtttgggggttgcaggcgatcattatttcgaagttctagtattctggatcaccgtgaaggaagtggacctatagcctttgcccacaagagaatgacaccatcttccatgcttaccacagggaggcaagctcaatgtacatcttatttcattgaacctgtacagwggatggaatctgctttgttgggagtgatggatggacaggtgagaacacattttattttctacaattttattttatgatctatattttattccttcttgcattttaagctctattttaactagtgttttgctccatttcttaatttctttatttctgaagattatatctttctagtgtagataagactatcaaaaataaaatatttttcaaaaaccagctgatccaacatagtgaactacttctggttgagagccctggtctaagttaataaatttcctttaaggctatttatatttttttcaaatataagactaacatttatttttaaactaattagaatatattggctgggcactcttgcctcattagctcatgcctgtaatctgagcactttgggaggctgaggcgggaggatcacttgagcccagggtttcgagaccagcttgggcaatatrgtgagacctcatctctataaaagaaagtaaaaaatttttaataagaaaaaaagaaaagaaaaaatgtattaaacaaaatttgaactttgtaacaagatagggtaaatcagggattttaaaattaggttaaaaattctgtctttctttttctctgttggcttcctgtatgtgtctttctcttttttcttatcttttaggagagtgaaatttagtttgttttgctatgagattctttttcatttccagttaaataatgcagctcatcctattgctcctgtaaccagtgggtagggaaataaaaaaagaatgcagttcatgtgacattttacataaaaaagtgtttaacttggttggagtgtgccatgacagccacatttctcctttaggtttacttgatattaatgtgaaggtattctataataatcatcttaataatgattttgaaagtttgtatggtttgtataaaagtttgtatagtggctagtttatgaaaccctttcactgtattataccatttgaagaatgccatagctttataaaataggtagagcagttatattcacgtgttgtgcatgaggaaactgtttatgagtagtgtcttgcctagaaagtggtaccatataatcaaactcacattttcggataatgctgctttttttaaaaaaaacagccttattatagtataattcacataacatgcaatttacctatttaaggtgtatagttcagtggcttttaaagtgtattcacagtggtttttgcaaccatcgtgtattagtctattttcacactgccataaagatagtacgtgagactgggtaatttataaaggaaggaggtttaattgactcatggttctgcatggttggggaggcctcaggaaacttattatcatggcagaagggaaagcaggccacttcttcacaaggcggcaggagagagaagcatatgtgaaggaggaactgtcaaacacttataaaaccatcagatcttatgagtgctcattcactatcacgagaacagcatgggggtatctgcctccatgatccaatcacctcycttcttccacacttggggattacaatttgagatgagatttggatggggacacagaaccaaaccgtatcacatcacaattcacattcccactcttcccattctttttttttgagacggagtttcactcttgttgcccaggctggagtacaatggcacaatcttggctcaccacaacctctgcctcccgggttcaagtgattctcctgcttcagcctcctgagtagctgggattacagggatgcgccaccacgcctggctaattttgtatttttagtagagacggggtttttccatgttggtcaggctggtctcgaactcctgacctcaggtaatccacctgcctcagcctcccaaagtgctgggattacaggcrtgagccaccatgcccagctgcaattcccattcttgatggtattatttgtagcagttagagattttaattttgatggtatctaatttatcagtttttcttttttgtggcttgtgattctggctttctaattttacttaacctgggaaacacacacacacactccagccaagttaaatacatttttatgtaagattctaaatcctgtgcatacttatttgtatacatatttgatttttttctgtagaatatgtacctagaagtggaattcctggctcgaagaatgtattttaaatattagtgatattccaggctgatattcaaaatgcccatacaaatttggttttcagtaactgaatgcatgtacccgttactccatatccttgacataatagatactataaaactggtaacattttgtcagtctgtggggtaaaaaatgttaatcctaaaatgtttaattggaattttatgaaaatagtcatcaaccaccatctttatatatttaccagccatttactgttttcttttctataaattgctttcatattcctaggcccatttgcctatgggttttgtctctttcttactcatttgtaggacctctatatattctagatgttaatagttcatctaatatattgcaactattttcttcagtctattgcttatcagattttttatgttttgtcatattaaaatgaaggatatttacataataaaatttgttagtttttttatttatggcttctgaatttcttttttttgagacggagtcttgctctgttgcccaggctggagtgcagtggtgtgatcttggctcactgcaacctccgccttctgggttcaaatattctcctgcttcagcctcccargtagctgtgattacaggcatccgccaccatgcccaactaatttttgtgtttttagtagagacggggtttcaccatgttgaccaggctggtctcaaactcctgacctcaggtgatctgcccgccttggcctcccaaagtgctgggaattacaggtatgagccaccacactcagcctgcttctgagttttatgtctagttttctatagctcaagattaaaaataaaaactcttaccttataccatgcataaatcaaagagctaaacataaaaattaatgctataactaactacattagaagaaaatgcagttgccttattaggcttttttgatttacctattttcctggaatatcagtttgtctttaaatagctaagawtctgacttatatgctgtcaatacacacagttagtaatacagcatgaaaatcctaacatgcttttctatactttagccgtgatcattttcatttgaagtcctaaattacaaactgatttaaaagctatatatatatatatatatatatgccacatccatgaaaccttccttaatcaaatctcaagcttcacttttctcccttcaagctccctgaatacaacattcttcctatgagataattgtagtctactatctattacagtaaatttccaatgcattttatctcactgattagattataaactcaacgtggggatcgtgtcttgtttttatatcctatattgattgccaaagataatgatttgttttgtataaaagtgaatgaataaagtaacacatttgctttatttcagcttctttgcccaaaatgcagtgccaagttgggttccttcaactggtatggtgaacagtgctcttgtggtaggtggataacacctgcttttcaaatacataagaatagagtggatgaaatgaaaatattgcctgttttgggatcacaaacaggaaaaatatgaacatgatattttatagcttgggaagaaacttgcagatgatatgtgctgcctttgcttcttatcattcatggcagattgtttgtgctttcaacatttcatttgaaatgggagaagataaaatcacttgatgtaacctggaaactatgctttacatggcaatcaaagccttttgatcatgtacattttatttgatattaaaatcttttataaccasatactgtctgtgtttcatatatttttaaaagttttgattgttggaatgttatatgatcttaaggtctgtatagacaaaattatgtacaaaaatttgaaactattatatttaaatgggtattcttttatttccagacacataaagcagatttgtttggacatattttggaattatttcactttctttcttttaagggacattagtaaacccatacatgtctggatttttttcttggaaatggaaaggccattagtaaaacgctgattaaaaggcaattttcctattactgttcagtaatcccaattatctatatttttagaaaagtgtttgagatcccttttgaagtgatctacataaagaaatacataaatgttagatgtgtttctaatgatgaagaaaacaaatgtagagttactatatatcaagtcattttgtagcccaatatgtgagtattggaaaaggtaatacgtccagattagttttttaacctgatgtatagaaactagaattattttactcattattaataattacaattggacctaattagatatttgaacatttacaagaatcagaattaactaataaaggccaggtgcagtggcttatgcctatgatcccagcactttgggaggccaaggcaggcagatcatttaaggtcaggagttcaagaccagcctggccaacatggtgaaaccctgtctctactaaaaataaaaaaatcagccaggcatggtggcacacgcctgtagtcccagctgcttgggaggctactccaaaaaagaacaagaattaataaagaaaaatattctttatttttgttgtaaattaagttgtaaattcactagtcatgctccccaccatttgcagggttccaacaatagtacacattgaggcttatatacataaacaccgtagtgggagtaatttttaaatgcaaaaatatgttgtgaataatgatcctcttaataaatgcctagctcagttttttaaaggtataggagtgttatggaaaattcttgagaaaaatcttaacattggacctgaagactttggcagtttccatgtaataatttttctttctattttttttttttttttttgagatggagttttgttgttgcccaggctggagtgcaatggcatgatctcggttcactgcaacctccactgcccaggttcaagcgattctcctgcctcagcctcccaagtagccaccacatctcgctaattttgcatttttagtagagatggggtttccatatgttggccaggctggtctcaaactcctgacctcaagtgatccacccacttcggcctcccaaagtgctgggactacaggcgtgagccaccgctctctgccataattttttcttttgagaaaaaattactccatttgttttagctttcataaaatctacttttttgcttcatactattattctctattcatatattattctctagaaagttttaacaaacaggttgaggagctcaggtgtggtggctcatgcctgtcccagcactttggaagacaaaggagggtggatcatttgaggccaggagttcaagaccagcctggccaatatgtgaaaaccccgtctctatttaaaaaaataataacagtttgcggcacatgaagttaccccttttgtaggtaaaaagtagttacatagctgcagtttaatatgactcaatgcctatccatcatacactgttgatcagattataaaatcaaatagtatggatcaaatgcaatgttaattaagttgtaaattcactagtcatgctccccaccatttgcagggttccaacaatagtacacatcgaggcctatatactatttgtcttaactttgtttttgtttttgtttttgttttttttgagacggaatcttgctctgtcgcccaggctggagtgcagtggcgcaatctcgactcactgcaagctccgcctcccgggttcacgccattctcctgcctctgcctcctgagtagctgggactacaggcgcctgccaccacgcccggctaatttttttgtattttttagtagagacggggtttcaccgtggtctcgatctcctgacctcgtgatccgcccgcctcggcctcccaaagtgctgggattacaggcatgagtgtcttaacttttaaaacataaattggccgggtgcagtggctcacgcttgtaatcccagcactttgggaggccaaggggggtggatcactgcaggtcaggagtttgagaccagcctggccaacatagggaaaccccatctctactaaaaatataaaattagccaggcatggtggtgggcccctgtaatcccagctacttgggaggcggggaggcaggagaattgcttgaacctgggaggcggagtttgcagtgagccgagatcgcgccactgcactccagcctgggcgacagagcaagactctgtcttaaaaaaataaaattataaatcaagctatctgttaaataaaatgttttattctattatcttgacaaatatcccttcataatgacctgtcagaccaggtttgaattcagaattctctgattttatcagattccatgacaaagcatggcaatgcagggagaggtggcccccgcccactgggtgcctcctttatttccccaccccttgatttgttctgcatcatgaagagcctggtgcatatatatatatgtgggtcccccacctatatgtataagatctggctacagccctggtgtataccattagcccatttcactcgtaagaggtatgaggccagagcaagccctggaagccggcttggagctatttgggctatttgggtgttagatgcacttctagaagggggcatctgttctagctgggcacatcacgttggcagtatggattcttatcctgtggggcagagccagaggtcagagtaaagtcttctaaagtgtcggtccagggtaggggctcctcttacctagaccaaagagtggtattgtctctagacataaggttctttttcaaattgtatttctattccaagggtttaagttgaaaatgaatgagtagattcaagaaaaagaattccataacatccaacatttaatgatttaaaaagaaaagcctggtaactagagtggaaggaagcttccttaatcagagcagctgtgaaaaatatatgggaaaaaatcttatttagtggtaaaacttttcaaacattcacattaaaatttagaagtaagttaaaagatgtctagcccctaccttctgtatcgtattagagggcctaaccattgcagtaaaacaaggggctaaacagtttaagacgtaggaaaaaaatctgaactcactaataaatctcgacatctctaaaagtgggacagtatgtatatgccttctgctatgatgcaaggaagtacctatgaagtattcttgcaaaagcaaacaaaaaaccaaaaactaatcaagcctctagatgtcactggcagtttctggaacaaattaagcatcaccatgaagatgtaatcagcagaatcatgaagtgggaaattctataggaccaatgacttagattcttcaacaaatggcaggggggaagaaatggagagggaattgtcatgtgaactaaatgcaatgtgacaatcttgttggatcctgattttaactaactgtggaaggaagggcatttttgagacagaaaactgaacatggaacaggtatcagatgatattaaggaattattaattttgttgggtatgataatgggattatcagtatgttttttaaaaataagaaaaggcaggctaggtgcagtggctcatgcctgtaatcccagcattttgggaggctgaaacggatggatcacaaggtcaagagatcgagaccatcctggccaacatggtgaaaccccatctctactaaaaaaatacaaaaagtagctgggcgtggtggcgcgcgcctgtagtcccagctactcgggaggctgaggcagaagaatcgcttgaacccaggaggcagaggttgcagtgatcacgccactgcactccagcctggcgacagagcaagactccatctcaaaaaaaaaaaaaaggccttgtctcttagagatatacattgaagtatttatgggtgaaataatatatctagatatgctttaaaatactccaggaaggctgggcaaggtggctcacgcctgtaatcccagcactttgggaggccgaggcaggtggatcaccttaggtcaggagttcaagactagcctggccagcttggtgaaaccctatctctactaaaaatacaaaaattagctgggcatggtggcaggcacctgtaattccagctacttgggaggctgaggcaggagaatcgcttgattgtgggaggcagaagttgcagtgagccgagctcacgccattgcactccagcctgggtgacagagagagactccgtctcaaaaaaaaaaaaaaattctgggaaaaacacagaacaaaatgaaaaaagttgtggagaggagaggtaggatagataaaacaagaatggcaaattgtttaagctgaagctggatgataggaacacagggatttattatatcatctcttgtatttgtttgaaaattttcatactaagtttattttacaaattaaaacattaaataaaatagaatttaaaaggttggtgtttgcataatgttctgctaaataaaaaatcctaaagaactttagacaaatttttttaaagtcatttttattttatcacatactagtttccatctaccataatatgatttttttttttagagacagaatcttgctatattgcccaggctagccttgaacacctgggttcaagcaatcctcctgcctcagcctctcaagaagctgggattacaggtgtgtaccactgttcctggcacagacaaaatactagaataacagaattcaacaaggtttttggtacaagattgctgtacaaaaatccacagtgttgctataccccaataatagccaaatagaaaaaaaaagatgtgaaaaacaaaactataaaactatgaaaatgaaaatgaaaatcttagtgacctcaggagagggaaggatttcttaagaaagctacaagtcagctatcataacaacagattgataaatttgactacattgaaattaaaatctagagaacaaatcaccgtaaacaaagacgacaagtgtcaacctgggagaaggtatttataacatataccaagcgttaacttaaaaaagcccaacaatgggctgggtgcggtggctcatgcctgtaatcccagcactttgggaggctgaggcagaaggatagcttgagcctaggagtttgagaccagcccgggcaacaaagcgagactctgtctctctctctcttttaaaaatgtatatattaaaaagccccacaatgaataaatttagaaaagaaggggagactttatggcctgcaaggtggccatcctgcaggctgggaagcgtgcctccagaaacaggcgctttgaaggaggagggcttggagtgtagttcaggctgaacaggttggctaaacctacattttcaccaggttacaggaagagctatgaatattcatgaaagtggtcctgacacatgcgtattgaacaaaaactcatgtaacatatgacccatattcactttgggatggagacttaacttttttgttgttgttgttcagacggagtcttgctctgtcacccaggctggactgcaacgatgtgatctcagctcactgtaacctccacttcccggtttcaagcgatactcctgcctcagcctcctgagtagctgggattacaggaacctgcccccacgcctggctaattttcgtatttttagtagagatggggtttccccatgttggccaggctggtctcaagctcctgacctcgtgatcttcccacctgggcctcccaaagtgctgggattacaggcgtgagccaccacacccagccaagacttaacatttaaatgtattacgagccctata

SEQ ID NO: 93274 - DNA, 22850 bp, Homo sapiens
ccactcctgttctagaacttttcacatcaatggcaaatagcattcgctatggatgggaaacaggaaggggtgaggcagtggcaatcactgagtggcaggagttacaaccaccaccaaatggtgtttaggaaaacaatccagccctgcggggtgcagacaattccttgtagaatcttcccagcaatccttccttagacctcaatgaagggtgggttgcaaacgtcagaaacaggagagtttcctccttaaactttgagaaattcaccagccattcatacttaggaaactctaagaaaaccggcatacttctactttctttaaccagctcctcacaatttaataaattaacttccaaatgagaaagcatcccttcagcaagagctggattcaagaaaaagtcgtgcaaatcaggagaacagccccagggattgtttcttctccaataataagttaatatacgtgacagcagatttaacctgattcaatgtgtgcattttttactaatttgcagaattttaatctgaaacatttaaaccatgctggcttgagacagaaacatttccaatataggaagaagttatagcacagttccacagcagtttcatcaaacccgtgaagcagttctgtcttgcaaaggtgggtgtggagcggcacacttcactctcgttaaacctgtccgacggctccttgagttttaactgcttagcagtttggcttcaggtggaaatgaacaaagcaactcggagtcctttcccaccaaggcacacagaagaaacatcaccatcatctctaaacaggtttttattttgctttactgaataaggaaaaaataatctcatgatctaaaattggaatttctgtgttcttaaaacaaaaatcaatatttttatttcatgtgtctctgagacaatagaaaacatacaaaggaggcttttgaaaacctctaactacagaggggcttgtctttagaagagggacttacattaatataaaatataccttgatcccagagttcccaaaaataagttaaaaaatgagtgtgttcatataaacatagatgtggaaagaaggcaaaatatattgtaaagttgtttagaaagcaatttttaaaccatatatgtagtatggtcagactttttttacactgaaaattatatgttagaagagacagataaaggatcttgaggcataggggttatcactggaagatggatatacaggattatttgttagggtatgcctttcgaatcatagattttaaaaataaagatatgtgattttgttgggaaaaggtaatttccttttccttaccaaagtgaggtattgggatctcaccaatatctgagtctttaaaatctgatatcactatgagaaaaataattgaattgtaattcaattcatttgtacagcaccttaccgggtgttttggggttttctgcacagatattttattgcagtaaaatataaataacacaatttatctttttaatcattttaagtgtacagttctgtgatcttaagtacattcacattgttgtgcaatcatcaccacgatccatttctagaactttttcatcatctcaaatagaaactgtccccattaaacactaactcacagctaggcccgatggcacacacctgtaatctcagcactttgggaggctgaggcaggcggaccacttgagctcaggagtttgagaccagcctggatgacagggcaagcccccgtctctacagaaatacaggtgtgcacctgtagtcccagctacttgggaggctgaggcgggcggatcacttgagctcaggaggcggaggttgcagtgagctgcgactgtactccagcctgggcgagagagtgagaccctgtctcaaaaacaaaaaaacaaaaacaaaaaccacaaactccccattccccaacttcaaccacccctggtaactgccattctactttctgtctctataatatatttgactaccccagggacctcatatgaacacggaatcacacagtatttgtgcttttgtgtctggctcatttcacttagcataacgtcctcaaggttgatccttgttatatcatgtgtcagaatttctctcctttttaaggctaaataacatttcactgtatgaatacaccacatttttttttaccagtcatcaattgatggacatttggattgcttccactttttggatactgtaaataacactgctatgttgtttttaagtagtaaaattactataaacttttccttttttttctttttttttttgggacagagtctcactcttgttgcccaggctggagtgcaatggcacaatctcggctcactgcagcctccatctcccgagttcaagcgattctcctgcctcagcctctggagtatctgggaatacaggcacgtgccaccacaccgggctaatttttttttttttgtattttcagtagagatgggttttaccatgttggccaggctggtcttgaactcctaacctcgggtgatccaccaacctcgggtgatccacccacctcggcctcccaaagtgctgggattacaggcatgagccaccgcgcccagccttaactttcattttcattacaatttccccatcacccagtgttaagaactgtcttttttttcccctttggcttagtagtctgttactattattaatttatccccacactctcccctagttgagtaaagattttctcaatacattcatatcagttattctattaatttcattgctcaaagcattctttcctggcatcttctggctggctccaatctgaactggttgctctccagacctgacctgcttctcagctgctgaggtggggtctccttcaccgtcatcccctctgcctgctgcgtgttggttggatcctctcttttctgggtccagtgtcttttgctttcttggtttactccttcagtggggtggcacacatcttccactgacatgggaggtaaagtttttgagaacctgtgtgtttgaaagtgtctttattccactacaaacttcattgatcatctggccagatatcaaatttaagtttggaaataatggcccctcagactattggaagcattgctccattatctgttgtttgcagaattgctgttgagaagcccaaggccactctggtccgttgtacattttataaaaccttcagtggtgaggatgttccatcacttttagaacataaatttggaggcattcaacctagatacccccttgttcggtccccagtgcaggagaaatagagtatattattattctcagagagttgctgtggccaagacaaaggctcaaaagatgatactgcttgtccctgtcatttcctcccctgccctttcctcttctcatgttgaaggtattttttttttctcactggaggaggataaataaactttctattatgctgaaagagcaggattaagcttattttctgggctctcaaatcctctgagacagccttcattttcacatattggaagtcacccatcaggttgtcttcaaatcaaacataacatagccctttccaccttcacaaccctaggatcccttccactgtttgggtgttttttggagttccccatcttttaactaaatgaacctcactgccccaaaccaggcacatcatcttaataataactcacaactctcattgaaggttgactgtgtgccagacactgtaaatgctaattgcaccacgtttcctcttggttaatcctcaaaacaaatcccactagtgccatcaccgagctggggtttacggaaggctattggcttgccatgagctggtaagtgcaaagctgggattcaaattcagttcttctcactccaaagaattaagctctaaacagttttgctaggtcgcctcggtcagaaaatatacaacgggtgggtagttagtggttcttatctatcacagtccacaggaggcaaacacaccaaaaggttgacagtgatgatctctgggtattggaataatattttcttttttatcctttattttccaaatttttgtctctgcaataactttcttgacagaaaaaataaaataaagacatttgagttacaatatctttatctttagaaaaataaaaacagtagactccatggccgtaatgtttaactcagactcaatgtctccattgttgttttgtctggaataagctgaaaactcctccaggcaggagtgctgcccttcatgacactgattatcctgccaggccctggatgacaaactctaataatatatctactccattcctccgcctactcagtctgcaattctatctgaaaagtcatcaggtctgtctgtgtcccacaagacctgcgatggtttcccacaacccctaccccactcagatgtgcagaactggattaatcatacgtcatagctcatgacacactcatctctggtccctgcattccccatcaccctatttgtaaaataagataaagaacatccaccagctcaccacccaaaacgagtgtaatttatatccatctgctcacctgagcgaactctcctggatattgagtttttggtttactattcacttcctattaagtatatgtgtgttttatagttttatcataaatatacctattctggaaaactttgttgtttcattttagttgtttttaacattgtgaagggagcttaatgtcgtgtgtaattcttggacttaacttgcttttttatttttgtttttttattttgtttgtttgtttttgagatggggtcttgttctgtcacccaggctggagtgtaatggtgtgatctcagctcactgcaacctccacctcgtgggttcaagtgattctcgtgcctcaacctcctgagtagctgggattagatgcccgccaccacattcagctaatttctgtatttttagtagagttaggtttaattagtttggccaggctggtctcaaactcctgacctcaagtgatctgcctgcctcagcctcccaaagtggattacaggcgtgagccactgcacccggctttaactttctcactattatattattcagatttatccactttgttgcgtgtcactataagaccatctgccatttaatgatttaataactttccattgtatgaacgtattacattgtatttatcttttctgctgttgatggacaactggttgatttatacatttttgctattacaaaaaggtctactctgaacatctttagatatgtctcctgggttttcttgttggtatatacccaaggatggaaggttagaccatagaatatatgaattttcacatagagtatgtcaattttcacacacaaaaaggccaaagtgtcgtctcagatggtggcaccactttatatctgcaccagttgtgaataagaaacctagaaagctgcctgcttttcagatccacatacagattccccaatataaactgttacatccttaaccaaggtttcagaccagatttatgctaaagttctagttccgggctagagcgtcttaccctttgtaaagttctttggggaaatacatgtgatttttctcagtcttcttggattgatctaatttttaagaaccccagagaatacctagccctaacagcatcttcctgtgttacggaaaagcaatactgagttgggtgttcttacctcttccctggtgctccacaaactcacagaggatgtcatgtggttaacagaagacaacatcaagtagtcaccgacaatagtagttattggaagaagaaagtggctattttttcaatttaattaaatgtggtaatgaatgagtgaattccccccaagggtaggagaaaggagagtccttatttttctttgttttttatttcttttttttggaatcatttttcccccagagatagtccctttatctaagaaaaaataacttcctcctgaaagacagaccgcttttccaaaaacataaaagaagcaggccacctgcgctagctcctctgtgtcttcctagtcaagtgaaattgaagggggcagaggaggtctccgtgcaccgtggaggggaagggaagtatccgcgggacgtggaggagggaggggagatctccatggaggctggagggggaagggaggtgaccacagctctgcttcctcctcagggaaggggagtggcccagtgtggctccaaccaccaggcttcacctgtgccctcggccccaccacaggcagagcctgttgctggacttccagttcacttttgttcaggcaagtgagtctccgtcattggcagtttagccccgagttcagttccacgtttatagattattccctctccattgcccattctaatactcaccgctgttgatcttcccaagtctctaaaaaaaaaaamaaaaaaaaaaaacaaaaaaaagcctacccctcaaatcacctttccttgactcagttcatgcagcaggctccacacttctcgtcaacccattcctccaatgtctcttctctaactcagtactcacccacagtgattttcaaaagtgtggtctttctttttttctttttttttttttgaaacrgagttttgctcttgytgcccaggccagagtgcaatgacatgatcttggctcgcggcaacctccgactcccaggttcaagcgattctcctgcctcagcctcccgagtacatcctcctgggattacaggagtgtgccactaagcccagctaatttttgtatttttagtacagacaarctttcaccatgttggccaggctggtctcaaactcctgacctcaggtgatccgcccaccttgaccttccaaagtgctgggattacaagcatgagccactgtgcccagccaaaaatgtggcctttcaagagtcagcaggcgtgttggtagatggtttaagtgaccaccttaccaattccaaatgaattgagatgtgagacctctgacctctcctcagtcagtcctttgtctctatttccatagttgtcactctggtcaggaacttgaccacttctcgcttagtatggattgcccccttcctttccacaccagcaccaggctaaccctctgaaaagttccctyctcatgccattctcctcctcatgaatcttcwttggctcccactatccacaggtaagatacacactccrcagcctggcaggccactccctccacagmcgaatcccaatactcaatcccaggtgccttcctgcctctgtgctttggttcctgccctctcccactgcagtgccctcctctcttctccatgcacggttagattcacctcttgctctccatgacacccttccatgtcaccaaagcccatagttcatttaaaaaaaattcatcccgccatctatccatttatccttcccttcattcaacaaatgttttccttttactgagtacttatgagtcaagcattgtgctagattctgtggaagcaaaaataagtaagtcatacttcccatcctggagggatttagtctaatagaataaacactagctaccatttagtttgcacatattatacattagctatagtacaaagcatttaatatattttgtcataaattatcttcacaataacacaatatgagaggtattataattataatcttgattttattgacgataaaacagaggcttagcggggtcaggttatctatccatggtcacttgggtggcaatcagcagagccaggaatgcgagtctgtaaaaacctgctctgatgtccgccctgggaacacacttcctctcaccataccactcaccttcctctccctctctctctacctttccctcctgctgtctctttgagttcacagcatttcgcaattgatcatgtactatatgttttctccttgcattttcttaactcattatgtaacttctgtgtgcacttatttcgtatttcttcaattagatttgtaaatgctgggccgggcgcggtggctcatgcctgtaatcccagcactttgggaggccaaggcaggcggatcacaaggtcaagagatcaagactatcctggccaacatggtgaaaccccatctctactaaaaatacaaaaaaattagctgsgcgtggtggtgtgcacctgtagtcccagctacttgggaggctgagggaggagaatcgctggaacacgggaggcggaggttgcagtgagccgaggtcatgccattgcactccagcctrgygacagagcgagactccgtctcaaaaaaaaaagatttgtaaatgccatgagacaaagggagttaggaaaggatgaaatcaagaatatcatgccttgtgcagagtgggattcatatgtatgttccagttaaaacaggtttgggatgtcaacacctcaacatttcatagagctaggaggaggtcatccgtgagttaaacatagatcaccaacagtctcaaacagtgacccccaaacttttaaattacaagggccatcttgttattagaaactcctaatttgcttctaagcaaagaaatcttctgacaataaccaatggrataaatattatgtattagyattatttttaaaacagtcatgaatttagtgatgcctttgagcaaatttgtgttttattaattgcaattacacatcyccatgtttttgaatagtatgagtaggtgtaaaatattatgcatgcagtctatagataatgcttgcagccccacaattttaaatgcctcatcaggcatccatgtcctatagactaggaatcactgrtttatgagttcgctacccctgagctgagagtggacaaggtgagctcaccttgtaaaggatcatgcttcccttctgagtccagaattcttttgtgggaaggaatcttagtttagggcagagctctgacatttttctgtcttctctattcaataagagtacaaaagggggaggatctcccctcactgattatgcaatataattactacagccgtgaatgggattaacagtcgtgggttcagtgtgacaaatttaaaaacaactcagtgagctcatttttaatgtctctttcctctttccagttcagatctcagagaaatttgaactaacaggggtgagttcagtcaaagctggctgtgtgcaaactatcaactggtaacagaatgctggccatgggaagaggaggagtttctcccctgtgycctttgttaaaacttttttggtaactcatctttggttttcgttttttttttttttttttttttttgaggcagggtctcactttgtcacccaggcaccacccctgagtggtcttggctcactgcaacctctgcctcctgggtccaagtgattcttgtgcctcaaccacccaagtagctaggattacaggcatgtgccaccacacccagctaatttttgtatttttagtagagacagggtttcaccacgttggccaggcagggctcgaactcctstcctcaggtgattctcccacttcggcctctcaaagtgctgggattacagacgtgagccaccacacctggcctcatctttgttttttattgaaagtcaaggctatatagtctgggtaaagagtgttgctgagtgagtctggaagaaatcatctgaagcaagaactatatgatttattgcataacacaaaaaggatatgtagtattttgttcatacatctacctaattcttccttaaggatgcctcagatccttctgccataagcctttaaaatgaaaggcaatacacaaaaaggtagaatatgatgctcaccatcattgtagaactaacaggaaaggtggcagcctagaaaggagtgagtattattccaagaaagaaacaggcccatacacaaacaactgcaaatacgttgtggtgacttaactaagagattagacttaatttaaaaagtaataatgatcttattcatttcaatctaaacaattcagagttttaccagtttattttagagaaacatggacaatactattgccctcatcccaaaatatatacagagcccttatcatgtgcatggcataatgaaaagcaacaatattctattttaaggaattaggtgcctcttatagtctaaaggtcagatctagaaatactgttctctatttgggcttccaaatttccctctggtctgaagaacagatctctcccttgagaagttcagcttctcaaacaatgtcaggcacataataggactcaggaaagatctgttgaatgaatgaatgagtgaatgagtgaatgaatgagctcatgaacggggtgcctgtcacttcagcaaacaaatgtctcaacacaaaaccacaagcagtggtgtctgcctgtaggcccagctagtcgggaggctgaagtgggaggactgcctgagcccaggagtttgaggctatagtgcactatgattgcatttgtgaatagccagtgcactccagcctgagacatattttaaaaagaaaaaaatgtatgaacacagacatcccatcctcattcaggaaaaactcagaatggaacttcaggcagatggtgaaaagccacacattctaccagttgctttaactgcactgtttccccttccaaacytggatttcttatggtctttacatcaaaagtagaagtgaaagcggattctccatggttgtgtgcaccttttgaatgataaatagtcaatcattttaaggcagtgtgtacaggggtggctgagtctggagagtgggatttgttgaggaaggtctgtacgaggagcccaaggcaaggatagcgtggggtasagaaggatgtctactgaggatagaaataggaaaggagaaatcaatgcaggaaaaacaggaagctctgtgtgtgtgtatgtgcacatttcacacgtgcataaaagtaaaatatgcaaatatatatgacttgaatcggatccacaaataagcactaaaatacaccagctacagagatgttctctgtaaaatacaccagaacagagatgttcacagcccctctaggtcaaacgattaaacgaaaagactgatggcatctgtgggaaagatgttttagcttttgagctctacagctttatatcaagctcatccaatcactctagggcactaaggaaaaagatgaaaaaaaatagcattctttatcattataactgatgagataaaaatactgacaagacagctttctgtccacaggaacaaacttaaactggttaacttgaaaaggaaacattcaaaaacagatgatatgaatacatggcgttagaattagggtagtggtggccaggcacaatggctcacgcctgtaatactagcactttgggaggctgaggcaggcggattacttgaggccaggagtttgagaccagcctgcccaacatgrtgaaaccctgtctctacaaaaaatacaaaaattagccaggtgtggtggtatgcacctgtaattccagctactcaagagactgaagcacaagaatcacttgaacctgggaggcagaggttgcagtgacccaagattgaaccattgcactccaatctggtgacagagtgagactctgtctcaaaaaaaaaaaaaaaaaaaaagaattagggtaatagttaccttgggtagggagtgaccaaaagggtccaaagaggggacttctgggatgacagtaatgttttgtttcttgacctggggacatggtgtgttgatgagtgaggaaattcatcccactctgtacttatgatttgtatgtatttctatatgaatattacactttagtaaaaagtttactcaaaatgcctacatagacatttgttttgttttgttttgagatagggtctcactctgtcgcccaatggagtgcagtggcactatcagagctcactgcagcctcaacctctctgggctmaggtgatccctcctatctcagcctcccaaggagctgggactacaggtgcctgccaccacatctggctaatttttgtattttttgtagagataggttttgccatattgcccaggctggtctctaactcctgggctcgagcaatctttccacctcggcctcccaaagtgcatggattatagacatgagccaccatgcccagtgctatctagaaatttcaagattatttcattggcaattgaatctctataaaaacacaagcaacttcaaaacttatatatattttctttaatgagggtggtgatggatggaattctagcaatgaagagaaagagagcctattcataagtcaagtgtttggagcttcccagggagatgagacgttagtcctacataattattaaaggaaatattgtgctacacttactatggagcccaaactgatgggccagataaaagtctaggctctctgcaggtcatacagtcatttagcctgtactttcctaattgttttcttctctggtattacyaaagggcttattaacctgctggtaaacaatgaacacagattagtggtcattaattaaggtcatgggtcacctaatagggatggctcagtgagtagtttctgttggtcttacgcagcacctgatagaccatcagagatgaccaggtcaaatatggctgtgtcacaactctattctctcaggaggaaatgctccttcctctcactttccacctcaccctttatggataaaggaggccaatacaacgtgggcctgccggggtcgtgtattcttacccagtcagattttgacgcctgcctctcccgtgaggtattccaccagggatcccctccctcattgacatgagcagacaggaccatgagggctatttgttcccaaactcctcaccatcaatatcaccttttttccrttttctccaacttcgagaattgggagcccaggcatggtggctcatttctataatcccagcactttgggaggtcaaggtgggaggattccttgagctcaggagtttgaggccagcctgggcaacatggtgagactccatctctgtaaaattagattaatacaaataaaaaataaaaagaattgggagaagtgactggtaatttctctttatgaaaagaaaatcccccaaagtattcttaatcatttttcatattcaaaggtaaaaatctgtcagcatcacatgatgactggtggaatttccagatcagaggtatgagcattccacaaaagtgtacttactcccacttcagcaaggacaattacatctctatccctatgaaatatcaggattctgtgcaagatttcgcaagtaaaaaaggagttttgatgattttaagaagttttaagggtcccagcagcttaggggtggtaagaattgcagccaggacagctctgcaaaggccctcgcagtgccggcccggaacactgccaggaagccggggaaaaggagcagttcagctcaagagacagtcatggagagactggcaagatggtatccaaacctgttcctgcagatgctgaaactgattttaaaatatacaaacaataaaagtaagaaagtgtaaacaaaagggaaaggaggagcaaaactatgaaatcagactcacctgcagaaaatgaagatgctaaaaccagaagaggccagactctggggaagcaggagagaaagcagccaaatctggtgagtatcctcaacygagtaccctcgattatctcagcattgccttcttgcagaagccagaagagccattttaccaackattttgtaaaggcaagtttttaatagttctagaaacacacttgtaagaagcaggaaacctaccccttcccttaaaaaaaaaawttgtttttgataagggtaaatacttttttaaagaagtaagctcatggcctggggttaggtttcttttccttttatttagtgcccyttccccaccctggttgtatatttttccatatacatcatacatttttcaatttagctattcatagaataagtggaaatcgaattaagggagacattgactgtagtctgagggtgggggaggggaggtggtggaaactgtgctagcagtttccaacatcccattacaagaagcacaatcaggctgggtgtggtggtgtgtgtctctaatcccagccccttgggaggccaaggcgggtggatcacttgagcccaggggtttgagaccagcctgggcaacacagaaaaaccctgtctctactaaaaacagaaaaattagccgggcgtggtagtgcgcgtctgtagtcccagctactcaagagaaccaccccagcccaggacacagaggttgcggtgagctgagatcgaaccaggtcactgcattccagcctgggccacagaaggaaaccctgtctcaaaaaaaaaaaaaaaaaaaaaaaaaaaaagcacaatccaatggcaatttaaagtcgtaatcatgcatttaacttataaacattttatactgcttagctttattcccttgtcttttactaaaattatttataaaactactccttgatctgggttccctgatggaasrgggtgtcctccatgacacytttgttcctggtaatccaatttttcctaataattttatcaatgtgttgtgaaagattggacagttttgagcatgtagtatctatatgaaatcgtgaattagtcaaattttagaccaaacaaattttcaatgttttaagatgatggcatttgaaaacctgtttctaaaaaaaataatttgtctccaaatcgtaagctaaaaagtcaatagaataactgtttggaaaagaattayagttgcatagctttttatattttcagtactcactgttaagaactatatacagggtttctgcagaggctgtgtcagaagccaaggcagcgggagtccggttttggattgccagcctgtgtgtgtgagtctgagcatgtgagcagctgtagcgccccagctccccatcagcatatcatcccggcaggagataaactacgttcagttaagtctgaaagactggaaggaattggggtgataagaaattgatgcactgttggcggggcacggtggctcacgcctgtaatcccakcactttgggaggctgaggcgggcagatctcctgaggtcaggagttcgagagcagcctgaccaacatggtgaaactccatctctactaaaaatacaaaattagccgggcatggtggcgcatgcctgyaatcccagctactcgggaggctgaggcaggagaatcacttgaacccctggagatggaggttgcagtgagccaagatcatgccattgcactccagcctgggcaacaagagcaaaactccgtctcagaaaaaaaaaaaaattgattcactttcaaggtttattaaactcaaaatgtctaaaaaaatcagtggcggttctgtggtagagatgcaaggagatgaaatgacacaaatcatttgggaattgaataaagagaaactcatttttccctatgtggaactggatgtacatagctatgatttaggcatagagtactgtgatgccaccaacgaccaggtcaccaaggatgctgcagaagctataaagaagtataacgttggtgtcaagtgtgccactatcactgctgatgagaaaagggttgaggagttcaagttgaaacaaatgtggaaatcgccaaatggcaccatccaaaatattctggttggcacggtcctcagagaagccattatctgcaaaaatatcccccagcttgtgagtggatgggtaaaatccatcatcgtaggtcgcattgcttatggggatcaatacagagcagctgattttgttgttcctgggcctggaaaagtagagataacctacacactaagtgacagaacccaaaaggtgacatacctggtacataacttggaagagggtggtggtgttgccatagggatgtataatcaagataagtcaatcgaagattttgcacacagttccttccaaatggctctaaggattggcctttgtagctgagcaccaaaaacactattctgaagaaatatgatggacgttttaaagacatctttcaggagatatatgacaagcagtacaagtcccagtttgaagcccaaaagatctggtatgagcataggctcgctgatgacatggtggcccaagctatgaaatcagaaggaggcttcatctgggcctgtaaaaactatgatggtgacatgcagtcagactytgtggcccaagggtatggctctcttggcatgatgaccagcatgctagtgtgtccacatggcaagacagtagaagcagaggctgcccactggactgtaacccgtcactwctgcatgtaccagaaaggccaggagatatccaccaatcccattgcttccatttttgcctggaccagagggttggccctccgagcaaagactgataacaataaagagcttgccttttttgcaaatgctttggaagaagtctgtattgagacaattgaggctggtttcatgaccaaggacttggctgcttgcattaaaggtttacccagtgcgcaatgttctgactacttgaatacttttgagttcatggacaaacttggagaaaacttgaagatcaaactggctcaggccaaactttamgttcatacctgggctgaggaggataagtgtcttttgataactaggtctacaggttttcatttttctgtgtcacactcaaggataaaggcaaaatcgattgtgtaatttgtttagaagcyagagtttatctttwttgtaagtttatagacatatatatatatacagttattgccaccgttgtgaatatgggaagggactttaaattttattttctggtagcagcctaggaattcggttagtactcatttgtattcactgtcactgtttctcatgtyctaatataaatgaccaaaatcaagagtgctcaaagggtaagtgatagccacagtattgttccctaaaatatgcataaagtagaaattcactcccttcttctcctgtgcatgaccttgggcacgggaagkttttgttkttaaagatgtcccattacgtgatgtagagttgtacgttaaactcgcacgtgactggggcaaactatgagtgcaactcaaacgcgttgaagacactgcagtcatttttgtaaagagcttgctgaatgtttccaatagactaaatagcttttaggccacaggaaagtttggaatctgggataaatactacctggaggtttgggaaaaaaaataaaagaactatatagaaatgaatcattaggtctatgtactgatcattaaacaaaaacaaaaacaaaacagtaaaatatcaattaaggtagaaaaaaagtctaaaaacagaggtatggtagaaagagcactggatttttaggcaggtggacaggactcctaacccagagaagttacgtgatttgtgtgacattgcagagcaaatgttatatggcaaagccaagacttgacccatgccttcaggttctcagccctgctgttcattacccaacatggcygctcagaggtgactcttcatcctacagttatgcgtggcttgcaaagccaaagagccagaaatgggttcaactctagatgttctcattcactagattgcctgtagcaatgattctcagtacttgccatgtatcagattatatgaaggagctttggaaaacatacagttgcccagatccctcttccaaagattctgactcatttgttctggggtggggcccaggtagttttatttattaaaaaaatctccctggctgattctcatatgcagccaatttgatgagaatcattgttttctggcactggttctcaaccctggctgcacattaaaatcacttggggagctttgaaagctacatgcctaagtcccatcctcagaaacagtcaatcacctggtctgggtgcatcctgagccctggcctttgcaaaagctttccaggtgatgctaatgtatagcagatatgagaaccattgctcataggcttcccaaaccatgcatccttagtctaaaatcatctctcagggaagggcctgatcatcagcgttctgaaaactctagcactgtcggtgttcaataagtgcttgttgaaagaattgcctcatgagaatcaatgtctattgacaggtgagaagaaaagggcaagtttaagaaataatgagcatttaatatgaaaatgtcctgagggtggattatatagttagttaagcaaatattatgacaatatgcagatgattttatgaacacaaaggtggccttcttaagtcgtagaggctgctatcctaaacctgggatagtcttacgtagggtaaacacacctggtagcaattctttaagcatactctgagaatgcccctggatggcagatgcatctaaatgtgtgttccaagctggggaacccaagtagctaacctggaagttcgttccttatctatgataaacatctgagccccttgcatgttccatggaacacaggctgtacatcaaggccctgagttttgggttaaatgaaggttgccaggtggaggttgtcacggggagggtgttaagtggaaatgctatggaaactgcatgctgtttgcaggtggctgcagttttcctgcccaacccactgccactgggctatgtggttatgttgtccatcctgccaccgctggactctctcccctgtatgtaattccctaataaaaccctgtgtctcatttgctggctcttggtctcttctttggcctcttgaacctggtaccttccctattgagattaataggagtttggcacaacaccttatccccaagaatattgtgatagtgagaatcagcaaattctacctaccttaactgatccctacctcagacagaaccattctttactgaatccaacagcagtctcagcacaaggcatctggaacactggataattctcttaccaaatgctgtttccagtatataatgaagaccacgacccaccagtgggtatttacactatggaagagctatttgccttcacggatatgagcagactaggaaaagaaaaatgatttccccttttaacttatttaacaagaatgttaactgacaaagcagaatagcaaaattgtctctgctgcataatcccacatttgcaataaacatgacctggaagaaatttaccaaaatatgaacagggctcatagttatctttggatagagagattatggtgatttttatgttttcctttatacttttctattttctgaatgttctgcctagtacagatattacttttaataagaaaaaaacacactattctttaaaaattgtgtgtgtgtgtgtgtgtgtgtgtgtgtgcaggaggtgggttaaaaaaatttaaggtgctcaagcttggggaatgactatcagaggcatttgtaaatctgctggcacttagacaaggaggagcaggtttgcccgacagtttgaaaactcagcaggtccattagtgctttcataagcaggtggagattttgcaagcctggtgtggagcttgccagcgtcagcaaagttggtatcagccaggtgaccaataaagatgaggttccagtttaacttttgtctgtccacttggtgcctgacacatacgaacgcatctgaacactcttgatgtcagactgctgttgactgataatgttaaatgcatggagaagacacgaggagaaactattcagaaagattcatggtacaaacccctaggttctaacacttgaccgaagctgctctcaatgtctataaatctatttggtttggaagtcaggtgcaaatggcatatggatgaatctcttagagaaaatttagctgaacttatgtgcttggcttacccgagaagcccagtgagtatcatagaccagtaggagctcccaggtacaacctcaaatccagtagcaatgtcctcttaccttcagcaacaaggctctctttcctcagaaacttccaactcttcataaccatctataagacgacttctttcaaactttcatggtccagtgcagtggctcatgcctgtaatcccagcattttgggaggccgaggtgggaggattgcttgcatccaggagttcaagactagcctgggcggcattagccaaaccctgtctctacaaaaaataaaaaaattagctgggtgtgatggtgaatgcctgtagtcccagctactcaggaggctgagatgggaggattgcttgagcctgggaggtcaagtatgcagtgagctatgattgcaccactacactcagcctgggcaacagagtgagaccctgtctcaaaaaaacaaaaccaaaccctgatgctcaatctctttttgctatgaacttcttctacctctttcttgaattttccacttatcttctgttgcgtgacacagatattcttccttcattactttcctgaagcaaaacttccccttaatatcctcaaccccaatacccatcaacaccctcctagtgtccttgaacacccatcccatctcaccaccagcagaaagccttacaatcaggaagttttattttctgcttaacttaaatgtcatctattataaattgaattgtaaataacttgagggaagccatctatttatccatctttgtatccctccaaaagcacataggctactaaacatttgtagaacaaatgagtttcctctgaaagaacaacagtagcattttataatgacatcatacatttgtttatatagagccattttcaaagcatatgagccttgcagctgcaaatgggatctgcagaactgcaaaactgacctcttctgggagttatttaggaaaaagttatctttgcctcctgctcccttctgctccccgcttcccttatacacaccgactgaactggaatctgagttttaataaaatcccaggcaattcctttggcattcaaggttgagaaccagtggtctagactagagccttggctctcaaccttggctgtgcattgcaatcatataaaaaactctggagcctgagctgcagccctcttctgcccatccgatttaatcaatcctccctgagcaataggattcttcttttgagacggggtctcgctccgttgtccaggctggcatgcagtggcgctgcagcctcagtctccccaggctcaggccatcttcccacctcatcctcccaagtagctgggactacagatacacaccaccaagcccagctagtttttgtactttttggtcgcccaggctggtcttgaactcctggactcaagcgatccgcccacctcagtctcccaaactactgagattgcaggtgtgagccaccacaccctggccaaaaataggatttttaaaggcgccccagtgagctgccagggaagagaaacactgtgagtgccttcatgggaactctccaaaactcctacaatattttgtgagcccagtgtgtcacctctatagtgatttccctttttttcccatgcaactttcccttaagattgtattacttctcatcttccataaaaatatcactcagttttatttctcagtagrcatttattgagcacctaagatttgcacaaacacaaaacccattcttaaacttcctttcacagtaaattatctaaattatctttcttgggctctttctccaccaatgctgttttctaattgtataagcattctttggtaccggtataattttggcttgtcatttccagagtagaggaaaagaaaattaattctattttgtctagttttaaaacaaactacagattattttaggccacagagatacaaaagttgattatatttaaaagcaaacagacccagtcctttaaccttgatcaatataccatgtttcactttctcatccaaactgtaacagctaagacttctagagggcttgcaatgccttgacaggtgctaagtgttttacctgtattatctcacttgatctacccgacaatgctatgaggtacattctattgttatctctattttttggatgaaaaaacagcagcacaaagaagttcagtaactggcctaaggccacacagcttgtcttcctgaagactggacccaaacccaggcagtcatagaacatgctggtcgctattgggccgcttgttctatgggggacggtgctccaggaacacagcaatgcggtttaggattccaggacctggggcagctgctgcttctttcttagttctcgacagaccactgagtgcagtttttctaaatcttttccccactttgatatgtggtccataaaactgcttccacacgtataacccactgtgaagtttaaaatgatttcatgtttgggcaaattcctactgaatgttaagctagataggaaacaagttctgactaacacagatgaaggtctgaatgaagaagtcttacttttataaaggaattttcccctcctcaccaaatccagttttaaatgttgatatctctgttgcaaaaagatgataaataaatgtgtcctttgctcagtagtgggtgtatgggtgtggatataagggtaagaaagttaagaaatgtccagtagtatacaaagggcattcttgggctgggtgtaatcccagccctttgaggggctgaggtggaaggattccttgggctcaggagttcaaggccagccctgggagttcaaggccagccctgggcaaaatagcaagaccctatctctaaaaaaaaaaaaaaaaaaaagaaagaaaaaaagaaagaaagaaaagaaaaattaaaaaggtaaagggcattttttaaaattattgctatttttttttttttttgagacggagccttgctctgttccccaggctggagtgcagtagtgcgatcttggctcactgcaacctctgcctcccaagttcacgtgattctcctgcctcagcctcccaagtagctgagattacaggcatgtgccaccacacccgactgatttttgtatttttagtagagacaggttttcaccat

SEQ ID NO: 93275 - DNA, 37036 bp, Homo sapiens
cacctgggaacttgttagaagcgagcattcttggcttcactcaagactgactgaatcagcaaccctggaagtagcgcttagcaacctgtgttgtaacaagccctccaatgattctgatgcagtttcatattttaggaccactatcttagaatatggaacctgccagacctaagacactagagtttagggcactggtaaatgcagccctatgaagttgtggtgtaaggcagaaaaacagccctagattttggcagacttggacatctgtccctcctgctatcagcgaagaaaagtgtcactgagtggcagatagaatgttttagcttctagtccctcaaacagtctccatgatacaaacactgactcagttaagaatccaggaagactcttggagactgcggttgctaagagtgacgaacttgaactgggtttgttcttttctttgggaatcctgcagctgtgcggcatgtagcacctgtgccaccacactcacgctcactgctcctccttgtgctgttgctctgtataaatacacctccgatgttggcagcccacggcctgtgattcagcctctgtagtggagcccaggcacccaatgtgctaagaatagaattttccatttcaactttatttgcaagaaggttttctgtatttcattcatcaggtattaaaagtctactaaataccaaggaattgtgcagtggtatgggattacagtggtaagcaaactgacatggtcccactttcaaaatgctctttctctggttggagagaaggggttttaaaaagtaaatgcgtcctctagttttgaatattttaaaaaatgtaaatgcagccaggcactgtggcttatgctatgcctgtaatcccagcactctgggaggctgaggtgggaggatcgcttgagcccgggagtttgagaccagcctgggcaatgtggcaaaaccccatctctacaaaaaaatagaaaaattagccaggtgtgatggtgcacgctagtcagtagtcccagctactcgggaggctgaggcaggaggttgagtccaggaggttgaggcttgaggctgctgctgtgagccgtgatcacaccactgcactccagcctgggtaacagagtgagactctgtctcaaaaaaataaaaagaaaatgcaaatacaaattgtgctaagtgtgactatgatgtctaaatgctcccctcagaaatacaggagaatgatgcttcccacactcctattcatttcacctacttaaagctttctaaagcgatttccaaaccttaatgccacatgaaaagatacgaagcctttctgctgccttcagggacctacttctagactggagctcatcactgacatcatatgctaatgtttctagagcatttaatgaaagaggcattatggcatataataattataactgttttggtatttacaccttttgatccagtcacttctgggcatccctccaaaggggataatgtggtccttagaaaaaagctgtactgctaaagatagttactggagctttatatattcaatcaacaaattaaatactcagttattactttgctaatgtgagtaaattgcttgacctccctgggtggcctgggtaaaatggggagataatctctatctcaagtttgtgacaactaaatgtctgtggaaatatctccctagcactaggctcaacgaagagtaggtgtgctctggatgggctcttttcaccttccctttctaattatgttgcatgttattatacatatgatgagaatctatgcagtttttctgtttgtttggatgtttttttgagatggagtcttactctatcacccaggctggagtgcagtagtgccatcttggcttactgcaacctctggctcccgagttcaagtgattctcccgccccagcctcccgagtagctgggactacacgtgcacaccaccacgtccagctaattttcgtgtttttagtagagacagaggttcaccatgttggccaggctggtcttgaactcctgaccccaggcaatccgcccacctcggcctcccaaattgcttggattataggtgtgagccaccacactcagcttcatagttagttttttgagtcagaatttcactctgccacccagactggagtgcggtggtacaatttcggctcactgcaacctccgcctcctgagttaaagtgattctcctgcctcagcctcctgagtagctgaagctacagacagacaccaccacacctggctaatttttgtgtttttagtagaggcagggttttgccatattggccaggctggtctcacactcctgagctcaagaaattcacccgcctccgtcttccaaagtgctggaattacaggcgtgaggcactgagcgcgatggagaatctatacagttttatatcaccaccactcccctcaaaatgcgctgaatttggtcaaaaaccgttacttctccccttcgcctggattctgaatggtagcattcaggtgtcgagtggttggagtgtcctaactttgaccaccatcgagtgctgtcctttccttgggtgctaacccactgcttctcctggttcccaggcaccccagcctgctgtccatgtgcaggccaggaacccctgactgcctccatgctggcggcagcactttcccaagaacagaagcaggtgctgagtgagtgacccacgcgcctacgaaagaagagagggccagaagctggtgctgacgcagacaccaaggttactgagattccgtttggttttttatgaactatcttccccacaggagacatttgttcctccttatccaaacaatgcattcaaacttggctgtaaagattgtaggaagagatgcacagggcaaggtgggaatggagaggggctggtgagcttccatgccctctctaggcatgctgtgttccaagcacatcaatgtattcaccaacctggaaactccccaaaccgcatttagagtgtttatatgaggtttcattacctaggcatggctgattaaaccactgggtgttggtgattgaacccaatttccaaccccctcctctcctcagaggttggaggcgggagctggaagtcccaaccctctaatcacatggttggtttctctgatgaccaacccccatcctgaagcgagctaggggttctaccttgagtcatctgcttagcacaaacttaggtagggtcaaaatgggctcattatgaataacaaaagacacagcactcaggatattccaatgattttagaagctctgtgccaggaactaggacaaagaccaagtatctattttttattataccacaccacataaaggacgcctggtcagattcttcctgagagtgaccttttgttttggaatagtgacgggtacacaaagagctctcctaatcagatctcacagcctcattcctataagtatcaactccctggtttggcatgaggttggtaaggtcagctgtgtgcgcagccactgcttagctctgggaatacaatgggtacaggccgtggtgtcaaataccttcatctactgggagagagagacatacctgactatagttatagggtgtattccaattgacttctgaacttggggactatggactctgtctataggggatttgggtgagtgaagcttaactaggacctctgacaaggactggtgggtgcctccagatggagaaaagaaagaactcaatgagcaaaagcagaggcaaggaaaaagagcccatggtaagtaggtgaggaactgatgtggaggtcagggttgacttgaggtaggcatggaccccttgtcaaggaccttgttagcagcatcagtgatttaggtagggagttctagagaatttaggtttattttgaagaaagataaccctaggccgggtgtagtggctcacacttgtaatcccagcactttgggaggccgaggcaggaggatcgcttgagtccaggagtttgagaccagcctgggcaacatggcaagaccctgtctctaaaaaaaaaaaaaaaaaaaaaaattagctgggcatggtgacgtgcacctgtactcccagctgctactcgggaggctaaggtgggaggatcatttgaggctgggaggttgaggctgcagtgaaccatgatcatgtcactgccttccagcctgggtaagagagcaagaccctgtctcaaagaaaaaaagaaaaaaaaaatcaccctggacaagtggattggaggaacagagccactatcaactcttccttagtctactacattaacttcctggtctcctgggttccaatcaacccatcctgggcctagtgtcagagcactgtctaaaatgatgtgagcatgtaactctcctgttgtaacttcagcagcttctcaaagctcccaaatcttccagaaggcttacagcaccctcatgatgtggccctctgcctacctttcccacctgatatgccctccaccccaccatcccaggctctggtcttttagttccttgagtgtgcggaagctgcctcctcctctctctggctccttttccttcagaattcagcttaaatgtcacctcaggaaggtcttaaccccctgctccatataaaatagatggtcccattatttcctaccactatgtcaacctgtaatttatatattagtgggtttagtccaagatgttactctaaactgcaccattttgtaagctccctgctattctgcagaccttggtcaaagtgaaacatttcacaggggtttgggctgtgagaaacatcctgcctaaccacccgaccacaaggcagacaaaggcccaactaaagaaacatccctctcatatcttcctgggcaaaggtccaagggacaccatgatgacatcccactggaacaagggccaaaccgcctcatcatgagaacatctttatatcaatatcctgctaggcagcaacccatactgcccagacccctaccgcccatacctataaattgcccagtctgtaagcagtggtgggcactggcattaggctggttccccacttctgtaggttattatgctggacataaagcctgcgtttgctgtcgagccgccctctttctgtgtgtgtgtgtgtgtgtgtgtgtgtgtgtgtctttctttaacccttgccttcttttcaaaacctaacacgagtagacaaacgttctttctgaagagccagattgtaaatattattgtaggctttgcaggctatagctcttctgcccttgtagtaggaaagcagccacagtcatacttaaaggaatgagcgtggctgtgtccccataaagctttctttacggacactgaaattttaatttcacataattttcatgtgctaagaaaatatacatatatattttgtgagatggtgtttcgctctcgtcaccctggctggagtgcaacggcgcgatctctgctcactgcaacctccgctacctgggttcaagcgattctccagcctcagcctcctgagtagctgcgattacaggcgcccgctaccacgcctggctaatttttgcatttttagtagagacggggtttcaccatgttggccaggctgctctcgaactcctgacctcaggtgatccgcccgcctcagcctcccaaagtgctggggctacaggcatgagccaccacgcccggccaagaaaatatagtttttttattttttccaactatttcaaaaggtaaaattcattcttagctcccaggttgtccaaaaacagacgcgcaggatggccaagcaccagagtttatcgtttgcccataataatcgggttgattcggccaaggtttccctcccccaacacggtgcgcactgggaagcgcgaggaccacgtcccttggtttaccactgcgcacctcacaaggcgcccagtgcatccgggtagcgggatgccggttggaccaacgcgagggtgggcggggtctaagagctaagcgttgggggcggggcgggacagtggggaagaggacgggtcgagtgctggcttccggcggaaaagcgcgcgagcaagatggccaccaccaagcgcgtcttgtacgtgggtgagcaggaggggttgctaggcggagtctgagtgaacgcgacccccaagggtcggggcgtggggtgggacgcatctctgaaccaggaggacggcgagctgctgtcaaggccgggtctctggcggtagtgctggcgatagctctggctgtgcttaaactccttccaaggtttcccactgtcctcaggaaaaagtgcagacttcttagcagtacgcacttytccagcttctttgctttgcttcccgattcgctgggtctcccgaaaaatgacccacttgcccccaaggttcaggttatttcacacctttgggcctctgcttttgcgactcccttgcagtgaacagccttgccacacacctcaggtgcgtgaacccgagacggaatgattattctgacttcctagcccgctgagctccagcgggccccgaggagcggtaaaggagtattatggcccttcggatcctctcgttcatttgttttacaaacattcagtgcagcgacggctcagccccagcccctgccataaaggaaggagttcccagactagccagaaaaaaagtggaattacctcagtagcacacttttgataagcgctgtagtgaggatggatcatgataatatgggcctggctgcgggacaaatgacccatccatctggagaagcgagggcaaattctggatgcggcgatgccagagctgatgagcaggagttagctacgtaacmgaagcagaggcaaggccgttcactgcaagggagtcgcaaaggtgtgaaatagcctgacacttgggggcaagtgggtcattattcgggagacccaggaaattaggaagcaaagcaaaaaagctggagaggtgggtactgctaaggagtttgcactttatcctgaggacagtgggaagcctttgaaggagtgtaagcgaaaagttacgggttcaaatttgcattttcctaagatcattctagttggctttgtggagttgatggaatggaggcagggaggtcagttgtgaagctattgcagtaatcccaggactagatgagagtctgaaagaagggcgaagagaggaatatttttcataagtatgggtgggcagagatgagagggggatgtttgtttacccaaagaactgaatggaagggtcctgtcccctggctagcatgctaactgggctgcaaggacttctgcaagagtatggagatcagtggctcagaaggcccttggcttatttgcaggtggactggcagaggaagtggaygacaaagttcttcatgctgcgttcattccttttggagacatcacagatattcagattcctctggattatgaaacaggtgagttagtgtctctcacgttcagaatcctcttactaggaaaataccttaaaaaattaaagtcacatcacaattctaaatatgcattctaaatatggttagtatacactacaggtaagttcaggaaggtgtctggtgacagtgatctcgatggagaaggaatgttctgaggccatgtggttgtgaactctgaatactttccagagtcttcagctgttgggttgagataagacagatttttcaatagaccagtagggagataggtttgaactacattgagatttgaatgttgttttaatctacctgatgggtaccccatcccacctgcaccttcttgcagctgtgctattaaatgaggcagcrggaaagcctagccccataatgggggtgggtgagggcgggggttcttggcctctgcacccctgggtgggtttcccatcgattggtatcacaaccacagttcagttttctgtttacctttgttgtcatttttaagattatagttttaggcctagttttatcatcaaccttgcatatgattgttagcaaagtctttaaactctctgggcctgggraatctttatttgcaaaatgataaggttatgttggctttctaagggccttctagtctctgagttctatgataaacattattgtgcttggtctttctagttagttcagcattttcctgaagataaagactgagcatctttatcaggttttaggattcatgctttatgcacagttgatgcgcaaaatatatatttagatagataattgataggtcaaatgacttyatttttctaattgctttgcatgcaatggttaaggttttaagtttggctttcgtagaataattgaatacttatcaattaaaaatacagtttactattcagctatgtccattaaaaaaacaaagtttattattgcttaaaatattgtataagaagaatcaagaatgagattccttcttcctaaatagtgattggatagaacttctggtgtttggatacgacatgtaactgacttcactttgtgaccatcctgtttcttcccactaccccacatagtaattacttgtttttgtttttccattttgtagaaaagcaccgaggatttgcttttgttgaatttgagttggcagaggtgagagtctgtgttactagtgtctagtccttggtttgtgatgttgttactgattacaaaggaagcttttcaccatttggttaggttkttgggccttaggctgatgcttccagagagatcagaagtaagtgctgttctaaggaaagcgtctctcacataatcagactggactgtgaataacatgtcagacctgccaggccctcccattcttgccctgcagaggagctagctcatgcacccctgttcattgagcattcttgcctggaagtagtgattatttcttgtgccttcaactagatggcaaattgttgcaccaccagctctaaaatcagccaggaagtgctctttgttagaaacacacaaaacctaggcaagaaatacagaggtggcatttttctggatttttgctactgagcatgtgtttagacaccataagaagcatttggctgcaagcctaaacttgtacctttgtctttccttggcaggatgctgcagcagctatcgacaacatggtatggctgggaatcttaattctaactaaagttgctttttggtggtacagaggctccttattcatatatcagtgttctggacttccaaagttacaaggttgcatggggaggtaaaaattctcacatgaaaatattcactgtgaattgatcacttataaaattagttcttactcagactccttcgccatttcagaataatgtaagtcctcatcatccttgttgaccagtctctcactggctctcccatgtttaggataatttgcagacacagtgcaaattgattgcacggtgtaactgcatattttgcaaaatagcaggatttcatgaagtgttagaccmatttacaattgagaagagaaatttaattatggcaggtgcaaatcactgatacmaatgatttggatattctggaaaggtccttgggaaaaatgatgatgctctttagtatttgtgccttccttgagatccttttagttttcatgtctgataagaagtgcaaagataccatactgttgatagaattttgttggaaaaataatacttcagtgcctgttacttttctttctttctttttttttttytttttttttttaacaatcttgaactcatgagttcaagacttctcagcttctcaagtagctggaattacaggctcaagccaacagggctacctgggctacctgttacatttctttctaccaagttacatttctttctaccgattagtgcatagttagtcctgaatattaatggtaagaaacttgtttttattatttttagtttcatcacagtmatttcccagtcagccttttaaaatttttcaattttaccacgaaatcttcatcaccacttcaagtggagtcaccttaaatgacctttcctggtaccgattatctttggataatgagatgttgttttatttgttgttctgttatccattcaccaaacatattcatcagctgtcagagatcatttttctttcatttcaaagcttatcttgacttttgaaggtgaactcaaatactgggaaactgcatttatttttgtaattttggagtgttctgaacccagagttacttttggtaatacaggtctttgtgtgctgctatgaaagaaaggggtgtgagttccctgaaacccacaggtggctttggggtggctgcatagcttactggtagaggcccagggattaagggaggacaaatcatgagtgtgtctcagaagtatatggaaagctggctggccctcttttaacctaagagagtttaagcagctggattttcaatcttttcagaatgaatctgagctttttggacgtacaattcgtgtcaatttggccaaaccaatgagaattaaggaaggctcttccaggccaggtgagtaggagcaacttccagattccctgtgatgttctgcagtttggccttagttgcattttttgtctctatttacttggaagtagatgctaaatgctgcttcctggtagataggagtagatgatggttcacattgggaagggcatgcaccacctttttagagaaacaagtgagtttgagcttctcagcaaagccaaagtgattgtttctgttatgagagaaattcctgcctgagctcatctttcccagttttcttgatattccattcctggggtctccatcaagggctgaaatcagcaaaggctacacctttgctttcggcatagctattttccttagccctactgagagctggacttcagggcctacattctggatgggaactttccttacccctgggagttctcagtggggaattgtctggcatacaggccacatrgcatcttccactttgctgaccaaagcagctacttttcagttcaagctgacagcttgaatgaacatttgtttgattctttcctttcagtttggtcagatgatgactggttgaagaagttttctgggaagacgcttgaagagaataaagaggaagaagggtcagagcctcccaaagcagagacccaggaggtgagaatgaagctcctgcttccagagcacaggccggcgctgtccacaggagactwttttttttaagttttaatggaaatttgccaatatgtatatcaaagtggagggaatgaataatgaattcttagtactttggtaaagtcaatattgagttcttagtactttggtaaagtcaatatcgagtgaattcaagggcgaaactttgggtctcttgtccatgttgtgttytatgtgatgagtgtctcagctctgctcaggtatggatttgtgattatcaactgacagggaggaagctgaggtgcccctcttcacccctcctgatcagtccccctccttcactgaagagtttgccacaagggtcgtggtcttcctattcctgtgctaatggaggggagacagaatagggtagtgtcccttccttcaacctgtacatgggttcagggttctccagtcctacgrgaacctgctggggcacttccccctgattctcagcatagtctctgacagttgcttcctgggygtcccctcctctgagtactttgtgaatgttgtcattcttctgtatttctttcttggctcatggtttctctctcttctctcagctgaaacagtagcagtctatctctagttttatgcagcctctgttatgctgttgatcttcatggtctctttctagtcctgagcttcagatatttctgcctgcaagtctcatgggcagcttaagtttgcctaaaatggattctcccgcttctctaatcctgtcttcctgtgttctcaatcttggctaatttgccaccattcatccacacattgacccacgccagaaatttgaatgcaaatcagaactcataaagtggccatcacagtcagtsgagtccccctggatcatcctgtatcctctgcttagtcttacctacttggagcacaatgcaaggcccaacatcttccactgtcttctgagcacttaggcctgagcaagagggctgcccccttgcttccatgtagttagccagtgtatatgcagggccaggcacagagggacgaggtggtacatggatgggtctgcctaactagaggacagtgggtgggctggaactggcatttgaagatactgagagttgtggatcatggaccagaaaagtgctgttctgtgactgtgaagcaagaggaggaagcagatgcatctgagggcaagcatgatgagataacacccccgtgtgtgaggctcaggttagccagtgctgagacctcctgtcgctgggcatccagctgggtgctacggccatggctcctgcctcctgcagccctatcagggcccaaggccttccccgtcagcacttgctccagcctacgcactggagttgtgttctgggtgggtgtgtagaatactcgcactcctacttagggcgtcagggagctctctctaactagcaatttcttctgcacctagggagagcccattgctaaaaaggcccgctcaaatcctcaggtgtacatggacatcaagattgggaacaagccggctggccgcatccagatgctcctgcgttctgatgtcgtgcccatgacagcaggtgagcaggacgctgtggtcagaacggcgggacgctggtggctgagcagtgagcctttcccaggttcttactgcttcacttcttgtgtccttgatattgcttctgacctaagttgatttgaggcatctcagatcctgggatctagtaacagataagtcagagcaggtgtttttgaagctttataagtgctggcttactgttttttaatcgttttttaaaaatacaagtaaataatgtattcttttttttaaagaatagcatatacatatattccaataatatttaagacaataaattgaaaattcattttcccctctctacatccagtcctcaattctagaagtaactagtgcttttattgagtattctttgtaatttattaaatattgacttctattctctttttaatctaaattttattatctagacatataaagagtcaattcagtttcacaaagcttgttttgaaaaaacagtcgtcccctggtgctgtccctgtgccctgctgccaacaccatttgctgctcctcagaggagcggatttcaactcttaggtgttttggtttytatttccatgttgataacagttttatatttctacttcctgttttccattttaaacattatcttctgattttctacttcagagaacaaagaattagttttttaaaatccccttccctgccccctcatcttccctgtataggtaccataattttggttaggtcctaagttattttaacaatgtaagcatcrtgtgataacctcctttcatgcacagcattttgttttgcctggaattgataattgccttgtttttgcatagttttctgtgtaatcattcctgattttctcccagaccatcctgctgggggttttgcatccaggtgtctgcatcttgttaaggggagatgagggcaaggctgaattcctcaacattcagtatataaactttcacataatctccatttgtcattatggtacctcagccctcactatgcgtaggatgtcctagtccagagaccctctgctttaacctaccaaagactagacccccagctggctaccaggttggggaggggtggcccccagctgcagagtcagggaaaggatcccaaagattaaccactttcttaaatgggctttcagccaaacttactgtctccaggattacctgcaccctttcctctgagcttttggagtgcaaattgagttgcttcttggcttttaccagcttaagattcagctttctcgggtctgctatatcatttaggactcatctattttgttttctaacttcagaaattttgttgctgttgtctcttcctccctgctttttaagtttattttttggctattttagccactttaaagtgtttgttagcagtaattactctgttcgaaatttttgaatcatcctaaacaaaaccacttattaaaggtacctattaaataataactccccattttctcctccccttagcttctgataacctctaatctttgtgtctatgaattggcctatcctagatttttcatgtaagtggaatcatacaatagctgtccttttccacgccttgttgattttgcatagcataatgctttcaaggttcatccttgtaccatgtatcagtgcctcattcctttttgtggctgaataatattccgttgtatttggataaatatcttgttcattcatttgttgatrggcacttgcacattgttttcaccttttgactattgtaaatgcctgtgtgaatatccacatgtaagtatatgtttaaatycctgttttcaattcttttggatatatatgcctaggaatggaaatgcttagtcatatggtaactctgtatttaactttttgaggaaatgccaaactattttccacagtggctggaccattttacatttctaccagcaatgtatgagtgtttcagtttttccacatcttctctttttttttttttttttttttttttgagacaragtctcgcactgttgcccgggctggagtacagtggcgtgatattggctcactgcaacctccgcctcccaggttcaagtgattcttgtgcctcagcctcccgagtagctgggattacaggcgtctgccaccatgcccagccaattttttgtatttttagtagagacgaggtttcaccatgttggttggccaggctggtctcaaactcctgacctcatgattcgcctgcctcggcctcccatagtgctgggattacaggcgtgagccaccatgcctggcccacatcttctcttaacaggtgtgacatggcatctcattgtggtttttatttttattccctactgactaatgatgttgaacatcttttcatgtgcttgttgaccatttgtatatcttctttggagaaacatcttttcaaatctttggcttatttattaactggattgtttgttttgttttttttaagagacagggtcttgctctgactcccaggctggagtgcagtggtgagaacatggcttactgtagctttgaacccttgacctccagtgatcctcctgccttgacctcccaaagcactgggattacaccgtgcctggccattttgttgttgaattataggagttcattatatattctggatattaaacccatgttaaatatgatttgcaaataagcattctcctgttctgtgggttgctttgccctctattggtacggttctttgatgcacgtcttaaattttgataaaatctaattatttttttctttcacctctgcttttggtgtgacatttaagaaaccatcaccaaatccagagtcatgaagatttgcccctatgttttcttctaagatcctttggtttttcttttaaaaaatcagtttcctaccaatttagtgtggttttaaaagggaacagagctcgaacatgtatattcaatcccccttcaacagaatctcctatagtcctggccaggtgtggtggtttacacctgtaatcccagcactttgggaggccaaggtgggcggatcatctgaggtaggagttctagaccagcttggccaacatagtgaaaccccatctctactaaaaatacaaaattagccaggtgtatggtacatgcctgtagtcccagctactcaagaggctgaggcaggggaatgacttgaacccaagaggtggaagttgcagtgaactgagattgtgccattgcactscagcatgggcaacaagagtgaaactccgtctcaaggaaaaagaatcccttatagtccttacaaggttagtatcacaaaggtttataatgagtatctcttattttaaaacaaaaatatgaacactaaaccaaagttttttcgaggtttttwattttgtcctattttttaaccccagcgctttttcctttctcaattccagagaatttccgctgcctgtgcactcatgaaaagggctttggctttaagggaagcagcttccaccgcatcatcccccagttcatgtgccagggcggtgatttcacaaaccacaatggcactgggggcaagtccatctatgggaagaagttcgatgatgaaaactttatcctcaagcatacgggaccaggtaggagccagttggcatgtggtgacgagggaggctgggcaagggtgggatggccaggcaggatggaaggacaggttgtagttctggctggcggacactaagagtctggaggagacccagccaccagacataggagaaccatgcagccttgctagggtggagttggcttgttgacattcaggtrctgttcatcccccaaccgtgtccacaattcctattagccccgcttggattctrtggtctgctgttgcaggctcttatgctctcaaccccactgctctccctgccctcaccatcagatttactcagtaaaatctcggtggttagtcccccagcaactagagaaaaaacacagaattgtactgaacaatcccacttgaaatttataactatagttcttaaggggacccttgccarcctgaccagatttccctacttgatgctcagtcccaaccggagatgatgtgtccatgcccgtcttcacttctgaagccctcatatcatcaccttcccacctcatctaatgcttcacctcctgcatctctccactcgtgcatgctctttcttccaattacaggggatgagctgtctctcctaggccagcctctccacctgtggactggatcctgtccctctcctctacttaggaacatggcttctaaagttgtccccttcttgtaatccatttcccctgctctgctagatcagtccattagcatgaaagcatgcagttatcaacctttaaaaaaaatcttcatccggttgccgggtgcagtggcttagtcctgtaatcccagcattttgggaggcagaggcaggcggatcacctgaggtcaggagttggaggccagcctaactaacatggagaaaccccatctctactaaaaatataaaattagccgggcktggtggcgcgtgcctgtwatcctagctgctcggaaggctgaggcaggagaatcacttgaacctgggaggcggaggttgtgatgagccaagatcgcaccattgcactccagcctgggcaacaagagcgaaactccgtctcggaaaaaaaaaaacaaacttcatccttgtactcttgttccctctccagctatcacccatgcccctggtcccccatcttttttcaagaagtaaaagcataacttcttgaaaacatggtacagacttgctgccttcgcgttttctctaatcccttctaggcagacttctagtcccatctcgccattgaaaccactcttgccaaaaatacgagtagccagttcttggcgatcatcttatcccacctcccagatgttatcccacctcccaggagcatttcatactacaggttgagtgtccctttcctgaaatgcttgggaccagaagtattttgtattttggaatatttgcrttatacttaccagttgagcatcccaaatctgaatatctcaaatctgaaatgctcgagtgagcagttcctttgagtatcatrtcagtgctcgtgaagtttcagattttggggcattttggattttggattttcacatttgggatgctcagcctgtactaactctgttctccttgactccttcttcacttggctggcaggactcctgcctcttcttgtctccttttacctagatggctgctttttctgtctttgctgtctccttcttttcctgacccttaaacactgaagtggctcagagcccattctttggttctccagaagcctgttaccctgtgctccgtttttctaactggtggtttgtagggcccctctttactatactgaactgacatgtgtaggtgatatagcccactgacccacatcgttattttaaaaatcagtattcatctgtaactataatagggaagaacatcagaggaaataaacgaatttgtataatactcgaatatgtttccagatgtacatgcttaagcacagctgtgtcagaacacaaagtgaattattcaggcgtctgcccctgtactcaaacgcagcagttagaaatgcagacgggagtgtcaactggataccactaggagtgatgctattggtgatacggctttgtgaaatggtagataaagttgattagagtccaaagtaaagaataatctgtttatttacatagtagttacattcctagaagattccatggaaaatcaaaagcactccaaaactttgggcttatatgtataatggaattatgttttaggtgcagataactgtaaacacattttttacctrtaccaatatctggcaggatatttgttgttttgttgttgtttggtttttgtttttttgagacagggtctctttctgttgctcaggctggagtgcagtggtgcaagacggctcactgcagcctcaacctctccagctcaagcagtcctgcctcagcctcccaaatagctgggattataggtgcacgccatccataatgccaggctaatttttaagttttttgtagagacagggtttcattatattgctcaggctagtctggaactcytagcttcaagtgatcctcccacttcagcctcccagagtgctgggattacaagcattagccactgcgcccagcctctagcaggatgtttgtaagggccaagaggatatgagacaattcattgtgccagacattgcagaacatctagcattccaggcccccacctgctaaatgccagtagcacccccacaatatttcagacagtcaaaaacactttcaggccaggcacggcggctcatgcctgtaatcccaacactttgggagtctgaagtggcagcccaaagccagaggatcacgtgagttcaggagttcgagaccagcctgggcaacatagtgagaccctatatctactgaaaaaagaataaaaaaattatccaggtgtggtggtgcacgcctgtagtctcagccgcttgggagttgaggtgagaggattgcttgtgccccagagattgaggctacagtgagctgtgatgcactcctgtactcagcctgggtgacagagtgatccccatctcaaaaaaagtaaattcagatttccaaaggtttcctagggacaggacaccaaccccactgagaagcagtgccctaagcagtcacacccggtcccagggctttcagcggtatctctgagttaagtttgtgcagactggcatctgcatgctgatggctccctgagctccagactcctgtccaactgcctgcctgttgtcttcactggatatcccacgagcatctcacactttacatgtctaaaacagctcttggccttctcccctaaactcttcctcctcctcttccctgtttcaataaatgactccaccatccacttagccgcttgatcagaaacttaggagtcattgtggacacacacacacatacatacatgtacacatacacacacagacacacacatatacatgtacattctcttacgtgacaaatgtccatgttaccaggcctcactgtgtcatagctgtcattttgaatggctcttttccactgattgtgagctccaccagagcttggactatgttctgctcatcagtgttcccagggcttaacagggacctggttgtcaagtagacacttaattgttaaataaatgaattaatgaaagaacagaccagtataaagtgattgaaacacctcacttaccatttcactgactattaactgaatccaagataaggtggccgcatttgcatgtgatctgtgcatccccgagtctgagcctgactggctgaagggctgtcaacagcctgcacagacgtcctttaagggctggtagccagggttcggggagctgatggttgttctctccctcaggtctactatccatggccaactctggcccaaacaccaatggctctcagttcttcctgacatgtgacaagacagactggctggatggcaagcatgtggtgtttggagaggtcaccgaaggcctagatgtcttgcggcaaattgaggtatgtggccaggaatgggcctcctccttacccaggccctaggagcacagccctgtgtgagggctggagagtctctgtggcctgagagagatggccaggggctgtgtccagcgggaggggctgctgctgcccaggttccggggtggaagtgggcaaatgggcaggcaggggttggtatccctaaaccactgttagtctccggccttactccctcacttctattctgccacaaaggcccagggcagcaaggacgggaagccaaagcagaaggtgatcatcgccgactgtggggagtacgtgtgaggcggcactctctctgcttccccctccgctcttgaccytgcatatccaggaaggaactgccagcctcagaggaggcagcaccgagggtgcctgtttgaagcaagcagcatttgggatatgtgcccttcctcagggtctgcttggagcagctcctctgcaggcacagcctggactattcccaggcacagctgtgggcccaggagccagctcaggtgctcccctccaccatgggcaggctgtgcaaaaagccacyggcttttctcagcatttgctgctgggcctctcctgggactaccagtgtggctcttacgtgttttctttgctaaaataaaccctagttcttatattgctcttcctgctagttcttgggagttgtcagagattgtgtctgtggctaagctggacctctgaggcaggctggtgagtggggagagcagagcatctttttcacagctttcatttcctcccttgggccgatccccttagatgtcaggtgatgtatcttcacaccaggcatcgatgtcagggcaacggaaattaaagactggaaagctccggtcttctgctgcctctgctcctaaacccagctgccggccttacagccagcaagtgtactctcagtggttcatttgtttatttgttcactttcaccctacagattttaaaaaatgaaatttttataactcaaagtgccttctctgtgccaagtactatgcctatttgtcaggagacaggaagccaacaaactacatgtgcctaatccagcccactgcctgtttttatgaatcaggttttattggaacacagccacgtccatttatttacatattgtccatggtggtttcttactgcagtggcagaggtgcgtaaggggctatagacacaatacaggctatggtccctgtattagggttttctagagaagcagaaccaatagggtgtgtatatatgtagaaagagatttattttaaggaactggctcaagcagtggtaggagctggcaagtctgcaatctgcacaacagaccagcaggctggagactcaggaaaaaaactgatgttgcagttcagctctgaggcagtttggaagcagaattcttcctccagtgatctcagtcttttttctcttaagaatttcaactgattggatgaggcctacccacattatggagggtaatctgctttactctctactgacttaaatattaatccatctaaaaaataggccaggcatggtggctcatgcctataattccascactattgggaggctgaggcaggaggatcacttgagcccaggagttcaagaccagcctgggcaatgtagagacccccatctctagggggagaaaaaaaagccaggtatggtagtgcacacctatagtcccagctactcagaaggctgaggtgggaggatcrcttgaacctgggaggttgaggctgcagtcagccatggtcatgccactktactccagcctgggtgacaagagggagaccctgtcttgaaaaaaagaaaccatcatcacagcaacatctagactagtgtttgactaaaaactggataccatggcctagccaaattgacacacaaaatagaccatcacagtcccaaggcctaaaatacttactatctgagcctttacaaaacaggattgccagccactgaagagaacaaatggtcccaccccctgctgagctcacagtctggctctcctgtgtgcagccacttcttggagctggcttctctccactccccctccagatgctggtcagccaggcrgttataaagaatctcatctgctgaaggcttttagcagggactgagtcctgtagctgttggacacctcctgtgggttgggtcactcagaccattcagaatccactgagctgagcttttgcatcttggattgagatctggatgagccaggaggcaggagaggctaggtggtcctcatgaccctaggatagctcttgctgagggatggtggcattctgccctacctctggctcccatgtgcygactggactttgtgagctccarctgctacagttgactgagttcaggctccatgtagctgggatatactacatggttacccctcacccctatggagcttccaaaagagaccctccctcaaagcacagccccttctctgagtgcaaataatggccatcagaggtcagtcacaggtgttaggcaggcatctatgaagctggggatgatagcactgacttcagtgcttggacgagaaccaggagagagtgtgtagaaaaagcacagccagcctcccataaaaggacagactcctgtgacaaccttgtcactctgttcctccctgatactctggggaggtggaggccagtgggcagttctgaaagctcagcaggtttggagccattgggtgtggactcctctcccagtgttcctcctgggtgtycacagatgttattgaatgcacactggaaccctgcacaggtaaactgaggctttattggcgtgactgccaaaggtcacacagggtggtttggcagagctgggattagaagcccagcctgtctctcttcagtagtaatggagtcctgggaggtttactaggctttagcctcaatctgtggcggcagggtccacagccctggggagtgacacagtcatggtccccatgattggccaggacctgtgtggagagacacaggagacaagaccctgctcttccaggccagaagggaggggagccccagagctgggcagtggcatgccccacagcctggccacctgcttcggctacgcaccatgcagcagctgcacctggctgcctcgggaaaactctsacctctctgggaagtggagccagtggctctgtgggcgtcctttcctgcagcctggagagcaaagcggctttccctgggactgtgtggctcctgtcccaactggcctccccattccacattcccattgctggaccagcaccaggactgggcacagggcttccttttgctgattcatttcccccctaactcattcagagttgagccccatctgagtccccacatgctggccctgaaacggttacaaaggctgaaaccagggatggcaggcccaggatcagtgctgtggctgttggagtgtcctctccaacagcatgacagccgcctccaggtgctcccagcatctgttgcagtcatggcagcctcacggcaacctctgaagaaggaattatagaaccaactttttattgttgaaaatggagtcttgtagagttcagtgatgggaaactaaagtagaaaaagcacatcacaaagaaacatatatagtacagtgtgatcccaattttgtaaaaatatctgtaatatgtaagcataggtatttgtatatcttaagaaaaaaagcctagaaataaagccacaaaaatattaatagtgtgtttatttgacttgtgggactgtagtgatttgaattgtattttattttttatatatcccactttcctccaaaactgcattatttttttgagaagtgaaagacatttttgaaaaagggggtcaagtgcccatccagggttcctttcaaaaagggggccaagcagttgacctggatgggcagttcccccatgcaaattgccacccaagacacctggtgggtacagacctctctcagcaggacatgggatcccattgtctgggaacacagcaaagtttcacagccgctgccacaagtgacacttgctaggcctttaaaggctataagaatacaagtcccgccctctgagggatgccatgtgtagatggtttaggaaagagcacagctctgaaataaatacatcatcacctgcagaacacattttggtttaatggacagacatagaagtggctcaaaaataagcaaattcatttgtaataataccagcaaatacctattgttaagcatttatatgtcagacatcccaaagatttgtgtacatatttagtctttataatagctttgggaggaaagaaccaatatcatactctacaaaggaagaagcagaaccaggattcaaatctatttggcaccaaaaatctgcctcttgctacactgcctctattcctgtttctttggaccttytccagaacatgktacttccctgcctcagttagaagttagtgactacgaatcccctgctgacttggcctcaaggccagtattgcaccgcaaggaccaagactgctgggcattcctcttttgcctgttgtatgcgtcctctcttcctgtcaactgtcattgatttctcattgctgtcagtagatctgaaacaaccaccaccatcatccttccaaccctcatctggtgcaacgagataaacaggccatgccctgagcaaagaaaagggaaatggtggtatctgtgctgccagcctgggccacccactgcagatgcacatgcttggctcagcaaacggataaggattaaattcatggactttgtgttcattcacaattgtttcattgctcaagggatttttctattttatttcatttggtgactatctggatgataaaagttgctgaaagtctgatggccaactaggtagacaaagccttatgtttttccattgttctgtatgaaccaggaggatcacggctcgtattggttcctgctatgcacagcttgattaatgggtaaggtgtactccatatctacaaaccttcaggtagtttacagacattcttggtgcacccctaactatgccagatcattggctgggcactaaagatacaggtggagtaaaaaattaattgtcaaaataactggctaatttaaaatttacaattgcctagaagaccatctttgatgttaagaaggaacaattaagtaaatactaggatggcaaacaggttccataatttcattttgttgagacaacagttttgctcatgtcaccaggctgaagtgcaatgttgtgatctctgctcactgcaacctccacctcccaggttcaagcaattctgcctcagcctcctgagtagctgggattataggcatgcaccaccatgcccaggtaatcttgtatttttagtacagayggggtttcactgtgttggccaggatggtcttgaactcctgacttcaggtgatctgcctgccttggcctcccaaagtgctggggttataggtgtgagccaccatgcctggccaggttccatgttatgtgccaactctgcttcgtgacagccaccagagccccacattcagggttatgaggctgcttctggctcactatgaggagttggtagacagattctttggctgaaggttgtttggagatcaaaaagtgcagatagaaaatggaggcgcagataaggaagccacctacaaggcaggtctcttcacctccaggccagagctgagatccctgtgctgatagggaattctccaacttccagacagcctggggctgccctttgcgtacatgggagggtctcttcctctgcgcttgcacatggaggccctccctggtccaggtggaggggctgctgtcccgcagtgtggccccagcctccacccctgctgctggaccagctytccccaggcccctccctgggggtgcagcacgtgaactccagagaggcgcatccttgggcccatggggaggtggaaccactctgccrggctgtgcctgtggatggggcgggcgcaggatctgcttttaatgacacggtttgggcagctggactctgtctattccagcaggtaaattacaggcttagcaagtcagaaatcaaataaacactccaactcccagtggctgctccaaggagaacagcagtttccgagaacagcagaggctgagacaaacctctccacccaactcagcctaattactacttgtcactccctgaaaaggaccttttctttgactcacaggcccaagacacaggacagggctgctgggcatccagggtgacactgactttggtgatcagcctgtttttgatggcccctggcctcgccccagacccggtcacaggctgcccatgttgccgatacatgctcgggcagggatggactgctcctcagcatggcagaagatggcaaccaggtttcactttacatcatatctgttggcagtggctgtgctgatcatttgaaaattccactcagatttggaagaaaaacattccagattgattactgatgtctgccattcagaggggaaagggaaatgatggcatctgtgctgtgcattgtcatcctgggccacccaatgcaaccacatgcttgctcagcaaagggaaaactccacagagctgagctcctggtggggcaacatggtggcagatagatgggtcaattggaagccccaagatttttctgtttctccaaagtaaaatgtccatgctcttacatgtctttcctagatggcagaggcaaatgcaaagcaggaagacaagggaagataaatgccattggctttagccctaaatcatgctgttcactcagctttttcttgagttgactccacatgtctacctgtgaccagtggatcagtgcttcagatccatgaatatacaatacttcaggggttatccagttttataccccaccttgcacctcggscaggcaatggggagccaaccagaccctgactacacacaccacaccctgtgatggatggtgaagagctcaaggtggccaacagtgggctccaggtgcctctcaggtcattccacatctatctcacgacctgagccagtaaggggcatggataggacctcagacaggacttctgtgccaaccccaaagaaccagccaggacatgcctccgggagaggcgtttgcatttgggtagaacactgcctgatgattgagaccacctgggctggaaacaggacagtcacacaaatgcctggcagggcaaggggagcataggagcctggcatgaaggagaaagggtcatgtacgtggttgtgagggtcctccctggcaatgccccggcctggggtctggctgggtttgagggtttcctgcttctgaggggcccratccagatgagaagggtggctgcagctgggccgggcgggtggactcagtggcagccgcaggccttgaccaccatgttgcggtgcttgcgcaggatgacattgttgctgctgtcatagtagagcacagaggtggcgctcagcttggtgggtgcacagcacgccttggggactgcgtctggcatcatcaggtgcacctggccaggaagagggcacaggcaggggcatgagcccagtggcctcctccaaggacccacccagccccaccccagctccacctgctccctgccctggccatctccaggccacatgggagcagcacaataataataactattaacaggaataagagcagtcctcaaggctccaggagtgggagctgtagtaacacgcagtgcccagggagggacacatggcagggggtgtgcagcaggtgggcaaggcgctaatgaggggcctggagtcccaggccaagggctcagacttcctcctggggataatgggaaggagaactgtgtggccaggtttgtgcccttagtgaggtccccaagggggagcctggaaggaccactttcttcttttggcccttcggacccccagaggctctgcctcccacaccctggcctccctccccagtctctgggaggccaggcctccgcccctctcctgtgctgctccttcccccagaggactgcatccrccctcagcacttcaaggccctgcacgtgcccgcacctctccactccccwggctcagcttggacctctcttctgaactccagacttgtggatcctgctcccctcgccacttctgcacttggggtctaatggggcctcagcggaacatggagttcctcccgccctgacatcatagcccccgcctgggaggcctcctggatgactcctcttgcctcctcccttccctgggagcagcccctggctcaacctccacctccatgctgccttggaccacctgccccgtccagctgccatcacctgtcaggtgaccacagcagccttcactcatcccctgctcctccaccttccaccaccacccccacccccaatcccagcctyccccagcagccagagagaggtccttctggagggtgacatggaccagaacactgctttgctaaagagctccgacagcctcttgggttacttggaataaaacaccttcattcagacccccaggccctaggggagccggccctgcccaccctggtgtcacctccctccgccctcctcccactcactgcacccagccccttctccctgctggccctgaacctgccaagctcactgctgtcttagggccttggaattgctccttctgctggaacattcctcctccagctgctgactggccccctccttctgtggagaggccaggcccagtctctccccactgatggagcagccactctgctcttcctcacaggaggcgtcacctccacggttgttttgctttggacaaaccaacaaaccgacagcctcccctagagcgcagcgcctgtctgtttgctgcccagcaggttacgagtgctcactttagttgagcccctgaggggcaggggcaagggcagaggagatggagtctgggagctgcagatgcagtcaccttcccgcgtgcctcccacacatgcagccatgagaaccacacggcataaagggtggctgggctgggccgccccacgcgtcctcatcatccctgggcctttccaaggaggtggctccaggtgtccagcaaacaccatttgactgcccagaaaggaagcattatcataggctcagagcagcttttggtaatttatttcctctcacaccaaggcatagtgtgcgcacgtgtgtgtgtgtgtgttttaatttttattttagagacagggttttgctgtgttgcccaggcttgtcttgaacttctgggctcgtgtgctgcgattacagggtgagccaccgcacctgatcaaggcatcaccgttgaacctcctaaggggaaaacataaggctgtgcaataccaggaactgggattctaggtaaaaagttctagaaggaagcctcggtgccagaatccacaaacacacagagcactcaacagtgagcagcaccagtgatcccatcagaaacctgcttttgtcctttaaggttgccccagataccaaggcatcaaaagccaggggatccagaaaaaacaaagatggccaagagagaaactgggggaaaagccaaaaggttgagagccacaccatctagaagcttcctgcctgcggtgcggcacaggtgggtgagtgcacacgcacaccccacacactgtgcacacatatcacgggcggtcagacttgccagcgtactcggcggcccgtgtgctaagatcacacagcccccacacagtgtacacatctgtttcatgtgctgtgcctctgagcgctgcacacaggtgcgtaagtgtcccacaggagtttgttcggtgcatagaacaggcatgtgtacacgactgttcacgtatgtccgtgtttgggtgcgagtctacgtgtagtgtggctgtataaggaccagttcctgcagagctgtgggaagttagcgacgttactgactgtgcagacaaagccccctgagacgcggagcaggtggcctcactgccctcccagccagctggaccagacccctctccacagggccccccaccccagggggctgggcaggatgggcatggtactgaccagggactgcaggatggcgtggttggtggcattcatgcaggagtccagtgggaaggagcactccccctcacagtaataggccgagtagccttggggagcgatgacccagtcctggggggcaagggagaaggtgagtcccatccatgtgcccctccctgagcctcagggcccaaacccatcctccagccctgcagggccgtctcccccaagaggcttgaatccacccaggaacccccggcagaaaaggctgggcaggagctcaggcccaacawcccccatatcttcactttgcgtcccctccccagccggccctcccctgcccacrcctcccagagctgcagtcgtagccaatgcagggaggtctcagttaccctgcrgcaatgctgacagcttagttggttgattcagtcttcattttcatggttttaaaaaaaacaaaaaacwgaacaaaaaaaaaaccctttctcaccatattctcactttagaaaacttggaaaacacagaagaaaaaaatacataagaaaattgaagtcaccatgattctatgtcctccctrcagattcacttctgatctacaggtggtgattgtcatttcagaaacaagragagtcagcaattaccagccagccraggtcctggaagctgacgtagagctcgtgccgacggcagacctgccggccgtgggagccgyggacgtcatctgcagggacagaaggggcaaggtcttttctggggttcctrctgtgtgcagctactatggggtaccagggtgggggatgccctgatgagcacatttgtcaaataaatgaatgacaggaaaccatttggtctcataaagcccatccctggaactctgcttgtaccatgacccagctcagaagcctgccatggctcccaatggctagagtgacactgtgcccagtcctcccctgtccttcagcctatgagcgtctttatgctccagtaaacagcccagcaggaccctcggccatcctgtgcctcctcctctctggagacccctgtgactccagcccaccctctcctgccacacccattcccgaggttcaagtggctcacgaccaggccagtcaagggccgactccctgggaaggagggcacggggttgggtcaggcctgtccctgatcctgaagggcttggcccagttggggagaaaactcgcataagcaaccgaggatcccacagggtgcccaggcacaaccgcaggtcatgaggggctgcggctcccagggaaggggcagctgattctgaaggaggctcctgagaaagacccggaggagccagggggagagagggagacttctgggcagcagggacagccaggacaggcctccggagtgccggtcaccagggtgcatcagggccaagatggtgtcaggaaaggtggctggagagtggccgtcagcttgaaccgacctgagcctgagggctctgggccaccacttggttctcgccctgcctctctcagccagaagcccacagggcctcggccccagcctgcccgaccctcaccaaagatccctgggagtcggttggcctgcggcagctcgttgsttttcttcggctgcctcctcctcagtggcctcactgcccgaggggtgcggatgggactcggactggccctgaagaaagtgaccacgaaaggctgttgggagcgtggggcccgttgacccagcaggccggccaggccaggatccacgctgtgccctgagacagaaaggagagaggggtcactcacgggcagyggccctgcagcagacacagcagcggtctctctgccggggcctgggcaggtccaggagcgtggaggctgaggacccaaggggtcctgctgagcctcagtttccacatctgaagcctggagtccttggtccagccccagccagtccacgtctctcctggggacagatttggaggaggtgggagggggtgctcagtgagctgcaggcggtgttattagtgacagctgcgtcacaaataataacatttgtgaagtgttttacaagttggaagatttttcccatggatcacctcattgggtccttacagtgaccctgcagctcctacttcacaggagacccagagtcctactgccagtgactccgagaaccagcgctcccaccttggtccaaggaccccgagacctgtgttctgtcttccgtcccgcactttctggggtgtgaatgtcaaacttatcaccgagacagctcgtggtagcatctgccaggttgagcgagtgcttgttctgctgggcacagcccaagagcagggcattaactgtctccctgatgcccacaagggagatgccaggcagagcagaaacattgaaccaagtcccagagcccaggttgcagcctgcggcagtctcattccagagcccgagttcttatgcacgagctgggcttatggacagaaaagaaagaaagaaaaggctgaaacagagatctgacttgggcctcagccccaggaggagtgaagcctgtaaacgggattgtcccccacagccgcttccagactgaggatgccgctgaaaacatgataactaaccctggagatgccaagcctcaccaataaaactgtgtatcatcctgtacttgtttggatttcaataacctttctattgtaaaagcaattaagtaaagaaacttttgaggccaggcaaggtggctcacgcttgtaatcccagcactttgggaggccgaggtgggaggattgcttgaacctaggcatttgagaccagcctgggcaacatagtgagaccctgtctcaacaaaaatataaaaacaaaaatgagctgggcatggtggtgaacttcccgggaagctgaggtgggaggactgcttgagcctgggaggttgaggctgcagtgaggtgtgattgtgtcaccacactccagctgggcgacagaatgagagtgtgtttcaagaaaaaaaaaacaaaacacaaaactttttctggttgtttaaataagtctccacaataaacatttcaaatttataaaatcccttggagcagtataccgtaattgacttgatattggctcatcatagacatgtaggttatttcccggctttcatgataaagatgggagtgcaatggagcctcttcactccgtgcatgggtgaaatttcctgatactgaatggcagaagcatgattaccagctcattttcatgtctctttaaacagtgccagttgttcagtttacacgaaagtacatttcacctccatgttataagcacagatgtacacacgtatgtacacacaggcatatgtttgcataaacacacagatgcacatacgctcagacagacatcacacacacagatgtatttattcctacgtagttctccagtacaccctacaggycaaggacactgcctgccccaccctcagtcccactcaaaggtcagcccttaagcagctgtgcctcagccctggtgtcccttggccacttgactgaacaaccagtgaatccagagaccaacctttgaccygtgacatcatccgccacaaacaaatgcactggcaggagaggctccctccctctcacgagcatggacaagagctgctgagacagggaggctgtgagctgcagatgctaacatgggaaggaggcccagagagaatccactgggcagggcttgrktcacggtgagtcaaggttatggggaagcagcagaaatacaaggaacagagctggggcacagaggaaaagacaagtgaggtcacaacggagagagaacagagcagcctgagtggggtggtggtggtcaccagcccgggcactggagtgtcactctgcagactggctgacccatggggacagcctggggcccagggcagccctcctggctccacttgcagctctgtcctgtgactccctggggagccctgcctgccatggggcctgagaggccatcagtcctgcaggctttcctcactatttgcttctgtgcagctgtgttcaagggtcttatggggggtctcccagacacaggatagaatgtcgcattagatcagttacaccacagaccctcacagagcccctctgagccaggcctggcttgggtgctgggaacccctctgtaggtctcacaggccaggcgagcctgactagggaaccttggaagcagctaatcccaggttcccattttacagaagcagaaactaaggcccagagagagcagcaactgtccaaggtcccagagcaaggtgggtcggagccaggattgtcatatacttttccagcaaactgcagggcccagctggatgtggctgggcaagatggggggtggtgaaggggactaacagtgggtctgggttcagagccctgcatctggcaggcctggagaagctcccccatccccagccctctccttccagagcccagagcctcccttctccatcagctctgcttcttacccacccattcttaggcaggactccctggctccagctggctgcagggaaggccaagcagtcaaggtggggggctctcaggctgcccagctgtgggcaggccccttccagaaaggtggagttggaggcccagagggtcacttgtccgcttctagatacctcagccttttccacactgctcctgggaaactgacgcccagggcaaatcaggtgcccctctccaggagccccaaaaggcaccccactgcccactagatgacatttcatttcaagcccccaaccccagccatagtccctggccccttttccacacccccagtctgtgccctccatgagcgccaactctccctgccctgctctccttcccaggatctggcctttcctgcagggtgaggctccaatgggcccctggaaagtctgtccttgaccagtgagaacttactactctgaccacatgcccccartggcckgggaacccccagagctacacttatgcagtgcatgcaccaggccaggcttggctgtcaacagcacgtgtgcacgcgtgcatgcrcacacacacacacacacaatcttaattttagtttttgagactatagattcaggaggaaatgcctcgcagcctcttgggttacaacggaccatcacacaagtggccagtttgggcctccatcccagagaggagggcctaagtgtctggtgtgaatgatgcaggaacaattcaaatgaagctgagaaaactcatctagtcccttggttagggttctagaactcctcctgtcctaggctgtagcctttggccacacacagatagaggaagcttcctggtggatttcagcaccggcagcctctcccctctcagtctctcccatcacccggtcccttcccttggagatggtcctgctttccttctacggacatctagaagcttaacatctcataggtcccaggaggagagatgtgggaggaggaggggaggcttcagggaaacaaaatttaacaacaaaggccccagaagaaataccagataacggataaaaacgttcaagaaggcygggtgcaatrgctcaagcctgtactttgggaggccaaggcaggtggatcacctgaggcccagagtttgagaccagcctggccaatatggagaaaccctatctctactgttaaaaatatatatacaaaaattagctaggcatggtggcacatgcctgtaatcccagctacttgagaggctgagacatgagaattgcttgaacccaggaagcaggggttgcagtgagctgagactggaccactgtactctagcctagataacagagtgagattctgtctaaaaaagaaaaaaaaattacagtaagctaaggttaattggcccaactcagtggctcatgtctgtaatcccagcactttgggaggctgaggcaagtggatcgcttgagctcaagtgttcaagaccagcctgggcaacatggtgaaactccatttctataaataaatttaaaaaataaaaaaaaataagcaggcattgtgatgtgcgcctgtagtcccagctactcaggaggctgagttaggattgcttgagcccaggaggcagaggttgcagtgagatcactgcattccattgcattccagcctgagcgacagagccagaccctgcctcaaaaaaaagaaaaaagaaagagaaggaaaaagaaaaaacaagctcgtgaagatagcatgtcttccaatcacaaactcacatctttgctcgcctatttctcactgcagtagtaaaatgtcccttcaggtgtactctgggttgagtgattttctccctcgtcagtttttatctccatttcatggttcaagtacgagggaggcgcttgaatcaaatcttgctgtgaatgcgctgagctgtgcacgctctgtgtaaacatcacagagcaaagcggacatccattcctcaccactgcagacctgcgccttgcagtgctcgagaaacacagtgaggaactgatctgttttcctgttgtttttaattaaagtcgcagctctctagaggagcactgtccacctagggaggaaagtaggaggccagtagcaaacccctcccagagctggggacatgtattcccctggggaacccggtggcatccgccctgaggagcgcaccaccccgcccagatccaggtcccgtcagggtgccacctgctgcatgggcctgaggttcggggacacagcaaaggcacaccccgtgctctttttgatgtcgtccaccgtcaggccctcccagagctccctcagcgtcagctctttcttcctgtgcacgtcaaacacggccttctcggtgatgatgcggtccacgcaccgcttcccggtcagcggcatggtgcatttctccay

SEQ ID NO: 93276 - DNA, 80679 bp, Homo sapiens
aaaaataaaataaaataaattgaactgtgaataattctacctcttgtaaacttgatgagattctctcagattcctagcttccagtacaggtagtttttgttgttgttgttgctgttgtttttgagacagggtctcactgtgtcacccagactggagtgcaatggtgcaaatttgactcaccaaaacctccgccttccaggctcaagtgattctcctgcctcagcctcccaagtagctgggattacaggcatgcgccaccatgctcggctcatttttgaatttttagtagagatggggtttcaccatgttggccaggctggtctcaaactcctgacctcaaatcattcacccgcctcagccctccaaagtgctgggattgcaggcgtgagccaccaagtccagcatgtacaggtagtttttatctgaaatcaagtatagtgagtttgatttgcaaaaatatataagttgggctggatgtggtggcttgtgcctgtaatctcagcattttgggaggctgaatcaggaggaaggcttgaggtcaggagattttaactagcctgggcaacatagcaagaccccatctcttaaaaaattttaaaaatgagccaggtgtggtggcacatacccatggtcccagctacttgggaggctgaggcaggaggattacttgagcccaggaggttgaggatgcagtgagccatgtttgtgccactgaacaccagcctggcttacggagaaagaccctgtctcaaaaaataaagtaattaaaataaattaaaaatggggccaggcgcgggggctcacgtctgtaatcccagcactttgggaggccgaggcaggcggatcaagaggtcaggagttcgagaccaacctggccaacacggtgcaactcgtctctactaaaaatataaaaaatcagccaggagtggtggcacgtgcctgtaatcccagctactcgggaggctgaggcaggagaatcacttgaacccaggaggcggaggttgcagtragtggagatcgcaccatcgcactccagtctgggtgacagatcaagactccgtctccaaaaaataattaattaattaaaaatatgtaagtctggccaagcacggtggctcatgcctgtaattccagcactttgggaggccaaggtgggtggatcacctcaggtcaggagtacgagaccggcctggccaacatggtgaaaccccatctctactaaaaatacaaaaattagctgggcatggtggcacatgcctgtagtcccagctacttgagtggctgaggcaggagaatcacttgaacctgggaggtggaggttgcagtgaaccaagatcatgccactgcactccagccagggcacagagtgagactctcaaaaaaatatatatctatatatacgtaagtcaaactattgagtcaggaagccgatagttgagtaagcaacaataacaaaaatatactcatggaaacataaggaatgatttgagacagtggctactgagtgcccattaagaagaactgacaataaacaatgttggagttcagagaactgacaaagagaacaggagtgtggtaatggaccaacgtgactggagagaatcttttccaggtctttttatagacaaactgtgactcagttttgttattataactcagagaattttctctgcatagcagcttgtcaatagcttaaaactttgtgttgtttttatttttattttattttttgaaacagggtcttgctctgtcacctcagctggagtgcagtggtgtgatcatggctcactacaacttcaacctcccaggctcaagcagttctccagcctcagcctcccaagtagttgggaccagagaagcccactactaaacccagctaatttttttttgagacggagtttcattcttgttgcccaggctggagtacaatggcgcgatctccactcactgcaacctccgcctcctaggttcaagcgattctcctgcctcagcctcccgagtagctgggattacaggtgactgccaccatgcccggctaatttttgtatttttagtagagacagggttttaccatgttggtcaggctggtctcgaactcctgacttcacgatccgcccgcatcagcctcccaaagtgctgggcttacaggcatgagccaccgtgcccagcctaattttttttacttttagcagagatgaggtctcgctatgttgcccaggctggtctcaaactcctgggctcaagtgatcctcctgccttggcctcccaaagtgctgggattacaggcatgagccactgcgtccggcctagagtgattttatgaaagcagggtctgacccctcccaggaacaacacaccttgccatttctatgttgaatgaggaggtggtggcagcctccaagagctcagatttcctcacgcctggcttcccaagcactcagttttggggacttacctctatctgataagagacagaccttggctgggcacaatggctcacgcctgtaatcccaacactttgggaggccgaggtgggtggattacctgaggtcaggagttcgagaccagcctgaccaatatggtgaaaccctgtctctactaaaaatacaaaaattagcagggcatggtggcatgcacctgttagtcccagctacccaggaggctgagacaagagaattgcttgaacccgggaggcggaggttgcagtgggccgagatcacgccactgcactccagcctgggcaacagagtgagactccctctcaaaaaacaaacaaacaaaaaacacacaaaaaaaccagaccttattcttcacctggccaccctgacacctccccttctagttagaggaaatgctatctacttcaagtaattctccttttttttttttgagacagagtctctctctgttgcccaggctggaatgcagtggtgtgatcttggctcactggaagctccgcctcccaggttcacaccattctcctgcctcagcctcccgagtagctgggactacaggtgcccgccaccatgcccagctaattttttgtatttttagtagagacggggtttcaccatgttagccaagatggtctcaatcttctgaccttgtgatccgcctgcctcggcctcccaaagtgctgggattacaggcatgagccaccgcgcctggccagtaattttccttttacataaatgccataatcccttttccctttaccttataatctcatcctcaggcccttaccccaaaataaaaataaatacctcctgaaatttgacagtgcttcattttctagattactaccttgcatctgacttccctgcagatggagaattgcccctagatttaggggttttgtttgtttgtttttaagtgcacagatattcctttagagtttcactgtgggataaaaataggatattagggtgagaaaaatcaaggtttgtgcctgacagttgattcaagcacaaggtaatgctatttgcgacaatatgttagttaaacccttcaaaggaaaatgaaatcaagaagtgtactccttacattttttttttttgagacagagtctcactctgtcacccaggctggaggcagtggtgcaacgtcagctcactgcaacttccgcctcccgggttcaagcaactctcctgtctcagcctccagagtagctgggactacaggcacataccaccatgcctggctagtttttttttatttttatttttagtagagatggcgtttcaccatattgatcaagctggtctcgaactcctgacctcaggtgatccacccgcttctgcctcccaaagtgctgggattacaggcatgagccaccgcgcccaggcctctttacattttagggagacatcatggtacattcattttctaccaaatggagtaaaaagagcttccgtagagacatttagcattgggcaggcaaatacatttatttccttctgtaacagcatgtgcttggcagaacactgagaactggaggttgagaaaaaaaaaagtggtcttcctgctcacttttctaagacatccttgctaacacagcattgccaaagggcttgcgtgtgaatcaccacaaagttaagtggctgatgaaactgagagtttatgagaatttctgatgaagcagcacataggagtgcctgtcggttattgtatgagtgtgatgcagtctataatttgacttgtttgggtctttttattattatacgttgagcttcactgaagcctgttgcaagcttttttatttttcctttgctatcagaattcttctgcttcatgatggagaattgaggctttatggcaagaatgctaaatataccttaaattacagacagaagaagctgagagatagttattatgttttattagcatctgattccaggcacataatcccaattctcataatttcctaatcaaagatgcatttcatttctgcactcaccccagtctagttggataccctctgaagtacccaggaaccaagccaagagcagtatcaagaaaagatagatgattatgcagatggcttgagtaaaacttgtctttaggctcccagcatcctcccacttcctaggctcagtactcctctaaagttgccagacttagcaaggaaatacataggtgcctgtatgttatctcattaaggcccttaatagctttatcttaatccttctgccatcagagcctatttttttggggaaaaaaattcagattactcatcaagccttagagcaatatttctctaaatctggtcccagataatctgcagaagaataacttggggacatgaaaaatgcagattcctgagtttcaccctagacttccagaattagaaattccagaggtggggactgggaatatgcattttaaatgtcctcagcaaattctgagacacaatcaagcaagacaattatttaataaccttagtgtctttcctctccaactgtacatacctgaagactccatcctacttgtagaaaaggagataacaaaggttcagtacctggcatttacaaggacctcaatcaatacttgttccctgaatcccttcttaaaggaactgtggacttcaggagccagaagacaccagaggtccctttccagtcccttgaagtaaaataagtctgaggctgtctctaatcacctccgcacaccgagggcctaatccatctacctgaccctgtctggtccaagctcctcgaggctggcacagctttggccgtcaggagagccttctgggcagtggctctaacagaaccatgtccaggacttcatccgtgggacaaaaagagtgaatcttcagtaagtctgtgtgcagagaagcctgagatgatttacctcatttctaagctactactgtactttgttgttgttgttgttgttgttgttttgagacggagtctcgctctgtcactcaggctggagtgcagtggcgtgatctcggctcactgcaagctccgcctcacgggttcacgccattctcctgcctcagcctcccgagtagctgggactacaggcccccaccaccactcccagctaattttttttttttttttttttgtatttttagtagaggcggggtttcaccgtgttagccaggaaggtctcaatctcctgacctcgtgatccgcctgcctcggtctcccaaagtgctgggattacaggcgtgagccaccgagccggccaactactgctgtacttcttaccccctgtatcaaagagttaaaatctaattttttcccaagatcggtctcactgtaagtctgctatctgtattttcccattcttcgtctgatagccaccgacattaatgaccagctcattacatgttgaggtgtggggagatgggggtagaaccccgtcaacccaggattcgagtttagaaagactacaagccccaaaatgcaatttcacctcccaaaaactaccattcccaacatgcaatgcaaccaggacgagccaaggaaaaaaagtacaagtgtggctgcaaagtttgcccctcttgttaccctcaggcaaatgattgatttagaaaggccccaggggctattttttgcaggaacggtcactccctaaatccaggcarggaaagggaggagtctgagccgagtcacgccccttctcctgtaaacttgggtcgcctctagcttagcgagcgctggagtttgaagagcgggcagtggctgcacacgccaaactttccctatggcttcggtgaccagggccgtgtttggagagctgccctcgggaggagggacagtggagaagttccagctgcagtcagacctcttgagagtggacatcatctcctggggctgcacgatcacagccctagaggtcaaagacaggcargggagagcctcggacgtggtgcttggcttcgccgagttggaaggtgggttgaactgtgccctgggctgcgagcaggccccaggcccacgctacatacctcccggatctagcgggccacttgcaatgcgagggaccaagggggaaagtcgcctagcttgggaccgtctgacttgcaagcgcatgcatcatagagggccgtgtggccatccrgcatttgggaaaaactrtaataaataaactatggcagttggcctctggttatccgttcaggctttgccccagttaacgtaaaaggtcagctgatggtatgatacacttcagcgatcctggagcgatctttgaactgcctaatctttgaactgcctgatacctggagaaggctggagaggaaagagcaggcaagagggggtgtggctcccacttcttcccttctgaagaaggaaattcaaatacttgcctcttctacttcyttcttccttgatcagattctctttgaggcytggttgtctcagaaatgctccastaagctcagtggttgcctagtacaccagctacccaataaccatttaggaacaaaatagagaagaccaactcagtgtcttctcagagatcaggtctcctaccaactaggatggacttttatcccagaatccatgggcaattaggatcaggcattaattaatacatttgacaactctattaatccgatgacctcattaaacaggacagacaaggtccccactcttgcggtttggctggggagatagactttaactcagtaattgcataaataaagaatgacaattgcagcttgattgcagcaaaggaaaatgtacatcatgctctcttagcaccatggtgtaactagacagaaaatgaggtgtgaaataaagctggcaaagggaaactgagagttaatactctctgctcagtggttggggcgtagacaaattctgctggagaggaggtttgaggttttccttttggtgtgtcattctgtctgtttggttcttccgatacgtaagatatgtaacttggctcatggttacatgttggccagaccagcctggccagcatggtgaaaccctgtctctactaaaaatacaaaaaaattagctgagcatggtggcacgtgcctgtaatcccagctagtcaggaggctgaggcaggagaatagcttgaacccaggaggcggaggttgcagtgagccaagattgcgccactgcactccagcgtgggtggcagagcgaaactctatcttaaaaaacagagagcaaatttcaattcctcagggaaaaaaacaaaactcagctttctgttgaacaccaccatgcccggctaatttttttgtgtttttggtagagatggggtttcaccatgttggccaggctgctggcgggcacctgtaatcccagctacytgggaggctgaggcaggagaatcacttgaatctgggaggcggaagttgcagtgagccgagattgcgccactgcactccagcctgggcgayagagtgagaccccatctcaaaaaaataaaaatatactctaacctttccctctgcctttctgtgtaacagctgaccataaagaaattaagaccctcattccagaggggtcctgccccatacccggaggaagraatgctgcatggggaggccaagaaaaatctgaacacaggccttgccgagtttccccactcactctattagcaacagatcttacccttttggtccaatcatatttctacatggctgtccatgttccattggacctaagcatagaaatggattgttttccttgtatctgtcggtcttcattctgaaagctcccgtgtcacataaaactataatcaaataaatttgtttggcttttttatgtattttttattttttagaggtggagtctygctctgtcacccaggctagagtggagtagtgcaattatagctgacttgcagcctcgaactactggcctcaagcaatcctcccacttcagcctcccaaagtgctgggattacagacatgagccactgtgcccagctgttttgcttttctcttgttaccctgtgtttgttgtagaggtgtgggctgtgactcttacaggggagatatacaacactctgttactattttgatggtgctctgatactacatttctagygcattaaaacctatgttaacaataaactggtaacagtggttgttaagaaaggatcctgggtrcccagggtgcagaggatgggaaggagacttaattttcactgcatattcttttaaaccatcagagtatgtaagtatatataaacaaacagaggtaaataatttaaagtaataagacttgacagaggccggcatggtggctcacacctgtaatcctaggagtccaaagtgggaggatcgcttgaggccaggagtttgagaccagcctgagcaacatagtgagaccctgtctctaaaataaataaawawaaataaataaataaataaatttaaatttaaaaaaaattttttwaaatacttgacagaataaggggttatcttgacattaccatatcccaaaaatggttttgagccatgcggaagatctgagcgtggataattccatgagacatggtccttttgtaactgcagagttagatatgaacaatcttcaatttcccagacaggttatataaactgtttggatgacagccataaccagaggtcagaatggttcagtttctccctgggaaaatgggatttttttctttcatagaattctaaagaagaaaattatataaatttttagttacagtaagagaggagaccacccctcatattgccttatgcccaatttctgcctccaaagaaagaagtaaaaactaaaaggcagaaacgaaatccacaggcagacagcccggcactacgccatgggcctggtagttaaagatcgacccctgacctaaccagttatgttatctatagattccagacattttatagaaaagcagtgtgaaaatccctgtcctgttgtgttctgttctgattaccggtgcatgcagcccccagtcaggtacccctggcttgctcaatcgatcacgaccctctcacgcagacccccttagagtcgtaagcccttaaaagggacgggaattgctcacgcggtgagctcggcttttgagacgcaagtctgccttctttaatccggtgtctaaggagttttgtctgcggctcgtcctgctacaacagcctagaaaaatcagtaatgcctcctatgagtttttcaacctttttttgtatttaaaaatgttttttgccgggcacggtggctcacgcctgtaatcccagcactttgggtgggtggatcacaaggtcaagagacagtgaccatcctggccgacatggtgaaacccatctctactaaaaatacaaaaattagctgggcatggtggcgcatgcctgtaatcccagctattcaggaggctgaggcaggagaatcacttaaacctgggtggtggaggttgcagtgagccgagattgtgctactgcactccagcctggtgacaaagcaagacttcatctcaaaagaagaaaaaaaaagtttttctttttttttttttttttagtgcagtggcgctatctcggctcactgcagcctccacctcctgggttcaagcgattctcatgccttaacctcccaagtagctggaattacaggtgggcaccaccacacccggctaatttttgtatttttagtagagacggggtttcaccatattggtcagggctggtctcaaactcctgacctcaagtgatccrcctacctcagcctcctaaagtgctgggattacaggtgtgagccaccacgcccagcctaaaaatatttttcatcggcatgtcccacctacagtcattatgatttctttcaaagcctgtgctgaaaatatttgcttataagccacaggtataaacaacctacccatacaatcattgaaacgccttccttttcatgtttcccccagttgccaccaaagacctggctattaactgccatgagaggcattaaggaaaaaatagaaaaagtaaatttagtgcctttagaaaacctgggttcagaagcagggatgaggaaaaaaaaggatcaggttagaggctgcagtttattgtcgctcacgcccaggagcaccctggtgggagcattgaaaattcctggtttaaagttctgcttccttccttaaagctgtgcgaccccgggcaatttacttaaactctccagacctattttctcacgtgaaacaaatggattgtgatgatttaatgagcyatgggctgtgatatgtgtctaaccatrtctgaccacatatttgatacgtctctgaycagagggagcaaytaatcatttttatcccctttctttcctttgcccccaaataccatctctgactctactagaactttttatttcacttaattaacactgcaaaawatggcatggagattcaactaggacagcaagcagccactaaaaagtatataaattatctgagattactaaagtgcttattaattaaattgttttcttcatataaccaaaggataagtcattctgtgaatgggggttttgattgagagtggtgagtaattttatttcagactttagtgcactctggctaattttgggctgtccaaattgggtgtcacagtgtggtccttgggttgttagaggagtggaaagggccatatcccatgattaagcatttattaatttattctcgccagtgccttgcccaggaaagggggaagcgtttcctctactctaagctcagcaattgacttggttaaatcaatattcatggcttgacctaggaactttgaacattttcatgaaaaatagtattttctgcatttcaaaacaaatttttagccatgccttattcgggatttggggattgtcacttttgtaattccgatttgatgtgaaagcttagtaactattagtccactgctatagaagaactgcctgagactgggtaatttataaagaaaataggtttagttgactcacagttcctcatggatggggaggcctcaggaaacttacaatcatggcaggaggcgaggaggaagctagacagatcttacacggcagtaggagagagacagaaaggaggggaaattgccacttttaaatcatcagctctcgtgagaactcactgactatcacaagaacagcatgggggaaccgcccccmtgatccaattacctccaccaggtgggattacaattcgagatgagatttgggtgggagcacaaagccaaagcgtatcagtaacatttgaaggtagtataaaatttatttgttctaaagggtttttcagagacaggatttctgctgtgcttaaattcttaaaaactattcctccaggggcacagtggctctcacctgtaatcccagcactttgagaagcctaggtgggaggatcacttgagctcaggagttcaagaccagcctgggcaacacagggacactctgtctctagaaaaaatacaaaaagtatccaggtgtggtggcgcatgcctgtagtcccagctatttgggaggctgaggtggggacctgagcctggaggtcaaggctgcaatgagccgtgrtggcaccactgcactccagcctaggtgacagagaaagaccctgtctcaaaaaaacaaaaacaaaaacaaaaaaamccctgataattatggggaaaaaaaaaaacaacaaaaaaaccctattcctccaaaccaaggaactggcctggcwagtgcttcttatcttcatgacgtgattggttttgggtagtggtcacttgtaagggaattcttgcaagcccatgtggtaggagccctgctgttggctttgtggttgtctccaacacccagtgtgcctctggcagagagcgggagctcagtgttcacttgttgaatgaatcaaagtaggactcaaaaatctctacagtcaaacatcttgttttttagaaaaaaaattctgcttttctataatttttgagcttctgaaaagcggatgaaacaaaaccaaggaaagattgtttggctctttgggactccttttggttaaccagtgtatgggcttttaaagctattttcagaaagagaagaaggtggggagaggtgggaataggagagagagagatcagcctggcctgtgcctagggatggaggtaaggttaataaccagaaagcctgcgcttttcacataatttgatactgaagaacatggactcatgagctagactgtctggattcaagtcttggttctgccactacttagctgtgtgttttggggcaagttatttaacttttctgtcctcagtttccacatctgtaaattgggatagtaatagtgtctacatcatagaaacgttctgagtatgaaatgaagtaaatgtagagcacttagaaagtggctgggacacactttgggaggccaaggcaggtggatcacctgaggtcaggagtttgagaccagcctggccaacatggtgaaaacccatctctattaaaaaaaaaaaaaaatttagccgggcttggtggcgggcacctgtaatcccagctacttggaaggctgaggcaggagaactgcttgaatccaggaggcggacattgcagtgagccaagaccgcacactgcactccagcccaggctataagagcaaaactccgtctcaaaaaaaacacaacactcagtaagtgttagctattatgatagtcaatgggcaacactctgatgcacctgcagattagcaaagaagcaaaccaggaaaggcctggaagagaaggattaatgtttaatttgtacccaaccagttgggtaatggaaacctgtgacctgtaactggcctaatcagctcagggtctgtatcctgagagcctctccatcccttgaaaaaatagttcatatgcttgaattgcattctctgctgatctgaagtagacatgacagatacagagtaccacgggaaaagggaatggaattcagaggacatctaagtgaaaactagagtggaaagtaatcttggtaataatacagaaaacaatctccagaccttaatcttttccatcgtaaagtaagcacagaggaatttaaagagaagaaaagtaccataatatgcccacgcccaaagttgtaagtatgaggacgctactttgctttttacagcccctcccctaaaaaggccccaaacagtttatgctgattattataccatgtagccatcaaaagtaatatggggccggggcgggtggattacaaggtcaggagatcgagaccatcctggctaacacggtgaaaccccgtctctactaaaaatacaaaaaataagccgggcatggtggcgggtgcctgtagtcccagctactcgggaggctgaggcaggagaatggcgtgaacctgggaggcggagcttacagtgagttgagatcgtgccactgtactccagcctgggcgacagagcgagactccgtctcaaaaaaaaaaaaaaagggaactcaaaaaaaaataaaaaggaatatggtagatatgtcatgacatggagcaatctgaagatatttgataaatgaaaagttgcagaacaatgtacgattatagtgtgatactctatgtagtatgattctctttatatggaatatgtgtgtttgtgtatttatatatttgctaatatgtagttaattcaaatttttaaatgaagtgtacgtgccagactgttaatagtggttaccattggaaaggaggggagtggagaggtgaaggaaggcttttgtgttttagtccttgtttaggttgctagacttcacaaataaaagtacaggatgcctggttaaatgtggatttcaaataaacagcttatactttttttttttttttttttgagacagtctcgctctgtcgccaggctggagtgcaatggcatgatcttggctcactgcaacctctgcctcctgggttcaagcgattctcctgcctcagcctcccaagtagctgggactacaggcrcaggccacgacacccagctaatttttgtatttttagtggagacrgggtttcaccgtgttggccaggatggtctcaatctcttgacctcgtgatccacccttctcagcctgccaaagtgctgggattacaggcgtgagccaccgcgcctggacacaacttttaaagtataagtatgtcccatgtataataataacatgaacaaacttatactaagcaattatttgttgtttatttgaaactcacatttaaccargcattctatatttcctctggcraacctactctatatccttgtgtattacctaactctctytaaaggatattttaatgtactaattatgtgatttaaaaaaataagaagagaaagaataagatcgcttcccctcaagaccacacgaaagtataactttggcctagagaaaaggagattacaaagcagtgttatacagtcccccttcaaccatagttttgcttcctgcagtttcagttactcagagtcaactttggattgaaaataggtgcatacagtacaataagatgttttgaaagagagaaaagcctgggcacagtaactcatggctgtaatcccagcactttgggaggccgagttgggcagatcacctgaggtcaggagttcgagaccagcctggccaacatggtgaaaccccgtctctactaaaaatacaaaaattagcttggtgtggtggtgcatgcctctactcccagctactcaggaggctgaggcaagaaaaccacttgaacctgggggatggagtttgcagttagccgagatggggccactgcactccagcctgggcaacagagtgagactctgtcttaacaaccaccaccacaacaaatagttttataaaaagaaagaaaaaagcacacagatgcatatactaaaagatggaagagtgtgtgcacataagaatattagcagtggctctctcgagtgatgagatgaaggataatttcagttttttctttgtgctgtataaaattctttacaattttgtataatgaatattaattacttttggaaaaggaaaggatcgtatgtaatgaaagccattttctgtgattcagtgaggactttgacatgcccaagatgttaccatgtgcagcattcgtctgaagaaggtgagggacagtggcatgcaacacacctttggattgagggtttttttgttttttttttttttttttgtgtgtgtgtgtgtgtgtgtgtgtgtgtgtgtgtgtgtgtgtgtgatggagtctcgctctgtcgcccaggctggaatgcagtggcgcggtctcggctcactgcaagctccacctcccaggttcatgccattctcctgcctcagcctcccgagtagctgggactacaggcgccggccaccacgcccagctaatttttttgtatttttagtagagacagggtttcaccgtgttagccaggatggtctcgatctcctgaccttgtgatccgcctgcctcggcctcccatagtgctgggattacaggtgtgagccaccgtgcccagcctgaattgaagtwttaaaagtgctgtcatcccttgtccttgcaggatacctccaaaagcagccatactttggagcagttattgggagggtggccaaccgaatcgccaaaggaaccttcaaggtggatgggaaggagtatcacctggccattaacaaggaacccaacagtctgcatggaggagtcagagggtttgataaagtaagtayggcacatgtgactgagttccctttaggctcactttacgcataccttctgcttgccaggcacagtcataggccctagagcacatgagtggtgagatgcaggaaagaggccccttccatggttcagggcagcaggtgcaatgggcatgtgctaggacccatccttctctagttcatctgttggaacagacaggggagccccaagagaaaggatgtcaacctttgacttaggaaaaatgagaaacaactttctcacagtgttgagatcagggagtcgggttgaagagatgtggattgataacagtatcttccacttattggacaagacattgacatatattatctcttactcttactaaaactctgtgttatcactaaatgggaaaaccgaggcactgaaaggccacatggccaggcacagtggctcacgcctgtaatcccagcactctgggaggccgaggtgggcaggtcacctgaggtcaggagtttaagaccagcctggccaacatggtaaaaccccgtctctacgaaaaatacaaaacttagctgggtgtggtggyggccacctgtaatcccagctactctggaggctgaggcaagagaatygcttgaatgtgggaggtggaagttacagtgagctgagatcacgccrctgcactccagcctgggcaacagagccagagtcygtctcaaaaaaataaaaaataaawaataaataaagggccacatgactcctaagtgggacaaccagggctgcctggcccaaaacactcattcttacaccatagctgctggtgtccacccaggctgcatgggtgcccccgtccaacatgcttccctgtacctgtcattaagccccccgccccatgcagcatggcgctgcaccaaggcctgcccttccactgaagtgcctcatgcctcaaaatcatatcagattctccccagttcctcctctccacatgaaaacgaccattctttaagcagatccctagaaaacaaggtcaggaaagcaaattgatcgaacagcttctccctggggtgggagtgcttggcctcctgcttcctagccccatgggagtctatgggttaaccccagtgattgctctcttactagtctaatttcaggctgtgcaggagtaaatttcagtagttaactttcttttaaattataccacccaggttatttgctagagaagagccagagaagagccagagaagacaggaacatgtatggccactaatggccacagtttcttctcttctgcctctaaccaccacttgtcctgcagaaggaggcttccccgcctccatgagcttcctgctggtggcctggaactagactgactgccccatgggtttccctttcctcagtgatgggattcttcatgccagggaggcagagggcagcatgtgctctgccagtattagggcagagtctctagaacatgccaggatcatgagcaaaccccaaccagagaaagtaaggcccagcctggcttcagacagggatcttcagaggagccttaggacagcacctcgttctagcttgcccctgctccccctgttcactgtggcattttccgtggtgttgcttaacttatattcccttcaagaacacagcaaaatcgtgagtgtacctagccttcagtgcagtgtgcccttgagccccttctgtgaagcagggggcacagtaggccaaggactcctgaggctcacagtataaagagggagatggactcttacatgataactgttaaaggcgaatggccacaagcaccataacaagccagagaagacaggaacatgtgtgaacaaatgaaatagcagcctaggagataggattggaactggccttgaagagccaatagcatttcattcaatacatggatatgggagagaatgactgcacagtggccctgagaggggtggggaaagactttgaactcttttttttttttttttgaggcagagttttgctttcattttccaggctggagtgcaatggcgccatctcagctcaccacaacctccacctcctgggttcaagcaattctcctgcctcagcctcccaagtagctgggattacaggcattcgccaccatgcctggctaattttgtatttttagtagagacagggtttgttggtcaggctggtctcaaactcccgacctcaggtgattcacccacctcggcctcccaaagtgctgggattacaggcatgatccatcgcacccggccaccaacacatttttttttaagatgacagttgaataggatttgaaatggtataagaagatctagagctgcagagtttctggaaatttggaaactacaggctcagggaaatccttccataaataggaattatgcttaaccaatcatattggtttacacaaaaatctttccattgtgtcctttctctacaaaagaaaaactaggtagcaagttaagatttcatttcaattatttaattcctgaaatgttccatttgggatattctatttcttttttaattacacatataacaggcttcatattttgagtgtcttgaaagttcaacctttctgggagctaactagggtgtaaaatgaatttttcactaagctcagtgaaagtatttcacataccagctgccttcactgtaggtgaaggcagagacctccgttcctgctgggttctccttcctggcaaatgccacgtctgtgagagcaaagtggacagatcctgggctcagagaccactcctgtggcccacagaggctattatctttcaagtccatagagtttggcctcaactcttctgttgaaaaggaagattcagacaaaaacttcactgagactaagatgtggaatagaggagacagccagtcctgagtttgaaccccagctctgtcacaaataacatgtataactttatttatttatttwttttttgacacggagtctcactctgttgcccaggctggagtgcagtggcgcaatcttggctcactacaacctscacttcccaggttcaagtggttctcctgcctcaacctcccgagtagctgggattacaggcatgagccaccatacgtggctaatttttgtatttttagtagagacgaagtttcaccatgttggccaggcttgtctcgaactcttgacctcaagtgatctgcccgccttggcctcccaaagtgctgtgattacaagtgtgagccactgcacccggccacatgtgtgactttaaacaagatttttttttccttctaaacaatggacaggtagtatraaactccccaccscccccgacacacactaggaatgtagaaggtagatgtgggtataagttaactccactgaactcaatttgctcatctgtaaaatggaggtaaataatatttgttgaagccacatgaaattgccagtgttcaactgtyttgacctacaatgatggtcatttcatttgggcaaccaaatctttaccttgcaagatgatttatgtaaagcaccaggtcattgactattgagcactcaacaagttggaggtctcatgcctgcaacaggccccttctttagtgatcccagagctctctaaaggcactgggaatctctggccaactcatcccctgatagtatagagtaagggaacagtctcaggatccagtccaatgccacacactagctgtgtggcctggggcaagcggtttatcctcactgagcctccattctttcattattcaatgaggatgatgttacctactttaagtctgctttgagacagatagacagtgtctgtgaagtttstagcaaagagtcttgactcataatgggcacccgataagtgttcgttttcccttccctataagtgtaatcttggagcctctaggacaaagttgagaacagccactatgttaatccaagattccaattcctatttccaaaagcaaaatgccttttatttatttatttacttttttgagacaatgtcttactctgtcacccagattggagtgcaatggtgtgtgcgatctcggctcactgcagcctcaacctcctgggctcaagcgatcctcccttctcagcctcccgagtagctaggactacaggtatgcaccaccatacctcgctaatttttttaaactttttcatagagatgacatctcactatgttgcccaggctggtcttgaattcctgagctcaagcgatcctcctgcctcagcctcccaaagtgttgggattacaggcatgagctattgcacctgaccacaaaaaaaaactttaaaaataaactcttcttcatacttttttttgccagtcttagaatcatattttctggaacaagaagaaacttcgagataatttcttcaacccctttattttatgaaagagattaatgcctagagtcayacaatgagctagggacaaatgaggcccctcaaatcaggactcttgacttgtaggctacaactcttcttaatggcacaaatgccttatttgttttgaactctgcctagggaacacagagagccttgtagggattttaataaatatttgtatatatacccctaggagacaggggctgatttattaaagttttttttaatactctcagcagatattgctatatggcgtttagcagagtggggctacaagattaaaaaaaaaaatcaaagaaaaatcatcaaagaagaggagaggaaaatattgtagacacacatcgtacaaagttagagaaaagagaatggggagtgtgagaaggtagagaaaaacaaacatttgtaataattaaaatccagggaccaggtgcggtggctcatgcctgtaatctcagcaccttgggaggccgaggcaggtggatcacttgaggtcaggagttcgagaccagcctggtcatcatggcaaaaccccgtctctacgaaaaatgcaaaaattagccaggtacagtggctcatgcctgtaatcatactcgggaggctgaggcttgagaattgcttgaacctgggaggtggaggttgcagagccaagactgtatcactgcactgcagcctggacaacatagtgagaccctgtctcaaaaaaaaaaaaaatccaggctatcattaaaaagtcttaattgattgtataaccattttccttgtgaaatcagttgtctttaaatattgaaatatggcatttagcttgaggatggagcaactacacaactttgaaaacacttttttccaggtgctctggacccctcgggtgctgtcaaatggcgtccagttctcgcgcatcagtccagatggtgaagaaggctaccccggagagttaaaagtctgggtgacatacaccctggatggcggagagctcatagtcaactacagagcacaagccagtcaggccacaccagtcaacctgaccaaccattcttacttcaacctggcaggccaggtaagtgaacttgtttcttctttcctgcttcgtgctttgtggaatgtcctgggctgtggctagagagatcagagtagtgtggaattgctgtggcagtgaggtcaccctcatgatgatgaaaagggcccagcagagggcttatagtaggtgctcaataattgaaaattatagagaaagacagaatgattacattgtactgccaagagaagtacctgtttcccgtttgcttcagacaagtaactagctgtttcaagaactccctctcagaatctaattgtaacatgtgcttatatttgcttcccttattccacgtctactccctgcaaatttgttccaattaaggtgccttccacccttggagctttggaaatgggcatggtccagctcctttagatatgctgccaatatgtgtgtgcttcccctgtgagcctgccagctcctcccaggggtttgggtgggccagtcctgccctgcgcagtaccgtggaaagagcactggacttggatttagaagacctggtttttttagcttaataaaggcatattctcaatttcatagtaataacactacctactatttgtcagctgctgttagaagccctttatgaagttgttggttaagacactaaaatcaacccagcagagggataaaccccagtgggggaccacttgaactgcccacataagagtggtgtagagctgctgacaaccccccttaagtgatcccttctgaactacctcattccctcctaaaggtaacagtttagctcattgaggaggatatcatatcagacagaataaaaagcttagctaaactctgtagattatatctattacttcctctttatctgaagaactcatcattgtctactatacttgactcactttggcctgattttctaccgcaagatggtgttcacagtcagctagtaatatctcacctttttatactgtttcaggagtttgctgatgatctgctggattctgttttctagaattttcccaaattgcagagttaattggttcttgtaaaatttccaaagttctccctttaaaaaagttgacccttcacttgcgggttccttatcctcaggaactttcaccatccttcttgaaatcttaaaaacaaggccaggtgctgtggctcatgcctgtaatcccggcactttgggaggccgagatgagtgaatcacctgaggttaggagtttgagaccagcctgaccaacatrgtgaaaccccgtctctactaaaaatacaacataagctgggcatggtagcgtgggcctgtaatcccagctattcgggaggctgagacaggagaatcacttgaacctggaaggcggaggttgcagtgagctgagactgcgccattgcactccagcctgagcaacaagagtgaaactccgtctttaaaaaaaaaaaaaaaatcttaaaaacgaaacaaaagacaaaaacaaaacaaaaaccctcagacctaagaggatctacttcttaaaataagttcagaaacaaacgacagaaatagaagaaagtattgttttatgtaggtaaaaaactcggtgataattctgttttttacattttttgcatacttaggacatcctatttaataatagggaggggagatctaaaggaatagattagaaataaaaagagaaattatgcatgcagtattccatctgccagtgtgttccaatgaaggagacaatatgggaatgttaggtttactaaggctttttacgactcttccaatcctgcagggacttggagtgamgggtatttctgaatctcttttcagaggctgaatagtttcctagatcatagaccccacccaaaagcgcggtcaatgaacttccttccgtataccacagattgaatatcccttatccaaaatacttgaggccagaaatgttttggattttggagattttcagattttggaatatttgcgttatatatacttattygttcagcattcctaatctgaaaactcgaaatctggaatgctccagtgactacttctgagcgtcatgttggcactcaaaaagctcagattttggagcatttcagattttagattgtcctctttttttttttgaggtggagtttcactcttgttgcccaggctggaatgcagtggcacgatctcggctcactgcaacctccaccttctgggttcaagcaattctcctgcctcagcttccctagtagctgggattacaggcgcccacgaccacgcccagctaatttttgtatttttggtagagatggggtttcaccatgttgcccaagctggtctcgaactcctgacctcgggtgatccacccgcttcagcctcccaaagtgctaggattacaggcgtgagccaccgcacctggccccagattttagattttcagattagggattttcaacctctatcttagtaagcgtagcttgaatccacagccactaacttcaggtttgaaggtggatgggggcaccagccttccaaggcactccggtaggagtggatgatcaccaagccagacctggagtcaagggcctctgcatcttcagaatatctcttgccataccttgagaagcattatcatatatctcaaaccctccccaggcacatagctcaaaacctgatatttaaattagtcagctcatcttatatatttttgtttgttttttaaatttaataagtggtatttttgttctatttgggcccaagtattgctcatcacttctaagtttgagggttggagacctggggaggaggggagaactggctttgtcaaagaatataaaaggtatgtaggttgcaggtcgttttttgttttattttatttttctgttccttcctgtgcctaacacaaaactgggataactttttttttattgaaactttacctaaagacctgggtgtggtggctcatgcctgtaatcccagcactttggaaggccaaggtgggagcatcactggagcccaggagttcaagaccagaccgggcaacatagagagatcccccatctctaaaaacaaacaaacaggctgggtgcggcagctcacgcctgtaatcccagcacttgggaggccaaggtgggcagatcacttgaggtcaggagttcaagaccaacctgcccaacatggtaaaaacccgtctccactaaaaatacaaaaaattagctgggcgttgtggtasatgcctgcaatcccagctaatcaggaggccgaggcatgagaattgcttgaacccaggagacggaggttgcagtgagccaagattgcgccactggactccatcttggatgacacagtgagactgtgtttttataaacaataaaaacaaacaaacaaaaaaacaacagaaactttaccgaaagagttatgaaagcaggtctgggggaattcragatgaaaagcaatagcatgtggtacatgacaggtagacatgtcattaaggacccaggttcttccagttttccatctgcttcctcagtattttggcttttgtcttcaggcttgtcccctcatggccacagctccaggaatcacctcctcatatagtcacatccagagacaaaaagacccattccatttttcatatctctaatgtcctctttttaagaaaaagcaatgcttttcctagaagccctccagccaactttctctgatttctcattggccagaagtgtggcctatgctctgcctaacccaatcgccagcaagggaattaggccatgatgattggcttagaccagtcaaaatttgccctctggaaatggagcgggggtgggtcctcttccctgaatatctggtctagcataggataaatcaacaagcctagtttctgcctgggggcacagagttgctggtaaaagagttgccatggcttgtgggtagtaacccacagtgtctgtaccctcctgctagaggtgatgagagctgagttaaggctgtggtagtgatattgcacaatgtctttaaagtcccctgcaaatcataatgggctctataaatggttaatgttacaaacaggtagcagccaagcaaagttaaccaaaacaaacactgaacccagagatgggcctcaaggtctgtttgtgaatcagcatttcttgccaagttttcatcagccttgaaaggaaatgattccaacagtaatattccaccagagtagatcattgcgtttttccagcctagaagagtcataaaaagaagcatgcatttttatttttattttttattttttatttttttgagacggagtctcactctgtctcccaggctggagtgcagtggcgcaatctcggctcacggcaatctccgcctcccaagttccagggattctcccgcctcagcctctggagtagctgggattacaggcacgtgcccctggctaattttttgtatttttagtagagatggggtttcaccatgttggccaggctggtcttgaactcctgacctgaagtgatccgcccatctcggcctcccaaacttctgggattacaggcctgagccaccatgcctggccacaaagcatgcatctctttaacgaaggaatgttactactgcttggtgacccagtgacccttaagagggtgggtgcctgatgaatgttcttttccttctcctcctaggcttcttcctaaatctcaggctcatcagtttatttggagtgtgattttcatgttgattcatttctctagtgcttaaaaaaaaaaaaccacagaaagtggaaatttctttctttctttctttctttctttctttctttctttctttctttctttctttcttattttgagatggagtctcgctctgtctcccaggctggagtgcagtggcgcgatcttggctcactgcaacctccgcctcccgggttcacgacattctcctgcctcagcctcccgagtagctgggactacaggcgcccaccaccatgcccagctacttttttgtatttttagtagagatggggtttcaccgtgttagccaggatggtctgatctcctgacctcgtgatccacccaccttggcctcccaaagtgctgggattacaagcatgagccaccgtgcctggccagaaagtggaaatttctaagcagctttatttataatagtaaaacactggaagcaacccagaagtctatcaacaggagaatggataaacaaattgtgatacagtcatacaacggaatactactcaacaatacaaaggaatataacatggatgatcccagtagcattatgttgtgtggaartaacaaggcaccaaagaatatgtactgcatacttctgtttctaaggaggcaggcacctaggaaacagagtgaagacctgaattaatgctaggccaggagtctggagaatggctttgcctcctgcaggtgtcctcattggatgacattacatagcttgtgttcctccaggcttatttgtgcacaggaagtatggaggtgctttggtccacctgggttctctttttctaacactattcagctctgtatgtgggctgcagctcccagtttagcgccaccaaggcctggaacccaaccttcacaccccttgtctcgactgacccaaagccctctgtgttgagctgagtagtgaacaaatagggccaaggaaatacagtagtcccaaattctcttccctcagctcctctcccacagtcccaggggcatctccaggtgctggcaccaccctgaggcatgcgaggatggcaggagagagagccgcacagaagagacatcctctctaggctagacctgctctaggcaggggtacagaccctctcccatcttggacctgctgccccagctcacagcagagtgagctgtagaaagtgcagaggagaggcctttgccctggctttgtcccccacccactcatacccctgcccagcacacacccactgggagaaaacaagagcatcatagttcttctggacaggcatggtggctcaagtctgtaatcccagcactttgggaggccaaggcaggcagattacttgaggtctggagttcgagaccagcctggccaacatggtgaaaccccatctctactaaaaatacaaaaattagcctagcatggtggtgggcacctgtaatcccagctacttaaggaggctaaggcaggagaattgcttgaaccctggaagtggaggttgcagtgacccaagattgcgccactgcactccagcctgggcgacacagtaagactctgcctccgaaaaaaaaaaaaagagaatcgtagtttttcagaaaaagagcctactagtggtgtaattaaaccagtttctgtcgtgtttagacatgcattctcatggtctctaaaatcttgacctttcttttcagaattactcagttggattgtgtgggccagtctttcagaccatagaatctgtttccagctaacctgtcctaaccctgtctcaaaaaaaccagtcggccgggcacagtgcctcacacctgtaatcccagcactttgggaggctgaggtgggtggatcacctgaggtcaggagtttaagactagcctgaccaacatggtgaaaccccatctctactaaaaatacaaaaattagccaagtgtggtggcacacgcttgtaatcccagctgctcgggaggctgaagcaggagaattgcttgaacctgggaggcagagactgcagtgagccaagattacactacttcactccggcctgggcgacagagtgagactccgtctcaaaaaaaaaaaaaatgtgtactgggtgcggtgactcacacctgtaatcccagcactttgggaggccgaggtgagcagatcacctgaggtcgcgagttcgagaccagcctgaccaacatggagaaaccccgtctctactaaaaatacaaaattagccagacgtggtggtgcatgcctgtaatcccagctactagggaggccgaggcaggagaatcacttgaacccgagaggcggaggttgcagtgagccgagatcgcgccattgcattccggccttggcaacaagagcgaaactcggtctcagaaaaaaaaaaaaagtcaaatgtcaaatatcccctgagagacaaaattatccccaattgagaaccactagtttagctcatctttgagcattcactgagcaaaagccctcacttggtttcccttccrcatcttctggtgtgaagctttaaaatatgttgctattgataatataaaataatatttgtactagaaacatgcatgtataaagttatttgccgatttgcaaacaacacaatgcacctttcctacactgttattcacaaggaccctggaaaaggtagaggcatcattagcccaaatttattttattttatttattttgagatggagttttgctcttgatgcccaggctggagtgcaatggcacgcgcgatcttggctcaccgcaacctccacctcccgggttcaagcaattctcctgcctcagcctcctgagtagctgagattacaggcatgtgccaccacacctggctaattttgtatttttagtagagacggggcttcttctttttggtcaggctggtctcgaactcctgacctcaggtgatccgcctgcctcggcctcccaaaatgctgggattacaggcatgagccaccgcgcccggcctcattagcccaattttaaaccaaaggaaatgagagtctatgaggttaaatgaattccctgggaccactcaggaagagctggaactasaccccaggccttctgacactgaccagtacaccagcctttgactcccctgcaaaggccaggctgcatcttcatggaggaggtgggcaaattctcaaaagcagggactgcggttctgacacctgggcttctgtcatggagcagagagtggggcctctgtgtggaaactgggctagaggggggtgccaggtgcacccccaggagtgagcctggagcagtaccctgacctctcaggatgtgtgtgttcctggttaccagtcattgctcttctgtttgcctggcaagtgagaagaatagaagaaacacctccactaataagccaaggtccaaaaggctttcaaaccactgtggtctctgacttttcaccttcatattctatttagaaaagaaaatgcatgcacacttgaaagtttcttccaaatttatctgttgctattttgaggccttatctacctccacttagttgattatatttaatcatgaccatcagccaaacaagattttaaaagtttttgtcaatgcctgaaaacatttttgcaagataagttaaaaaacaaatayatgaaataagactaagcagaaaacctttcccctaccttttcctcccaggcttccccaaatatawatgaccatgaagtcaccatagaagcggatacttatttgcctgtggatgaaaccctgattcctacaggttggtgaatttaacctttttgtgttatgtgggatcatggattggctctcgaggccaagaaaggacattagtggagaaagcggtgaaatcttaataaagtctacagtttagttaatagaattattctagtggtaatttcttagttttgatatgtgtactgtgtttatgtaaaatgttagcatgagggaaagctgggacagagatgcagtatttttaccacttttctgtaagtctaaaattatttcaaaatttcaaaaatttttaaaaaatggtgagtaagataatactttactggggctgggcgcggtggctcacgcctgtaatcccagcactttgagaggccaaggcggttggatcacttgaggccaggagtttgagatcagcctgagcaacatggtgagaccccgtcttatttttttttaagattaaaaaaaaatttttttaatgcaaaagaaactaaagttaaaaaaaattttaaataactttactggatactcatcttacactaggtaacagcttttgttttagctggcttttttgggaggggggcggtrcgggaggggatagggtctcattctgttgcccaggctggagtacagtggcacaatctcagctcactgctgcctagacctcctccccaggctcagatgattctcccatctccacttcctgagtagctgggaccacaggcacacaccaccacgcctgttgtatttttagtagagacagtgttttaccacgttgcccaggctggtctcaaactcctggactcaagcaatctgcccgcctcagcctctcagagggctgggattacaggtgtaagccactgcgcccggccactttggcctctttaatgggttgagtttatggctgctagttcaaactttttatgaggaagaaaggtaagcatgtgagcctgcatacccaacagcaacttcaggtaacagcaggcattaggaactcccataaatatagtgactacaaaactaattggaataataatgaaaaattgagctcaatggggtcaaatttttggcatcacagtttttgaatattttcctggctccagggctgagtttaaaggcttttctgtttgtcttggtagcatgtgtcatcttgtgatatttacatgactcaatagaagggcatgagtaagctggcccatctggtcctagaggcagaattactgcagtagaactatatgttgtgaactgcaaggaaaaaatagtggtggctgctgttttgtgactgataaggaagaaagtgaatcaattagcttataagtggaggttatgaaataagtgcatatttatttgtgtatatttataaaatcttctcatgctatccggttgagttgatcagatgaaaatcacaacagggcataatttgtgcatttaaaggcctgtaaaggccaagttattttacttgattgtaaaaaatcattgtggcaaagcacagtaggcttaacatgcactctaatggactgcataaaacttgcgttcgctgggtatggtggctcacacctgtaatcccagcactttgggaggctgaggcagaggaggatcacttgagcccaggagttcgagaccagactgtgcaacacagtgagrtcccatctcaacaaaaaattgaaaaaaaaaatagccaggtgtggtaacacgcacctggggtcccagctactcaagaggctgaagcaggaggatctctcgagcccaggagttggaggctgcagtgagccgtgatctctgctgcactcyaccctgggcaacagagcaagaccctatctcaaaaaaaaacctaattgggaatatatgtgttatatttcagtagtttttttttttttttaaaaaagaccaaactaccatttataatcaccatcttttcatgaaagaatattttagtaccataaaagtgtaaacaaatttaatctcagaataaggaacaactctttatgttgaatttatgtagctttttaaaaaataatatggtaccacttggagccaatactataaaaaaaataaatagcagattatccaaacgtatctcagttttctggggaccagtgaaaatgttatcactaactcataattcagaactagtaattgatctgtaaggccacttctctctcttgcattctccaattctacgaggctcctagcatgacattttactgctatttccacaactcttcaaatcctttagagctctatcattgaagtaaataagttgctgcaacttcagagctcatgaaaaatttgtaattctctcctacctatccatacttgagtcagacctacatgttatacctgtttgccgagtgacacttaagcagaaattgtagtattgttttctcttttctcagaagtccttaagaaacaagctaattgtctgattcctttgaaacttcctccaaaaatgggtggtagtaactgctaccctgcactttaggaatgtaagaattcacatgtctggcccactttccactgagaacaaatctctaggagcccagattttctctctttttttctttctgttttgtagagacagggtctccctatgttgcctaggctggtcttgaatccctaggctcaagcaatcctcccacctgggcctcccaaagtgctgggattacaggtgtgagccaccaygctggtcctcatctgactcttaacactgatcaaaagcccatgagcttaattttgaaagaaatccaaaaggcttgcccatcatttgatcactcagaagtgctgctgggctctctaggagttggcagtctatgggaagggtcagccagaattgtgtccattaatctggaaaatatcaggatagacataactaggagacttggcacagagggcaggcactgctgagggggcttccagatagaggaaatgagagttaaataaaacctggaagggaaagtggaagtttgccagggagtgaggaggagaaaggtgttccagataaagatgaacaagcgtgggcggtgcaagaaatagcaggactagcccagggaagtgctgtgcttttgaagcaaagcatttggggcataattttagtggcagagagtggatgggcctggagaggttgattggggccatgtcagatctgtaccaggctctgtggaactgcaatccctagggtggccctgggtggccccaggctggcctggagctcaaggccgatccacatagctgactcacaggtgtgcctgagtccagtctcaaacttcagcgtgttctgccagagctggactgaaccacaaggccactttcctgagacgtgctacaagaacctgttagaccaggtcgggtgcagtggctaatgcctgtaatcccagcaatttgggaggccgaggtgggcaaattacttgagatcaggagttcgagaccagcctggctaacatggtgaaaccctgtctctactaaaaattcaaaaattagctgggtgtgatggtaggcgcctgtaatcccagttacttgggaggctgaggcaggagaatcgcttgaacccagaaggcagaggttgcagtgagcccagatcacgccactttactccagcctgggaaacagagcgagactctgyttccaaaaaaaaaaaaaaagagagagagaaaataacctgttagaccagccatactccattaagacttctcaaaataaatatgcactatctaccgactgtggttttgttgaattgagaaaaagaagatactgattatctgtgagataaggtgaagctttatgataataatagctagtatttcagggaggactttataaataattcataccacaagcctgtaaggtaggttctgttcatttttcttatttaacagatgtgaaaactatagaacaaggagttaaagtaccttacagaggatgacccagttaacaagttggggaaagccgggattcacaccaaggtagtctggtattagaactcaggctcttaagtagacctgcactctacagatcttacaatgtggttagatgtcaagaaggtttggtgccaggcacagtggctcacacctttaatcccagcactttgggagaccaaagattggttgagcccaggagttcaagagcagcctgggcaacatagggagaccctgttaatacaaaacatttttttgaattagccaggagtgttggtgcatgcctgtggtcccagctatttgggaggctgaggtaagacaattgcttgagcccaggaggtcaaggctgcagtgagctgtgattgtgccactgcacttcaatgtgggtgaagagcaagaccctgtctcaaaaaaaaagaagaagatttgggaggtaggggagaggcagaaaggagtgaggaaagaaagaaaagaaaagtaaattaatttctttactatataaatacccaagtgcaacatatagtcaataaatgagaagtaagccaaaacaaagaacagacttttgccagctgtcaatcctcagctcttttgccaccttttgtacagggagcctccccagtcctctcactgtctcctccttgttccttcctcccttcaatttatttctacttttctgcaaagaaaacaggaaaccaagtttgtttaaattaaatataagaaagggagagagagaaagaggaaggaaggaaaggaaaaagggaaggagggagaggttttcttgaaattaaagagcatgaatttaagtgtctggccttgtcagtctgacaagaaagggaaagtcaggctgggcgcagtggctcaagcctgtaatcccagcactctgggaggccgaggcggatggatcacgaggtcaggagatcgagaccatcatggctaacatggtaaaaccccgtctctactaaaaatacaaaaaaattagccaggcgtggtggcaggcgcctatagtcccagctactcggsaggctgaggcaggagaatggcgtgaacccgggaggtggaggttgcagtgagccaagatcgggccactacactccagcctgggcaacagagcaagactccgtctcaaaaaaaaaaaaaaaamaaaaaaagaaagggaaagtcaagggaaagtcacctcaggtgtcattgttctgttgcagcatatggtgttcctgacagatcccttgtctttctggttcttggttttctcatatgcagaatcttgttatgaacaagttgtgttgaaagttcacattctttaagtatgtatgttggtcatctctgttgaaaatgatagaaaaatcaccttcggtagaaaatttacaaacaggccgggtgcagtgtctcatgcttgtaatcccagcacttcaggaggtggaggcggttggatttttgagcccaagactttgagaccagccttggcaacacagtgaaaccccatctctaccaaaaatacaaaaattagccaatctcacagcccagtctcaaaataaataaattaaataaataaataaataaagtttcaaaaaaagaaagcaaacttacagacatagttaaagaaaagctgtaccatttacagggtggcgttcagctatctggagcagtcccttatggtgggtacttcatttatcctggggagatgctggataatgagttcgttttagaccctttgctctacctggcttttcctggggtggctgcttggttgtgctgaaaccctcagaaatcaacagtagaaaacttctctaaaacagctttggcctttttgcatatgaatgacttttactgcgtaaatcagttattktgcttaccatcctagtcctctgctttccaccccaaatccttgtttatgtgtgtgtggttttgtttgtttgcttgtttgtttgcttgtttgttttttgagacggagtctcactctgttgcccaggctggagtgcagtggctcgatctcagctctctgcagcaacctccacctcccgggttcaagtgcttctcctgcctctgcctcctgagtagctgggactacaggcgcgcatgccaccatacccggataatttttgtatttttagtagaaatggggtttcaccatgttgaccaggctgatcttgaactcctgacctcaagtgatccacccgccttagcctcccgaagtgctgggattacaggtgtgagccaccacaccccgcctgcgtgtttgttttttaaatctctcttcttagggtcatgagatttctcattaatttcacttagagctcctggagagaaaagcctctattattgtcactataacagtaaaaaaagtgtagagatttttttttttcttttgagacagagtttcgctcttgttgcccaggctggagtgcaatggcgtgatctcagctcactgcaacctccacctcccgggttcaagcgattctcctgccttggcctcccaagtagctgggattacaggcatgtgccaccacacctggctaattttgtattttyagtagagatggggtttcaccatgttggtcaggctggtcttgaactcctgacctcaggtgatccacctgccttagcctcccaaagtgctgggatcacaggcatgagccactgtgtccagcttttctttttcttttctttttttttttttttttgagacagggtctctttctgttgcccaagctgaaacagtgacacaatcatagctcactgtaacatcaaacttctggggctcaagcaatcctcctggctccgccttccaaatagctaggattacaggtgcayatcaccatacccaggtaattttttctttttttacacgaaaatgtctcaacatggatttttttttcttttttggcagagatgatgtctcactatgttgcccaggctggtctcaaactccctgcctcaagccatccttccactttagcatcccaaagtgctaggattacaggcgtgagccaccgcacctacccccaagaaagcttttttttttttttttttttttttttgagacagagtcttgctctgtcaaccaggctggagtgcagtggcgcgatctcagctcactgtaacctctgcctcccatgttcaagcaatcctcccgcctcagcctcccgagtaactagaattacaggcacatgccaccacgcccggctaatttttgtatttttagtagagagggggtttcaccatgttggccaggatggtctcgaactcctgacctcaagtgatccacctgctgtggcctcccaaagtgctgggattatgggcatgagccactgcacccggcccccaagaactcttcaaatgcacctagtgtcacaagaaaagatagttaaactgtgtctgaaaaagtggcttatgtggggaaatttgtgatgkatttagggaaacttagggtaaattttaaacataaggccttttgtcagatcacctacattcctcggattgtgcgtgggtttgtcgcaggtgcttgatgtgacaaattacacagcttctattgcttcatttgatcagccgcctgttgactttcagccaagtcctgcagggttgcttctcagattgtatctttctgcaagacaaagatgttttcatagtctctctttaacttctcccttttgtggctattaatttatacttatatgtttttcaactccttatttttgttttctctttataaaagttttaacgtgtgctattcttgagggaaatactgatgcatatctaaactttaggggtgtttttcaccctggctacagacactcggtaaataatttttcaggtgatgggaaaacacatcatcatgagaatgtagcaacttttattttgcagtaactgttaaaattgtggccacagtgctcagtaaaaggggaccttccccctgtaggtgtttggggaggagtgacgtcctgtcctccattttgttagtaacccacttatggatggggcattatcacctagaaagaaaagagataccatggtatgcagttacagggagccagagcaagagcaagacaaagaaattcccttacgtcttcaatgcagagccggcatttagacctctaccccaggcaggacccacaaatctttggcagccatgagcacctgttttgctcctgccttcttcctgttggcaattttgggttttggggttttttttttttagacagagtctcactccatcaccaggctggaagtacagtggtgcagtctcsgcccactgcagcctccgccttccgggttcaaatgatcctcttgcttcagcctcccaattagctgggactacaggtgcgcaccaccacggccagctaatttttgtatttttagtagagatggggtttcaccatattgcccaggctggtctcaaactcctgacctcaagtgatctgctcacctcagcctttcaaagtgctgggattatatatatattttaaataaatgaatagaattcatcacctaacttctaaagctacctctgtagatgaaattccggcacttaggagtcagcagtggtgtattgagtgcatagcccttgctcacaggtgcttctttcctgtcccatggcaggtggcaccaacagaaggtttctgcaaggctgagagctccttttacccatggaccaggagcaaagtttgcaggtacactgtcaggctgtgtttggatgttagcrgttaatttagctctgcgtcttcagagcaattattcttagctacttaaaaaaaaaaaaaggaaaaaaatgacacccataaagcatttgctgctccataggatgggagcacactctgttgttgggcatatgagtccctctggcatgtgttttctatgtttattgttgtcagggctgtccctgtaatttcccagaagtagaactccctgaagctgtttcccagaaaggacaggggtgtagataatggatgtccagagacagagaacactgcagtgccagatccctgtgctgctttgtcagacatttgtttatatattgtttgtttttgagatggggtctcactatgttgcccaggctgatcttgaactcctgagctctcaagtgatcctcccacctcggcctcctaaagtgctgggattacaggcatgagccactgtgtccagctgttattattattattattttgagacagagttttgctcttgttgcctaggctggcgtgcaatggcacatcctcggctcactgcaacctccgcctcctgggttcaagcaattctcctgcctcagcctcccgagtagctgggattacaaacgcccaccaccatgcccagctaatttttgtatttttagtagagacggggtttcaccatgttggccaggctggtttcgaactcctaactttaggtgatctgcccacctcggcctctcaaagtgctggggttacaggcatgagccaccgtacctggccccagctgttattatttttaattgatacctaatacttgatatctaatacatattttattgatacctaatacatatttacagggtacactgggatattttgatacatgtttacaatgtataaggatcaaatcagggtaattagcatatccatcacctcaaacatttatcatttttttgtgttgggacattcaaaatctgctgttctagctatttgaaaatatacaataagttgttgttaattatagtcaccctatagtgctttagagcactagcacttattccccctatctagctgtacttttattaacattaaacaacctttaggctgtgtgcggtggctcatgcctgtaaacccagcactttgggaggccgaggtggactgatcacctgaggtcaggagttcaagaccagcctggacaacatagcaagaaccatcttaaaaaagaaaagagaagaatatttaaaattttcttcactgatcattcaggagcatattgtttaatttctgtgtatttgtacaatttcaaaagttcacctcgctgttgagttctagttttattccattgtggtcaggaaagatactcgatataatttcaattattttaaatttgttgagacttgttttgtgggctaacatatggtctattctggagaatgtttcttgtgctgatgaaataatgtgttttctgaatctgttggatgaaatgttctgtaaatgtctctttgttagtctaaaatgcagggttttttgtttttttgagagagtctcactctgttgcccaggctgggagtgcagtagcatgatcttgactcactgcaacctccacttcccaggttcaagcaattctcgtgcctcagcctgccaagtagctgggattacaggtgcccgccaccacacccagctaatttttgtatttttagtagagacagggttttaccatgttgaccaggctggttttaaactcctggcctcaagtgatccgcccacctcagcctcccaacgtactaggataacagatgtgaaccaccgcgctcagcctaaagtgcagtttaaatctagtgttttgttgttgattttctgtctagatgatctgttcagtgcagagaatggggtgttgaattccccagctattgtattggtgtctatgtctccctttagatctaataatatttgctttatattatgtatctgggcgctccagtgttgggtgcatatatatttagaattgttacctcctcttactgaattgatccctttatcattatataataacctttttcttttttttaatcgttttttacttgacgtctgtttcatctgatacaagtacagctaccctgcttgcttttggtttctgtttgcatggaatatctttttccaccctttcagtctatgtgtgtcgttacagatgaagtgagtttcttgtaggcaaccgtagttgggccatgttttttaatccattcagccagtctatatattttaaggggggaagtttaataagtttacattcaagattattattgataggtgaggacttctgtcattttgttaattattttctgtttttttaaatatatcctttgttcctttcttcccctcttattgttcatccttgtgattggtggttttctgtagtggtaaaatttgattcttttctctttctcctttgtgtatgtgctctaccagtgagttttctacttttttgtgttttcttgatagtaattatcatttcacttccagatgtgggactcccttgagcatttcttataaggctggtctagtggtgatgaattctgtcagtttttatttgtctgagacatgtcaggcatttagcttcaggacctgattctagttccctgccctgtggcaacaagtagaaacagatccctggtaccctgcttaagtattacaccagctagatgtgagcagatgagaaaatcaaatccttctattttgccagggattaattcattctcaggattgtaaatattacatttcacctttcacctcacagaactgtagaattaggaggtgagctgggcagcctgcccagcaagacattatgatgtatacaatacagtgcactactaaggatgtgtctttaaaggcatttacagcacacagttttttttttccttataattttgctgctctttatttgtagtagtagataaggaattaagaaagcaaaaatgagtgctttgactaggtcttttgcctttgaaagtagcattagtaaaatcccctcttcttttttattcttataaaatttacccaattcactctgtcccccagcccatctgtgttcacttgctgttcttgctgctctcagtttttaaaagcttattctaaaattacatsaaagcaaccccattttgacaaaattagaattctggtaggaaacgcttgccatgaggctgtggagagaggcccagcaagacttttgtattttatttcaacctctgtcggttaaacctacaattcggcagatgatataattacctccctggggcaggtctctatctctgccttggagaaatagcaaagtccaaagtagtctcctcattcaaagatgttgcaaacgaaggctgttttgatctttatgtattagcatttgggtgttaayctttctggagctcctgacagaaaattcctttaaatttattatataattctaaaatattggacatatttgtttcaagcatctgtcagtatccttactctttccatttcactccccactgccttaattagtcatcaggtcctactgatttttaactcctaagcatttctcaaatctgtctcctcagtatgtattgttggttatataactccatctccattttcactgtgctgctttagactatcttttcttgtctagattagtgcctggcttatattatgggcttcataaagtgggatcaatgaatgaatgattcataatctggacaactgcactctaacacctaactggaaaaaaaaaaatcttaagatctatcttccatgtaaaagcatctatctaaaatgcaaatcttactttgataatctccaggttaataaacctcttagacggctctcaggcctccccaaaaccatctctcatttcactgatcaaaaaaataaaaatttaaaaattttaaaacttaaaaaaaaaattgaacatttcactggtcaaaaaacaaaaacaaaaatgatctccgagcatgcctccctcacaccccaccctgctgtgcatccctttcccacccccagcctacagagaccacccaataacctcttctttgctacatgacccttaccctccttcttcaagagtcatactttctccttagaaacttttccccccactttctggaaactgtagattctttcttgcttatggtttttgtaatgacatcagccatttagaattcatgatgtggccagtctctgctatctgcctctccacagagcttgctcagataatccatcaggatttagtcacagatccaaagtagggagctagaagggagcttcaggcttggtctcttcgggttgaagctagaaaactaatctatactgaacacaaaaatgaagctgagtaatagccaacctatacatcctaggaattaactattgcttattttgcccccagccagtctctccacactcctctctcctttacatttgttttaaacactatatatatatatacactttatttatatatatatactttttatatatatatatatataatatgtgtaattttttttttaattagctgggcatggtggggtgtgcctgtgatcctagctactcaggaggctgggaggctgaggtgggatgatatgtgggattttatatatatatatatatatatatatatatatttttttttttttttttttttttttttttgagacagagttttgctcttgttgcccaggctggattgcaatggtgcgatctcagctcaccgcaacctctgcctcccaggttcaagcgattctcctgcctcagcctcccaagtaggtgggattacaggtatgcaccaccatgcctggctaattttgtatttttagtagagacaggtttcttcatgttggtcaggctggtctctaattcccgacctcaggtgatccacccaccttggcctctcaaaatgctgggattacaagcgtgagccaccgcacccagccttaaacacggtatattagcccaacactgtgtgagaactgggattcagaaaaccaagatataggtctccgttctgccatccactagctatgctatgagtcagccatgaaaattctctgggcctcattgactgaatctgtaaaatctgacttgatgaggattatattcattgaactctgaggtcctgtccatttcttacaccctgattcaaagaccgcacagaatctctaacccagatattcttaactagggttcttgtatgtctgggaagatgatgaaagaacttcaaggggatcatgagctctttaaattctatataaaatccaaggctgggcgtggtggctcacgcttgtaatcccagcactttgggaggctgaggtgggcagattgcctgagatcaggagttcgagaccagcctgggcaacatgttgaaaccccctctctgtgaaaatacaaaaacaatcagctgggtgtggtggcatgtgcctatagtcccggctactcaggaggctgaggcacaagaattgctttgaacccaggaggcagaggttgcagtaagccaagatcgtgccactgtgctccaacctgggagacagggagaaacgctgtctcaaaaaataaatgaataaataaataaataaataaaataaaataaaataaaataaattctatgtaaaatcctttgtgaacttgctgcatcaccttggcccacaaagggggttttcttatcttttttcctctttcaaagtaatgatagtctatggttgccctactatgtattctctttttattattttattatttttttttttagagacagggtctcactctgttatccaggctggagtgcagtggtgcaattatagctcactgcagccttggcctcctgggctcacgcggtcatcccacctcagcctcctgcatagctaggatcacaggcatgcccccatcatgctcagctaatttaaaaaatattttttttgaggctgggcacagtggttcatgcctttaatcccagaactttgagaggctaaggcgggaggattgattgggtccaggagttcaagaacctgagaaatacagagagaccccatttttactacaaaaaaatagaatcaaaaaattagccaggcccagtggcattcacctgtagtcccagctacttatgaggctgaggcagaggattgcttgaacccaggggttcaaggcaaattgagctatgattgggcactgcacttagctttggtgacacggcaagactctgtctccattaaaaaaaaaaaaagtaaggctacagataagaaagtacttggacaacagtaaaaaagttaaactcatgacattggaccctatgaaatgtgtttaccctagagctgtttattgtatgataggtccctgctagatagtattcaaggtttaatgcaaaaactccaaggacctctcttggtagcagtggtattctttaagacggcacattactgaatccttcctgtaaaatggtcacaagatcatttttatgagcctctagaataactcctgaagctactcatgctccctactggaaaacacattactgttacaagattggcaaacatgaaccagcatggtagaaatctggcaggaagaaagctcaaaatttagcacttggccaggcgatgtgtaattcctgtgaaaattgcaggctaacagtcagtgaatttgtcagaaggggaattatttgctagagctctgaccaccacccttggagagttgatggttcacatctacccttcctccagcccaggtctggacaagggctgcctctagttcattcctggtgcatagccatccttagtggtcactacattctgaaggggcttagtgggactgtgggccttgggcaacggacctgatgttaactcaagtaagttcccagagcagatttgtattcagttcagctaacatttatagagcacctactgattgctacatgctgcctgagagataaagaggatggaacactgtctctgcccttgagaagctcagagggatggggagaacctaatgtggtcagagcagttgtagagataatgcctgtgggactgaaggagtgtagaagccagggtagaaagaggattctcaagattgtcctgagctgtgagaagcctctcagtgtctgtgaggatctagccacaaggagagtgagagtaccaaagcacagaatgcaggagtggtgatgactgttaagccaakaagccaaagagacagttgggcagagcaagggctagggtgcaaaatttaaggcagcatccactcccagggtcgtgcatgtgcagggtcagcacctgagagtgtgtgtcttcttaaattttgcaccctaggcacctcatttgcccagccctacagttgggtacagtcatgattgtctttctgggccatgccgatgagctgggattttttttattttttatttttgacggagtcttgtgctgtcgcccaggctggagtgcagtggygcaacctccccctccgggttcagtggtccaacttcccgctctgggttcaagctattctcccacctcagcctcccgagtagcagggattacaggcgtgcaccaccacatcaggctgatttttttttgagacaaagtctcactctgttgcccaagctggagtgcagtgacacgattttggctcactgcaacctccgcctcccaggttcaagcgattctcctgctttacctcccaagtagctgggattacacgtgcccgccaccctgcccagctaatttttgtatttttaggagagacgaggtttcacgatgttggccaggctggtcttgaactcctgacctcgtgatccacccacctctgcctcccaaagtgctgggattacaggcgtgagccaccacacccagctggaattttaactttagatcatggagggctttcaagcattctaagctgggaactgacctgtcaagattggcattttagaaatctcaccccaggttgggcgtggtggctcacacctgtaatcccagcactttgggaggtcgaggcaggtggattgcttgagcccaggagttcgagaccagcctgggcaacatatcgagaccccatctctacaaaaaaaaaaaaaaaaaaattagccaggtgcggtggcccacacctgtagtctcagctactcgggaggctgaggctcaaggattccttgagccagggaggtggagtttgcagtgaattgtgatccagcctgggtgacagagggagattctgtttcagaaacaaagaaatatcaccccagcaactgttctggtgggacttgactggagacagagaccagtttagatgctgttgttggagctgggcacaatggtgtgtacctgtagtcccagctactcaggaggcagaggcaggaggaacacttgaatctaggagttcaaatccagtctcggcaacatagtgagactccatctctttaaaaaaaaaaggggggcgggggggtcgctattttaatagtccaagcaagagatgagacccaaattaagggtcaggtggaagaaggcagtttaatcatatttaggaggtaaaactcaggaggcctgaattgaatgcatagatgaggaagcaggaaggctgtgtgatgaccccgggactctagagcagctgctgggcagtagagatggggatgttcagtgagttgtgagtaggggaggagggggagctggcatggggggctgggagaactatggatttgatcttgaaatatttgaggttagggtgcctgtggggtgtacatctcccctgtacacctgaccttacacttccagcagctggatgcatgagtgtgacgttagagaaatgacagctggaggcatacatcagcgtgtactttgtagattaagccacgtggatttaccagagaggaatcatagactgaggagagcagtggtctgaggaccaaaccctgggaaactctaggaaacaaccaccaatatttaaggtccaaaaagggtctaccttaaagtgccaagggagatggccaggggtagaaggcaaagaaggagaagaggtgtctagaagtcttggagtgaccaacagtgtcaatactccagggagtcaagtggcaggagacctgggaacctgcatggctgtggtggttgttgtcctgaccccgtttaagaatgtaacagagtggtcagggcagaagccagactgtaaccgtttgagaagtgacaaaaagtgaggaaagattcaggaatataggccaataactggttcccaactaggcagctttcttgaatacagaaccctgccaggcacagtgcctcacgcctataatcccagtcctttgggtagctgagtcggaaggatcacttgaggccaggagttcaggacacagcaagaccccatctctacaaaaaaaatataaaaattagcagccgggtgtgctggctcatgcctataatcccagcactctgggaggccgaggtgggtggatcacttgaggtcaggagttcaagaccagcctggccaaaatggtgaaaccctgtctctactaaaaataaaaaattagcgaggcrtggtagcacacacctgtaatccaagctgctcggtaggctaaggcaggagaatcacctgaagctgggagacggaggttgcagtgagccgaggtcatgccattgcactccagcatgggcaacagagtragaaactgtatcaaaattaaaataaaataaaataaaataaaataaaataaaataaaaaagcctggcatggtrgcttgcacctgtagtaccagttgcttgggagaccgaggcaagagtatctcttgagcccagagagctaggggctacagtgagctgtgatcacgccactgcactccagctgggtgacagagcaagaccctgtctctaaaaaaataaaaataataaaaataaataaaaaagaatcctgggccccacctcagagattctgattcatttgctttagcacagggccatggaatctgtcccagcatcctagaagctacctcagtgagttaacagaaaggactggtattgaaagtgctgtcgcctgggcacagtggctcaagcctgtaatcccagcactttgggaggccgaggcgggcggatcatgaggtcaggagagcgagaccatcccagctaacatggtgaaaccccacctctactaaaaatatgaaaaattagccaggtatggtggcgggcgcctgtagtcccagctactcaggaagaatggcatgaacccgggtaggcggagctggcagtgagcaagatcatgccattgcactccagcctgggtgatagagcgagactctgtctcaagaaaaaaaaaaaaaaaaaagaaagtgctgtcaacaagctgtgacaaagagaaggctcctctgtgaggcagggaagtggggtcaaataacagttttttttgtttgtttgtttgttttttgaaggagaggagctgatttaggacaagtaaaatggttgtcagagagcagaggaatccagggaaggcttgagaccgtgaatctgtggtggcctctgccggtgcttctgtgggctttctccagctctctcggcagggcggagtcaggagcagagaaggcaaatggtgggatgacctgaagttggggttttatcagagaggaggagcaggaggacagggtgtaaggcagatcaaggagtgttactaagggtctcaggtcctagacagtgggcctagacaggtaggcagtgagggttgtgggggacagggaagacgcgtggcaaggggccctgaaaaccaggggaatatggcaacatcaggggcctggcagtcccaggaggggagcaggtctagcaggaatgcccttgtgcctgtgcaggagagcagcaggactaggaggctgcagacagacagtgggtaactgaaaggtgaactttctactagacagcaaatccctggatgtcatcctgatggatctaagatgaaaaataccccaccatgaaaatgccttaygtggtcccaaccatgaagcgtaaaattgccttttcacctgaaaacgacctgcagcttggtttagcattttatgcttcggatgtcatgtaacatccagaagcaataccctcccccgttgcaagtcaaggtaaaatcagaaaatgctcggtggaaaggaaaaaaaaaaaaaacataagacaaaaagccagcaacagaataaagccgcaaacccaaagcaccagcagaggaaagggaaaaaaacctgcagcatagacaagctttgatgttgtgtgatctgtgaaaaatgtatagaaatgttaccttaccaaaaaattcccaaggtgctttacttgccaaccactggaaggaagtaaaaattcccacccagggtgttacttttaattatcatcctctttatgttgtttcctaaaataacaacaggcattctagagatgatttacgaagatggcttaatgaggtgtcagatgagtacctgtgcmcatgagcccctttaccgcaggcctccttatgcaaatttgactgactcttctgagcccgactagataaagaaacagacataattggagcagctgggctggaagcacagctgggctatcctcatggagaccagactctagcaccacgtgctcttcctgctgccccagtgtccctcccaacttttgcttttcagagcagcagcccacctgaacctggggcttcctcagatgatctccacatcagtgcttgtcagcattcatgtgcacacagatcacctgtgcaacttgtgaaaatgcagattcagactcagtggctggagtggagcctctggatctatgtgtctaacaagcccctgggtgatgcatgtggtcatcagatggtcctaggtccacacttggaggagctatttagagcctataaaatagttactcccctatccagtgtttgagtcccagacttctgcattctgccagcactcagatgcttctgggacaggatgcttactgtgcatcttgggtcaacatgtcaaaaaggccttcctgtattgaggtgagatctgtctacctagggctcaccctcacctggcctacttctgggccttggatcctatgtagcaggcttaaggcattagaaagtggctggcatgtcccccaagtattttattcaggcaaaacatgccaggtcctctggctattatttaaaaaatttgttgtagaggcagggtctcactatgttgcccaggctggtctcaaactcctgggcttaagtgatcctcctgcctcaggctcccaaagcgctgagattacaggcatgagccaccatgcctggtcttggctatttttcttatgctatggtttggtcatactggtcatttccttcttttttttttttttttttagacggagtttcactcttattgcccaggctggagtgcaatggtgcgatcttggctcactgcaacctccgcctcctgggttcaagcgattctcctgcctcagcctcccgagtagctgggattacaggtgcctgccaccacaccmagcaaatttttgtatttttagtagagacggggattcaccatcttgaccaggctggtcttgaacttctgactttaggcgatccacccacctcagcctcccaaagtgctgggattacaggcgtaagctactgcaccagcccctggtcatttccttctgatcctgctctatgtgtctttaggcctctcctcttgtgatacccatgctgcaaaaagtagcttgggactgtcaccacctcattacagatagcctttttttttttttttgagacggagtctcgctctgttgcccaggctggcatgcaatggcgcgatctcagctcactgcaacctccgcctcccaggttcaagcgattctcctgcctcagcctcctgagtagctgggattacaggcgcgcaccaccacacctggctaatttttgtattttttagtagagacagggtttcacgacgttggtcacgctggtctcgaactcccaacctcaggtgatccgcccacctcggcttcccaaattgcctggattacaggcatgagccaccacacctggccttacagatagcctttatgtgactcgtgttgaacttgctgtcagccatcatccttaaattcattttcacccatgctgtggatcagccacatttcttcctagtcagttattatcataataattatacttaatacttatgagagttagtatagcaaggtggttaagaacatagtctctggaatgagactgcctagtgagaagcactatgattagcactgtgtgttatctgtcaccatcaccatcatcatcatccatcaccatcactatcaacaccatcatcattaacatcaccatcactatcaccaccattatcaccatcactgtcaccaccatcaccatcaccatcaccatcatcatcatcactatcaccaccatcatcaccatcatcaccaccaccatcatcatcatcatcaacatcatcactatcttaagtaagtgctttgcctacatttactgatttaattctcataacaactccatgttgtaggggctgttgttatcccagttttacaagtgaggaagtggggcctcacaagattatgttttgtgcccagggtaacagtgacaagaagctaaatctgagcagtgtcctttggttggttttgtttcattgttgactaaagtccaagaccatatctgttcctgctattcataaatttcttcttttagtcagcattttacccttactttacactatcttttggattcctggttctgtcatcccaagtgtatctgcctcctagcttcatgctgtctgttatattgtgagaaaaatatgtatcttcacctagtcatacacaaggtcagaggccatgtggcaattccctacagattgtgctcactgaagccctgatggtgcatatctcctgaagctccctgagcctgtagtcttgtaacccactcagagaagcctagagagtggtcaggcatgatttgtatttgaacatatttgtatttggttcctgggaaacatgtttcctcttcgctttcaggtctccattccagaatcctttccaagatggacagcaccctccaaatttatagttgctgaaatcagtcctctgggcagggccagatgcaaggaacaaatagaaagcagggtctgcagaacacacatcccagaggcgataatgaccagttaatccccgcagatagttagatctaggagactgtccctgggcttcagggctccctgcttctgactccagcagtgcaaatgaaagcctctatgttcccactaaaccataggtgactgagcagccatggtgttgcctgcgtttctataaaggaggagcgcaggacagcaatctcatcagagcggaggctggggctggcctcgaatttaggttgtatgtttatttggggcgatgtgcaagcagggggtgccctgatagagattacaggggctaaatcccccacataaaaccattttgtgccactgctcctgggccaagtgaccagaaaggctggactgatttctcccctctctcctttcctggttctgttctctgaccctgggtgattaatgtaacctagctgtgttcaattacccacccttttcacgatgctgggatgtctgccacctatccctagtgcccttcttggcttcctgtgagtcgtgactgtgggagccttgcgacttttggaggagagcaggaggccctgggtctgccatcagcatgggctccctaatcacaccattgtcaccggagcctgcccaagctgctgggaagtagcaaaataagcatgcagggaacattcttccaccccaatatgttcccctcatgaaatcatcaagcaaaccctgaatgccttctcttggtgtggtcaggcagaagggttgtctctctcatactagagcagtcagtggccattggctgactgatcctaacggcagatctagaaagatttggagaaggctgtcttggttctcttagaacagcatgtggccctagcagtcctcctgttcttggacagtggtgccccctcatgccatgaaaactgatggggcaggcaggggagctccagccagaaacgggaagtgtctcaaaccttagtgaagtgatcttgaatcgctgatttacagggctgattttgacacattattctcaggaaaacagtggtttagggcatggtctcaagctctgtctaggttgaaatcttgtcaggtgtgctggctcacatttgtaatcccagcactttgggaggccaagacagaaggattgcttgagctcatgagtttgagaccagtctgagcaacatagagataccccatccctacaaaaaaattaaaaaattaggtgggcatggtggcacacacctgtagtcccagctactgaggaggctgaggcaggaggatcacttggttccaggaggtcgaggttgtgatgagctgtgatcgtgccacagcactctagcctgggcaacagagcaagaccctgcttcaaaaaaaaaaaaaaaatttaccagctgtgtgatctaggacaatttatttgagttctataggcctcatccaatgataataattggacttaccttattggttgtgacaactaaataaaaaaaaaatacatataaagtgcttagaacagttcctggcatttagtaagagctttgtaagtattaactattattagtaccatcatcatctttattgccactatttactgagtgtctaatatgtaccagacatgtctaaacacatatagtacatgcattattagctcatttaactactttggggttttttttgcgggggggttgttgttttttgagatggagtcttgctctgttgcccaggcgggagtgcagtggtgtgatctcggctcactgcaacctctgcctcccaggctcaagcaattttcctgcttcagcctcccgattagctgggactacaggcgtgcaccaccacactcggctaatttttgtatttttagtagagacagggtttcaccatgttggtcaggctggtcttgaactcctgacctcaagtgatccgcccacctcagcctgcaaaagtactgggattacaggtgagccactgcgcccggctgaactacactttgaaacagggtgtaacccacttggctctcaagcagagccaagtgtagagaaaaaggcaatataataattatctgctttctagtccttccttttagccactggagaaaatagtaaccactttctgtgttaaacaaacaaaaagaagaaaaacagcaaaactgaaacaaactaacaaatcccctcaatatttgatttccaatttgtgaaccactccaatacagataattctgagaagcatgtaacaaccagtaagaaaacctagtatgtttgctttaaagtcatagactagttttcaatggatagtcaactagcattggaaataaaagagtaagatcaatgttgtaggttcatttggtctatagtatagtttacctgtgatgtttctttgttgattttctgtctaaataatctgtccaatgctgagaaaggggttctcaactatgattgtactggggcctatagttggatttttttcctttagctctaataatatttgctttatatatctgagttcttcagggttgggtgaatacatatttacaattgtcatagccttttgctgacttgatcctttttatcattatgtaatgaacttttttgtcgctttaaacattttttgttttaaagtctatgctgtgtgatgcaagcaatagctactcctgctcacttttggtttccatttctgtggaatatcttttttcatcccttcactttcagtctatgtgtctttataggtgaagtgagtttttgaaggcagcatatacttgggtcttgcttttaaaattctttaagcaagtctgtatatttcagtgcttcagttgaggaagctaaaaatgggagagttcagtaacctgcacaaagttaaactggtaagtaattggtgaagtcaaaatctagaatcaaggcgtttttgttgtttattttttgttttggagacagggccttgctgtgttgcccaggctgaagtgcagtggtgcaatcacagctcactttagcttcatcctcctgggctcaagtgatcctcccacctcaacctcctgagtagctgggaccacaggtatgcaccaccacacctggctaatttttgtattttttgtagagacagggttttgttgtcctggctggtcttgaactcctgggttcaagtgatctgcccaccttggcctcccaaagtgctgggattataggcgtgagccaccgtgtccggcctgcaatcgagttttcctaactccagagttacgctgttatttccctctgctactgwccatagtaacagccatattactgagtacttaccacttgctgagtagggtgctgggcactttacatgccttatttcatttagtgttcgcaataatsctatgaggtagagtctcgttatccccattttacagatgaggtaaccaagcttcagagaagctaagcagcctccacaaatttatacagcaaagaaagccagcctttaaatccaggcctgcctgactctaaaatctgttctattgagtttaactgccaaacaggtgagcaggatgctcctaggagggtggtaacagtgattggtaatccatgacttctgggatccactgaaacccagggatatgcagtttgcctaatcagccctattttctgagctatcattagggacaattttcactttctctgatgcttcatttccctgcagcttctgaaagctgttgatttgctcagattaagaccagcttctgcgcctttcgcgtgtcagattgttgtgtacgtgttcaagagtatggaggaatcataaacagtccagaaggaggccctggtgtactacacaaagtttttgccacattgctatgggaggaatctgtgttgcttgagcaaacacttgaggttatgtgactgtgagattccaaatgtgcatttcaacatcaggtcatgacggtgcaacttgttttgtgatgaatrgcactataagtagaacatattctatagaccaaggattcttagccagggatgcatggcggggcttcagaggctctgggaacattctgtatgtgtgtgtgcattttactggagagagatctcataacttttataatattctcaaaggagttcatgactcaaaaaaatcatttaaaaaccattgttctcaatttaaaaatcactagaagaggaagcttcagaaaacagaataagccaggcacagtggtgtgtgcttgtagtcccagctactcaagaggctgaggtgggaggatggcttgagcccaggagtttgaggctgcagtgagctgtgattgcacctgtgaatagccactgcactgcagcctaggcaacataagagaccctgactctaaaaaacaaacaaacaaacaaaaaacagaaaccttaagtactctaatgaaaatgacagtgtgctctggaggcagaaatgcaccttcctttttgcatgaaagatttacgctatggggccgggcacagtggctcatgcctgtaatcccagcactttgggaggccgaggcaggcggatcacctgaggtcaggagttcaagaccagcctgaccaacatggcaaaacctcgtctctactaaaaatacaaaattagctaggcgtgggagcacatgcctgtagtcccagctactcggtaggccgaggcaggagaatcgtttgaacctgggaggccgaggttgcagtgagccaagatcacgccattgcaccccagcctgggcaacaagagcgaaactccatctcaagaaaaaaaaaaaaagtttatgctgtgattaatacctggtctctgtattaagggagtgtgtgtgtgtgtgtgtgtgtgtgtgtgtgtgtgtgtgtataaaagagagtgagagagtacacacactatgtgccaggtaagtgctaatattagttccatttttctttttgagacagagtctcactctatcgcccaggctggagtgcagtggcaccatctcggctcactgcaacctccgcctcctggattcaagcaattctcttgcttgagcctcccaagtagctgggttacaggtgcacaccaccatgcctggctaattttttrtatttttagcagaaacagggttttgccgtgttggccaggctggtctcgaactcccggcctcaagtgatccccgctgcctcagcctcccaaagtgctggaattataggtggaagccaccatccctggccttagctccattttataaatggggaaattgaatcttacagaggcatagaaatacccaagatcagtgagtaagtccatgtgagccctaagacagcttgcatagatttgtaaagcaaaatacggaacaaattatataaaaccattttctttttttttgagacagtctcgctcagtagcccaggctggagtgcagtggcacaatcacagctcactgcagccttaacctcctgggcttaaacgatcttcccacctcagcctcccaagtagttaggactacaggcacgcaccaccatgcttggctaatattttctgttttttgcagagacggggatcctgctatgttgcccaggctggtctcgaactcctgggctcaagagatcctcccatctcggcctcccagagtgctgagattacaggtgtgagccactgcccccagccagaagacagtttccaaataacatgcttaatatttgtacaagtatttctttttttcttttctttttttttttttttctttttgagatggaatctccctctctcgcccaggctggagggcagtggcgcaatctcggcccactgcaacctctgcttcccaggttcaagtgattctcctgcctcagccacccaagtagctgggattacaagtgccaccacctcgcccagctaatttttgtattttcagtagagacggggtttcgctatgttagccagcctggtctcgaactcctgacctcaggtgatctgcccacttcagcctcccaaagtgctggaattacaagcgtgagccactgctcccggcccaagtatttcttttttaggggagaaaaaattattggagaaaatttctttcctactcatttmccaaatttttctaggaagtctatgtcagatttcctttcttttttcttttctcccttaaaataatttttaattgttattataaacaggatggacctgtgctgaggagtgtagcaggactgtggttttattcctgcactgtctactgggttgtgtgaagatgggctagaaagaggatctgttgggaaggaagagtctaaaaatgaatgaacgtcaagagtcaacgactcttacagcatcattaccgtctgttcctcttctcagagagtcaggcatgagggccaccaggcaggggaaaaaatgacttcagatcatgagaaattaaaagcttttaattaaaattcayccgggtgagagagtgttcatggccaaatattacaaaaaaagctattttcctgtaatcagtgcttggtcagaagttcatagacccagttcactttctaccccatttcttcagtcttccccctcaaaattaagttagcgctaggagcctgtagaatgtgtgtggcataaatgtgtcttgcctgtgctacagctgcactttcactggtggctggagccagtcctgtgcatgttctctcctgcacctcgtcagttagccaatcccaatttaccctccaagattaggatcctggctgggcgcggtggctcatgcctgtaatctcaacactttgggaacccgaggtgggtggatcacgaggtcaggagttcaagaccagcttggccaagatggtgaaaccctgtctctactaaaaatacaaaaattagccaggcgtggtggcaggtgcctgtaatcccagctactcgggaggctgaggcaaataattgcttgaacctgggaggtggaggttgcagtgggccgagatcacgccactgcactgcagcctaggcaacaaaatgagactttgtctcaaaaaaaaaaaaaattaggatcctggctgggtgcagtgactcacacctataatcccagcactttgggaggctgaagtgggcggatcacttgaggtcaggagtttaagaccaacctggccaacatggtgaaatcctgtctctactgaaaatacaaaaattagccaggtgtggtggcgggcacctataatctcagctacttgggagctgaggcaggagaatcgcttcaaccccgaaggtggaggttgccgtgagccgagatcacgccattgcactccagcctggtcgacaagaacgaaattctgtctcaaaaaaaaaaaaaaaaagattaggatctgtcacacctcagagaacctttagtgacccccgaggctgagtttgatgctgctccctgctcccctagagccttaggaatttcactttccttgcatgtctcacactctcctgtaaatgtttattgttttggccaggcgcgttggctcacaccaacactttgggaggctgaccgggtggattgcttgagcctaggagtttgagaccagcctgggcaagatggtgaaaccccgtctctactaaaaaaaataataataataataattagccaggcgcaatggcacacacttgtagtcctagctactcgggaggctgtagtgggaggatcacctgagcccagggaggtcaagccttcattgagctgtgatcatgccaccgcactccgcctaggtgacagagtgagaccttgtctctaaataaataaacaaatttttattgttttaatctgtctcttccaccagattctaggctttctgaggtcagtttaatgcctggcacatagaaaatgctcaaaaattggtaaactaacaaatttgtgtttgttttttccccatccaaaagtaattgcaaggattaatgttcttaaggtataatcacgtgaaggcacttctatgttaaaaaaaaaaaaaaaaaaaaaaaaaggctgtgggtgggggcaaggaggagccagggaggaaaattagtctcctgtcagaatttgtgaagtcagtgctaggaggtgaaaacatcacctcttagatgctagcagtatactagcaatctattgctatacaacaaattactccagcacttcgtttattatctctaattgtttctattggcggggaatttagacagggcacatcttgtctctgcacatgatgtctagggcctcagcttaaaagattagaacagggctggaatcatcagaaggcttgttcactcacatgtctggcagttgatgttggctgttggctggaggccttgctggggctgtcagccagaacagcccacacacagcctctccacgtgacttgagcttccttacagtatggtggcagggctccaagggcaaatgtcttgagagagagagagagggcgargctggagccttttacataacctggctgcagaaatcacacagcattacttggccacattcttttggttaaggtggttaaaaaggtccatccaagttcaaaagaggaaacacagactccacggctcagtgaagaagtatcaacatcacattgtaaggagagcatgtggatgggatctagactactgtggccatctttgaagaatgcaatctgccacaagcagtcatggggaaaaggccaaattcctcataatagaatgtgggtgtgaatctcttatgtaagacaagagatatgaatcaaggcagatggattttgtgaaggcagtgagtttttccttcactttcagagtgcaggtaattataactctgtcaagaatgcaaatagaaagaggaaggtttaatattttgtgacagagatctggaatgttataaagtcctatttccagtgatcagatctacttcatcttcttgcaaaaatgaggcagttgtagtggctagagtaacaccctcatgaactctctttgttaagtcatcccccgtcccagtcacttccacctcttcctggcttactgtcactctaacatcactcttgtcataatccttgattattttcttatccatgttggtgataccctgaccactctgcttcttttttgagacgagctctcactctgtcacccaggctggagtgcagtggcatgatcatggctctctgcagccttgacctcccaggctcaagtgatcttcccacctcagcctccctagtagctgggatcacaggtgtgcaccataccacacctggctaattttttaattttttgtagagacgggatctcaccagkttgcccaggttggtcttgaactcctgggctcaagggatctgccctccttggcctcccaaagtgctgggattacaggcgtgagccaccgcgcctggtccactcagcttgagatccactcatccaatgatcttgtccttcacccttctcagctgctcacttctttgactttgtcatgacctgtctttgcaaccttccatgatcgctattctagatgtctttcagctccaataattcttcagcaccacaagaacatacagttctttggtataactactaccttttcactgtccctccccaactatgccttcccttcccccccccaccccccccccccacctagaacagaagcgcatcatgcgggccgggtgaggcggctcatgcctgtaatcccagcactttgggaggcggaggcagctggatcacttgaggtcaggagttcgagaccagcctggccaacatggtgaaaccctgtctctactaagaagtccgtcatgagaatcacccctttgcacacactcaactctcttgccccctccctccttcttgtgtgctcctaataaacccaaccctgattaaccccaccccctacaccctccacagctgtcatcatgcagtttctggtctctgtatttatgaaaacaacctctagtgggcccttgatgctgtctgcagtcagacattctctgaaatagggcatgggctgctcctctggcccagagctgtaaccctagattgttgggtcagagcccctcatctgccaggcactgctgcccagaccttaatacacacccatctggcctccaggagaataagaaatcctcttcagaaactgcttctccctgccgacacccctggctttctggtggcttcagaactaaagttggaggatgtgacattctgtctgagggtaccccttccatttccgcttctttttcctgaacactcagcattgctgagagctattttgacagctccttctattcttagcaccaaagcacaaagtcatatatgcagataaaccaaggctagaaaaactgcatgttcattttctaaattcttagtgagaaaaatcaagagcaactgtcggggttgggggcgtaaggggctgtgaccaagtcggacactccagagggaggtggaaagtgcctgagtggagattctgacactatgcagatgtgtcacctcgggcaagtcccttcagttgccgggggctcaaactcaccatctgcaaagtaaggggacgggatgagggaattcctaagcccctttctagatctttcattcttcgtcaccagatgctacaatatacacagttgcctctgggtttttttctgcctctcctgccttcattcatcagtttttcaatcaacgaaaggctctgcttcatgcccagagggtacagagataaatagggcacaattcttgccctttaggacctcactttccttatagacacatcacttgatatatgtgaaagttggttatacaaactgggtcattgtcatacccaactaactcagagttgagaggccgggggaaaagagcagttagggtacatagcacctgctccaagaattgatttttctgcaaagctgaaacagcctgctataaccctgagaccagtttcaccctagtaatcgctaaaatgacctgctgtgactctaacactagtttcacctgctgctgtcactcacgagtcagagcctgccagctcccagaagtttctttagtgccaatgagcgttctttcagaacagtatgtaacatttctctttctaataaaactcccggccaggtgcagcaactcacgcctgtaatcgtagcactttgggaagctgaggcaggaggatcacttgaagccaggagttcaagaccaccctgggcaacatagtgagacctcatctctacaaaaaaatttaaaaattatagctggtgtggtgatgtactgcagtagtcacagctactcgggaggctgaggcaggagaatcccttgagcccaggagtttgaggctgcagtaagctatgatcaaaccactgcactccagcctgggtgagagagcaagacactgactcaaaaaaacaaacaaaaaaaaagcaaaaacaaaaaatatgtatatctaataaaactcccaaccttctctttgttttccagacatgctgaggaccacctaggctgtgtgtgcactctgaattgcaattctgtgattctctctgtttttgagactcagtctcactatgttgcccaggctggagtgcagtggcacaatctcagctcactgcaagctccacctcctggttcaagcaattcttctgcctcagcctccagagtagctgggactacaggcacacaccaccatgcccagctaatttttgtatttttagtaaagacagggtttcaccatgttggccagactggtcttgaactcctggcctcaagtgatctgtccatctcggcctcccaaagtgctgggattacagacatgagccaccatgcctggccaattctgtgattctcaaataaaacattgagagattcatctctatattttatttgactttgacaaatcctgtaattatgtcataatatgatgaacgttttgagaaaagtctattctaagtataatgagaacaaagaaaaaaaagattggtcctggctatagaggttagaatatttcacaagaagaaattatgttagagaatattcttgaacgatcaattggactttgccagactgtggtgggcataggggacccagaaggaacattcattctagttatgagaaagggcccagagacatggcgaatcygggggacaaattccacattttccatatacttgatcattaagcacatgaccaagtgtgtcagtgcatgaggatggacaagatagattggagccttcactgtttttttcttctcatttaccaaaaatttcatcattttagaattgtcccagttttctaattttaagtcagggcttctttgtcatgcttaaagtcttaccctctgtgccctctgctctgtgttctatatggtagcctgaaatttggccctgttatatatatttatttatgccagactcctgaaggtgttcaagcataccatttatcaaatatttccatgtaatgtggcagctaataacagcttcgttttacagagggaagagctgaagcaaacactgatttgtagattgcttggtaacaggaaagagacctgatgtatgccctctgtctttccttcacaaaaattttgtagctttctttgtttcttcaagccttctacctgtagttatactttaagggagataattataagcaattttgattgacctgagtcgatcacactaggactgtcataagggttagattttgagttgactgtggctttaaggaagaattaaatattgtaacaccatttaaagttatagaagaaagcataagttaccactcagaatataggttggtaagactaaaatcttcctgagcccatgagaatacctgcttttttttccaagtctaattgtttcatgaagaattgctgagcatggtggctcatgcttgtaaacccagtactttgggaggctgaggcaggaggattgcttgagcccaggagtttgaaaccagcctgcgcaacaaagtgagacccccatctcttcaaataatttaaaaattagccaggggtgctggtacatgcctggggtcccagctactcaggaagctgagacaggaggattacctgagcctggcaggtcgaggctgcattgagctgtgatcatgccactgcactacagcctgggtaacagaacgagaccctcgctcttaaacacacacatwcacacacacacacacgtatatatataattgggcatacacctgtagtcctagctactcaggaggctgaggcaggaggatcacttgagcatagcaggaccctgtctttaaaaaagaaaaagaagaattattgttgcctttttcttttcatttcttttcttttttttgttttgttttgttttgtttttttgagacagagtctcactctgtctggagtgcagtggtgaaatcttggctcaccacaacctccatctcccgggttcaagcgattcttgtgcctcagtctactgagtagctgatattacaggtacgcgccaccacgcctggctaatttttgtatttttagtagagacggggtttcgccatgttgcccaggctggtctcaaactcctgacctcaagtgatccgcccacctcagcctcccaaacctctgggattacaggcatgagccaccatgcaagtctgggaggtagtatatcatgtaaacattgcaggacaaaagcatacccaagtgggtcacactgctatctaggatttggcctttggctttcaagatccaaaaagttcaactatgaattctgccagaactgatcagggtttagaggatgtaaagcaacctctttctattgtgtctctagcaccatctactgggaaacaaaagtgcctttattttttttttttatttttttttttttgagacggagtctcgctctgtcgcccaggctggagtgcagtggcgggatctcggctcactgcaagctccgcctcccgggttcacgccattctcctgcctcagcctcccaagtagctgggactacaggcgcccgccactacgcccggctaattttttgtatttttagtagagacgggttttcaccgttttagccgggatggtctcgatctcctgacctcgtgatccgcccgcctcggcctgccaacgtgctgggattacaggcatgagccaccccgcctggccaagtctctcacatttaatcccaacacaatgctgtatacaaaccaagtgactcagaataagaatgcaaaagtaaaccagacaaatgcaagccgaagtagtctcggccgggctcagtggctcctgcctataatcccagcactttgggaggccgagatgggcagatcacctgagaccagcttggccaaaacggtgaaagcccatctctactaaaaatacaacaattagctgggtgtggtggcaggcacctgtaatcccagctacttgggaggctgaggcagaagaatcgcttgaacctgggaggccaaggttgtggtgagccgagatcacgccactgcactccagcctgggcaacaagagcaaaactctgtcttaaaaaaaaaattggttgcatgtgcaaatattccctatttaaaaatttggccagatcacacctgtaatcccagcactttgggaggccaaggtgggtgggtcacttgaggtcagaagtttgagaccagcctggccaacatgttgaaaccccgtctctacaaaaaatacaaaaattggctgggcatggtggtgtgcccctgtaatcccatctgwttgggaggctgaggcgggagaatcacttgaacccaggaggcagagattgcagtgagccaaggttgagccactgcactccagcttgggcgacagagtgagactccgtctcaagaaaaaaaaaaaaaaaaagagcaaggaatcctttgtgcacttcccagattctctcggttaaacagtggacacccacacaccaggatggtatcgcctggacctcagtgtctcacttgagtgcttcgtacctaggcatcctgaggctgtatgtgaactcagaactccagtcttcaggcactaggaagactacatttctgaacagcagttctgagtttaagaaaagaaatggggccgggtgcagtggttcacgcctgtaatcccagccctttgggaggccaaggcaggtggttcacgaggtcaggagttcgagaccactctggccaatatggtgaaaccccgtctctactaaaaatacaaaaattagctgggcatgatggtgcgtgcctgtagtcccagctcctcgggaggctgaggcaggagaatcacttgaaccaggaggcagaggttgcagtgagcctagactggccattgcactccagcccaggcaacagagggagactacgtctcaaaaaaaaaaaaaaaagaaaaaggaaaaataaatgaaatgtcctcttttactcagatagatttgtgtgttctctcagcatttaggaacccacaaaagcagaaccaaatgttttaaatgactggcaattggttcttcttttactttttaaattattttaatggtaaggtacaagttcctgctttttcttagcctcctaagatttcagccctactttgcatgctacttctctcccctgattacagtggaagccaagttcctaaagttgccatttgaccacatgaaagggaaaaataattatcaccctaaaagagtatgttaacctcctaacatttgcatttacctttaaaatatatgagacagctctgggactataagaaaactttttaggccgggcgtggtggctcacacctgtaatcccagcactttgggaggccaaggcaggtggaccacctgaggtcaggagttggagactagcctggccaacatggtgaaaccccatctctactaaaaatacaaaaattagctgggcgtggtggtgtgtgcctgtaatcccagctacttgggaggctgaggtgggagaatcgcttgaacctgggaggcggaggtggcagtgagctgagattgtgccattgcactccagcctgggcgacgagcaaaactctgtctcaaaaaaaaaaaaactttttttttggctgggtgcagtggctcacgcctataatactagcactttgggaggccgaggtgggcagatcacctgtcaggagttcacgaccagcctggccaacatggtgaaaccccgtctctactaaaaatacaaaagcatggtggtgtgcacctgtaatcccagctactcatgaggctgagacagaagaatcacttgaacccaggaggcggaggttgcactgagctgagatcgcgccactgcgctccagcctgggtgacagagcaagactccatctcaaaaaacaaaacaaaacaaaacaaaacaaaaactcaaccgtaacattgtttaagcctctgaaacagagcccttttcttttcctcttcaagaaaaaatggctggagtgatttggcctgctacagaggaaactggtattctctgtacttggtacaaggttctagcacctggctgttactactcctgggtgggccataattttaagaggaagtggacctctgccatcatcttatcctggggttttccacctgcgctgctcagaacctgtacttgattcagctagaacaactctggcttttatgtatatgttactatatatttatgagtatatattttccattgtcccttggaatccatggaggattggttccaggaccccctactgatacttaaatyattagatactctagttccttctataaaatggtgcagtatttgcatataacctgagcccatactcccatatactctatttatttgagggttttttttttctcttccccaccctctccatatttgttttttaagacagtctcattctgttacctatgctggagtgcagtggtgcaatcatkgttcactgtagcctcgacctcctgggctcaagcaatcctcctgcctcagcctcctgagtagctragaccacagggacacatcactatgcctggctaattttttacatttatttatttatttatttattttattattttggtagagatggggtctctgcatgtttcccaggatctgggctcccatctccttaacaaattaaaatgaaggcggagagagtagaaccagtgagcctttgtggaggctctatataaagatgagacttgggcatttatcacctttgttttctgtctcttcccatcaggagaagttgccccagtgcaaggcactgcattcgacctgagaaagccagtggagcttggaaaacacctgcaggacttccatctcaatggttttgaccacaatttctgtctgaagggatctaaagaaaagcatttttgtgcaaggtcaggtacttttcacttcctgagtctgtaaggaagaaatgacaccaagtcctattttcctttggagcttttcctctggccatatcaatagcatttactatgctacargtgacccaataccacatcccatattttctcaaagctcccatggcacaggtgagctctgtagaatttatcccagtcccccacctgccattacccctattccccctgctyggcacccgctctctccctctctgcctgttctttaaggcccattttctgttagaagccttaactcttcctagtgaagtcacctcggctgtcactgaacttccagagcctttgtgctttctcgatctgtgacttatgcctgcctactccatggccagttggaggctaggcatctcctgcagcactcaccgcctccagccttgaccgatagacacttgtgtgcacgctctcgccttctcaccaaatcccagttcctcatgccatttcatctttgtgaagccctacctctaccccaacacctaatatcatccttggcactagcaaataatgaataaatgtttgcagaattaacagttttgtgtgtgtgcgtgtgtgtgacggagtcttgctctgtcgctcagactggaatgcagtggtgcgatctaggtttactgcaacctccgcctcccgggttcaagtgattctcctgcctcagcctcctgagtagctgggataacaggcacgtgccactatgcccagctaatttttgtatttttagtagagatggggtttcacaatgttggtcaggctggtcttgaactcctgaccttgtaatccacccacctcggcctcccaaagtgctgggattacaggtgtaagccactgcacccggtcaacagtttttaaataaagcagaaaaaatgactcaaaccaaatagtgacagaaagaagatcaaagaccttctccgggctgggcgtggtggctcatgcctgtaatcccagcactttaggtggctgaggtgggcagatcacttgaggtcaggagtttgagaccagcctcgccaacatggtgaaacgccgtctctactaaaaatataaaaattagccaggcatggtggtgggcacctataatctcagctactcaggaggctgaggcaggagaatcacttgaacccagggggtggaagttgtagtgagccgagatcacgccactgcactccaggctaggcaacagagcaaaactccatctcaaaaaaaaaaaaagaatctcaggccaggtgcagtggctctcatgcctgtaatcccagcacttttggaggctgaggtggtcagatcacctgaggtcagtagttcaagaccagttgggccaacatgatgaaaccccgacaatactaaaagtacaaaaaattagccggatgtggtggcaggtacctgtaatcccagctactctagaggctgaggcaggagaattgcttgaaccaagggggcggaggttgcagtgagccaagatcgcaccactgcactcctccctgggtgacagagccagactccatctcaaaacaaacaaacaaacaaaaattagctggacatggtagtgcgcacctgcagtcccagctactggggagctgaagtgggagaattgcttgagcccgggaggctgaggttgcagtgagccgaggtcgcgccactgcactccagcctgggcaatagagaaagactctatttcaaaaaaaaaaaaaaaaaaaagaatctcagcctctccaggaccttcctctctccaacctggctgctgccttcctccctactccccagctggcaggagtgagtctgttttgtgatgccccaaagaagctactgaggatcctgaaagccacctgctcatgccttgcctttgagactggaagaattttccatcatgctcttcctaccttcatctcctccttatatcttgtccctgctctgtggctgggtctgattcctgtctcaaagccgcttcccagcttctactcctccccacctgcttttctgccctggactcatgttgtttgtatttcttaccagggtgcatcatgctgcaagcgggcgggtactagaagtatacaccacccagcccggggtccagttttacacgggcaacttcctggatggcacattaaagggcaagaatggagctgtctatcccaagcactccggtttctgcctggagactcagaactggcctgatgcagtcaatcaggtaatgccacaggctggcttttcagagtagagttgtgtccaaggtcacactgtacgacagagttcactacactcgaatcagcttgtatgattcaaaagttcatgctttgtttgtttggtttgttttttgagacagagtctcactcttgtcgcctaggctgtagtgcagtggcacgatctcagctcactgcaacctccgcctcctgggcacgatctcagctcactgcaacctccgcctcctgggtccaagcgattctcctgccccagccttccaagtagctaggattacaggcgcctaccaccatgcctgcttaatttttgtatttttagtagagacagggttccaccatgttggccaggctggtctcaaaacccctgacctcaggtgatccacctgccttggcctcccaaagtgctaggattataggcgtgagccactgtgcccggctcaaaagttcatgcttattctcttctgcaagtcacagaaaacccatagccaagctactaacatgggatttacatggttttaagaaagctgaaattttgtaccttcaaagcctttatccagtttgtttctccttaacaataccttctcgttttctgcagccacacttaaggagagcttccatatcgtctcctcctatgtgctccctcataactttcttttctggttgttacccagagcagtactcctgaaagtgccagcccacaataagaagcttgcaccttgggctgggcaaggtggctcatgcctgtaatcccagcactttgggaggctgaggcgggaggattgcttgagcctgagattgaggctaacctgggcaacacagggagaccccatctttacagattattagaaaaattagccaggtgtggtagtgcacacctgtggccccagctacttgggaggctgaggtgggaggatccctgagcctgggaggtcaaggctgcagtgagccatgatcacaccactgcactccagcctgtgcaacagaatgagaccctgtctttaaaaaaaaaaaaaaaaaagggccaggtgcggtggctcacacctgtaatcccagcactttgagagtctgaggcaggtgtatcacttgaggtcaggagttcragaccagcccggtcaacatgacaaaaccctgtctctagtaaaaataaaaaaattatctgggcatggtggcaggtgcctgtgatcccagctactctggaggctgaggcaggagaatcgcttgaacccaggaagcggggtttgcagtgagctgagatcgccccactgcactccagcctgggcaacagagcaagactccatctcaaaaaaaaaaaaaaaagcctacaccttacaccagattatagatcaacacactgcttcccttcatcaggaaagccttcctttaacaaagtgtgcttttttcactctgattaaagttctttatctcactatgaaccaatcataaacagttcccgcactggcagccatccacagagcactggtctagaagcccgtccagaagcacacccaaatggttaatgttgcagcctgcggtgtcaagcatcacctgtgttgtttccccttcacagccccgcttccctcctgtgctgctgaggcctggtgaggagtatgaccacaccacctggttcaagttttctgtggcttaaggaagtrtgaagatatgatccagtccagggctaggctcagccacctgtctcctgtccagaaaaaaggtgaagattaagaagctttcagaatgattctatggattaaaatcatacaaatggtggctgttctgagaatcagtctgggtattgatttccttttccagtgactggctccaggccatgtctaatgaccagctcgattccctgtgcagttcagagrgcaagtgaacccaaccaacaatgtcgtcatctaagccctraccctagccagggactcccatgctgctgttggctccatctctccacactgcctctttcttttcaactttttgcccttcctttctttaaagctattctcacattgcttttatttcctcctccttcacctccaaccactgtcagcagcactctggagttttcaaatgtcacattagcctcaccctgcatgctaggagatggacctgtctctatacagcagtagatgattgataagtgaggaaactgaggcttacagaggttgaagaccaacaagctaataaataaaaagttgaggccgggcacggtggctcacgcctgtaatcccagcactttggaaggccgaggcaggcggatcacgaggtcaggagatcgagaccatcctggctaacacggtgaaaccccgtctctacataaaaaattagctgggtgtggtagcacgcaccygtagtyccagctacttgggaggctgaagcaggagaatcgcttgaacctgggaggtggaggttgcagtgagccgagatcatgccactgcactgggcaacagagcaaaactcgatctcaaaaaaaaaaaaaaaaaaaaaggaaaaaaaagcagctctctctctcgggagagggaggggacttccgagaggaaaaggcctgcaagagcctttgggttaactgagaaagcacagcccggccaacgcttgggaagaaagacaggcaagcactggaaacaggagctattagggtgaggagagagccttgcctttcacagcacagtgaggatgacattgcaccagggacagagattgtatgtgacaaggctggggctccttctttcctagacaatcaaagtatcagtgatgggttttggttggtgattttgaaaaaaaaaaaaaaaaagtatgttatactagtgtatgctgtactgaattgaaataaaaccaaaatctgcatcttcagaagacttgttcctttactcagcttgaaatctctcaggcgtggacctttgggaaatggaccaagaatatgggtgtgttctggattctactttgccctccagtgggagccctggcattttcctacctaacagttaggaaagctatctcagtggaagtagctttccacacctcctctttctttgtaaccgataataaaccaaagatcttgtttattttttaattcacttcagcatggatttttctgagcacctgctctgtacacagccctctgctgggtctgtgaagggattcaggtcaggtgtgatgctgcccacagcagccagtcaggtgaggtacatgctcagttgtcttctcactggtgaggttaactttggtgacttgagcaagatgctgcctgcagatctctccactcttattaaagttaccaatatatacattagccaagaggcctcagaggtgaactattaagctgactgcaacctagctaccaatttgattattaaattgttcgacgcagggttctcatactctaggtgccagcaatcatttaggaaatcccagagaagaagagaatgaacattttcttattcacaagtgtagagttgccagttgcccctgctttctgtatcctgaccaaaagtcacagagtgccttgacctttgtcacctagccagctgcagatttttcctagcaggcttgaacccaaaccgggccttgaacattcccaggcactgataaatctgtctaggttgttccctaaaacactaaaagaaactggcactgggccgggcgcagtggctcacgcctgtaatcccaacactttgggaggccgaggcgggtggatcacctgagatcaggcattcaagaccagcctggccaacatggtgaaaccccgtctcaactaaaaaaaaaaaaaaaaatacaaaaaaattagctgggcatggtggcgggtgcctgtaatctcagttagtcgggaagctgaagcaggagaattgcttaagcccaggaggcggaggttgcagtgagccaaaatcatgccattgcactccagcctgggtcacagcaagactctcattgcactccagcctgggtgacagcaagactctgtctcaaaaaaaaaaaaaaaaaaaaagaaaaagaaaaaagaaactggctctggccctgagccaaattcctttaactgtcatagaaactccctcactgctgatatacctgggcagaacaccccttttctctctcaacgattgctgcagcactctgtaaggaagttcctctaataaatgctttggattgatcaccctggcgcttagagcttctttctttgaaatcccagccggccctatctcgagatagtttggatcactccctgatggggtctcccctgctgccactatgggggcgattccagccctggatccactgagacaaaacaaagaaatgtaacaactacaaactagttcttaatgtaatggcctctaggtttgagaatgccaaattaattaattaattagccaaatactttgttttcttctgtccaaaaagattattgtttttataagaagccaagtctacagtagtccaagtaaggatattcattgcctgtagggcagctgaaataagttactggcctttaaattaatggtgtttataaaagcaagtaaaaaaggcggccaggcgctgtggctcacatctgtaatcccagcactttgggaggccaaggtgggtggattgcctgaggtcaggagtttgagaccagtctggccaaccaggtgaaacctggtttgagaccagtctggccaaccgtctctactaataatacaaaaaaattagctgggcgtggtggcatgcacctgtaatcccagctactcaggaggctgagagagggaaattgcttgaaccagggaagtggaggttggagtgagccgagatctcgccactgcactccagcctgggcgacagagcgagactctgtcttaaaaaaaaaaaaaggctacatttgtcacaccatgcatctgagggaagcaaaaatttagagaaactctttttgtggcagcaaccaatctgtcctttttcatgaaacacataactttgcttgagaagcccttccatgtgcttataagacatagattgtgacatgtgacagcatgtcagcataattgggtgattttatgataaaatcgctgaaggccccagcaagaagtaaaattttagaaggtgctggacgcggtggctcacgcctgtaatcccagcagtttgggaggccaaggcgggtggatcactaggtcaggagttcaagaccagcctggccaagatggtgaaatcccgtctctactaaaaacacaaaaattagccaggcatggtggcaggtgcctgtaatcccagctactcaggaggctgaggcagataactgcttgaacctgcgaagcggaggttgcagtgagcctagattgcrccactgcactccagcctgggttacagagcaagactgtctcaaaaataaaaaattgtacaaggtgagatgtcatattaaaataattacacaaacactgctgtgaagactaagatgtcatgctgtggaggtggaactggagagtttacgaaaagtagaacatggaaaaaaatgcaggactaccagcacagggcaggaaggaagcccagcatgtgtcctggtccccggccagttcccattttcactcttaaccattttaagcaattggatcaccagttttcaagaggctgtttggacaggagtgcaatcctttcccaatcaaggcatttcctgcttaactcagttacgcagatcatcattaaagtctcgtgctttgggcagcacttccagctacagtcaggcaaggacgtcagcaaatcctctccttattatagttcgagcaattaaaatgctgaaaaaattggacgaaacattttttttgttgtttatagagatggggggtcttactatgttgcccaggttggtcttgaattcctgccctcaagcaatcccccctccagcctcagcctcctaagtacctgcaactataagcacgcaccactactcccagctcaaaacaattttggtgttctggaaacagacataaaaccttccagtctgagatatgttgtctgaaaaactactgagctttgagtaggaatagtgggagtctgtagtgttcttgcctggggctgttcgtatccccctcactcctccaactcagtaattgtgaaggttctgctgaggcaaaacagaacatgaggacaagcaagcagctgtggttgaaagagggtttactccatttggaggtgtgagtggcagccatacccaaaccatcatcaatggaagtaacaatcccagtgctgtgcaggcagggagggcttatggctctactggcctgaggttgcagtcgtggctgcaagcagatttttggctgatcggaggctgggtacatgtgcaacagagatgaagggctcaacaaaaagtaaaacttaagatagacttgaaagcagcctgaatattaaaattactcacctacctacacaaagatccatcagcagaggacagaagtctgactggttgaggtgtcagcacaaactctccagaaagtggctgccccctaagctgtgcagacacaaggcaaccccctagaattttaaaataagcataagaagctgggcataggggttcatgcctgtagtcccagctactcaggaggctgagacaggaggcttgtttgagcccaggagttcaagactatagtatactatgatcccacctgtgaatagccaactgcactgcagcctggacaacacagggagactgtcttttaaaagataaacacaagaatgttgaaaacaaaaacaaaaacaaaaaaactggagattataaaaaggaatcaagtaggctggggccaatggctcacgcctgtaatcccagcactctgggagcccgaggcaggcagatcacctgaggccagaagtttgagaccagcctggccaacatggcaaaacccaatctgtactaaaaatgcaaaaattagctaggtgtggtggtgcacacctgtaatcccagccacttgggaggctgagccaggagaattgcttgaacctgggaggcggaggttgcagtaagctgagatcatgccactgcactccatcctgggtgacagagtgagacactacctcaaaaaaaaaaaaaagggaatcaagtagaagtttgttgaaaacagtataatgatgcataagaagttaactagagaggccaggcacaatggctcacacctgtaatcccagcactttgggaggctgaggtgggcggatcacttgaggacagtaattcaagaccagcctggtcaacctggtgaaaccccatctctactaatactacaaaaattagccaggcatcaccaygtgcctgtgcctgtaatactgggaggctgaggcacgagaatcacttgaacccgggaggcagaggttgcagtgagccaacatcacgccactgcactccagcctgggcaacacagtgaaactgtctcaaaaaaaacaaaacaaaacaaaaaaaaagttaactagagagagtcagaagtagatttgagacagcagaagaaagagtaagtgaacttgaaggtagattaataggaattattcaacctgaaaaacagaaaagagattgaagaaaactgaacagaacctcagagacctgtgagaaaacaagcacatgagcgtatgagtaatgggagtccaaagagagggacaaaaaaaaataatggcaaaaaacttccaaatttgatgaaaaccaattatctataaatctaagaagctcaacaaacttcaagaatagagattcccatctagatacaccaaactgttgatacatttaaactgctgaatgtcaaaagcaaacaaaatttgaaagcagcaggagaaaaatgactcctcgctacaggggaccaccagcaccagtacaattaacagctgacttctcatctggaacaatggagcccagaatgccgtggaatgacatggtcaaagtgcttcaaaaccagagattcaattatcacccagaactatccttcaaaagcaaaggtgaaataaagactagggaattcattgctagcaagcctgccttatgagaaatactagaggaagtcctccatactgaaattacaccagaatccatggaaagaaataaagaagatcagaaatagtaaatatatggattaataagacattgtattttttcatttattctcttaaaagacataagattagccgggcatggtggctcacgcctgtaatcccagcactttgggaggctgaggcaggtggatcacaaggtcaaaagatcaagaccatcctggccaacatggtgaaaccctgtctctactaaaattacaaaaattagctgggcatggtggcacgtgcctgtagtcccagctactcaggaggctgaggcaggaggactgcttgaacccaggaggcagaggttgcagtgagccaatatcatgccactgcactccagcctggcaacagagtgagactccgtctcaaaaaaaaaaaaaaaaaaaagacgttaagattacacaaagcaatacttgtaacacagtagtatcaagtttagaatacataaatatagcataaaagagggaagagtaaaaggaaacagcattggagtgtaatttctatattttaccagagtattaatcagaactagattgtggtaagattcaaccactaactaaaaaatagttttaaaaaatcaagaggaattaagtaacacacttaattttttatactaaaaaaaatatttaggccagacatggtggctcatgcctataatcccaccactttgggaggtcgaggcgggtggatcacctga

SEQ ID NO: 93277 - DNA, 51905 bp, Homo sapiens
  misc_feature (1)...(51905): n = A,T,C or G
ccagcccagccaagacaccagctgaatgtgacctagtgagtgacctcagggaatgccacatggaaaagaagaaccagccagctaagccctgcccaaattcctgaccccctaaattatgagcaaatatattggctgttgtagtatgcctctaagttttggtgtagttgttcacagcaacagatagccaaaactaaaaagggaaagccattctagggagagggaacagcattttaaaaactacagtggtgacaggcaatgtggcatatgcaaggatttctacacagtttgatatgctagaaagtaaaatttgtggagagtggcaggtaataaggctggaagtaagcaggaggctggacatggaggaccatcctatggagggtggattcaggagccttaccaactaagagctgtgttgaaggggagagagtttgttaatggaaagactgaccatagcaagattcaagatccagtgcaagtactcctgagtcgttttttccctcctaacaggtagatctggggcaacctacacggacagcatttatggagggggaaggttactgttacttgtgtgaaatgatgggtaggtttgtattctatattgtgaggaaggactttgtgagggagggggtttatggatgacgatattgtattttctactcaacttcttttagattaaaacaaattctctctctagctgcttcctccttcttggtggtgagatcctcagaaactaagcagctggctttatcttgttccagaaggacctgggaataggaactgaggaggagggtggatgtcaatgaaaggacaaactaaacaacctaatttgacttgtgttccctaggctgggttcagagtcacatcctctactgtatatgtcacatttcaccttcattttcattgtgaggaaatggccatatattcagggataattttggatgtttccctcacaactcaggccaaatgtctcctccgccttttagccagaatagcttgattattgctgtattatgaaacattcaaaaaatgttcctgaaagatacattacacaatatccataatgatgtgtgttttatttcctttcttttctgtacctcttagcaaagtgttgggctgcagaaaaaagaaattttaaagtggcttaactgggacattctcaagctgcaagagaggtctagaggtagacagacctgggcttaccatcattaaggatccagccttttatttctgcttcagtagtcttagtgtgcggcttttatcttcgggactcattgctgactttccaggcatcatatcaatgttccaaaggaaaaacggtgcatgccagacagatctttcccttttgaaaagcattcctggaagtcccaacctggcactgccagttatatctctccaggcagagctgagtctctgggctgtctctctacaaaggaatctggaaaggtgattgttttcttcttcttccaagtttcctttttttttttctttttgagaagagtgtggctgtgtcacccagactagagtgcagtggtgtgatcacggctcactgcatcctcgacctcttgggctcaaaaatgatccttcatcatgacatcaggagatcaagaccatcctggctaacacggtgaaatcccgtctctactaaaaatacaaaaaaattagcccggcatggtggcggacgcctgtagtcccagctactcaggaggctgaggcaggagaatggcgtgaacccaggaggcggagcttgcagtgagccgagatcacgctgctgtactctactgtactctagcctggatgacagagtgagactccatctcaaaaaaaaaaaaaagatcctcccccggccagcttcccaaataggtggactgcaggtgcgtgccaccatgcttggttaattttttaaagttttgttagagaaagggactctatgttgcccaggatggtctcaaactcttgggcttaagtcatactcccaccttggcctccgaaagtggtggaattaaaggcataagccactacgtccagcctttttcagatttctataataaagaaaggcaatgggaaaggggactactattgtttgaatgttccctccaaacttcacattgccaatgtaattttaagaggggggcctttaagaggtgattggcccatgaaggttctgctctcatgaatgggattgaagcccttgtaaaagaagtttcatggagcatttggtctcttgcccttgtacctcctgccatgtaaggacatagagctcctccctgctggaggacatggtgttcaaggcaccaccttaaaagcagaaaccaaaccctcaccagactataaacttactggcaccttaatcttggacttcccaacctccagaactggcagaaataatttctgttccttataaattagccattctcaggtattttgctatagcagcacaaatgagctaacctaggaactgtgtatggcttttgggtggtccatctacagaggccttcccaggacccatcctctctacactttcccagatacctgaaggcattttttttcaggtctgccttagtagttgcaaaaccatttgctctacagtgggatataattataatatagcttacttgaaaatacatagcataatatcttgggcccatggataacatagtaaaacttccctatcacatgattagtggggcccaaactacccaattacagaaaatgtggggttattctgaggttaaaaaaaaaatactgggggcaagcccaggctgaggggtgtgtgtgtgtgtgtttgagacagagtcttgctctgtcgcctaggctggagtgcagtggcatgatctcggctcacttcaacctccgcctcctgggttcaagtgattctcctgcctcagcctcccaagtagctgggattacaggcgcccgccaccaagcacggctaattttttgtatttttagtagagacagggtttcaccatgttggccaggctggtcttgaactcctgacctcaggtaatccacccacctcggtctcccaaagtgctgggattacaggcatgagacaccacgctcagccatatgtgttttttaattataattttttaaacagctttattaaggtataatttaaataccataaaattcactaatgtacaattcaatgattcacagagctgtgcaaccagcaccacaatccagttgttgaagacttccatcacccgccttaaatgtcgcacgtccatttgtataaatggagacagatgaacaaaagcctacgctgggagtttttagggtccagtccaatctcttctcagtttggctacagtttggtgccacctggtggtgtctgtcctggtttctgggaccaggccagggtttctaggaatctcccagttagtaggcaaccattaaatcaacctattcttggggagactagaccagcaaaataccagactgaaaggcacccatcctctatcttttggtttggtgaagggcctggctgctgtttctctgcctggtgttattctacctgccaaggagaggagccaatcataccccaattcacatatcccaatttgcattactgagggcactgcaacacatacatacaaatatctataattattaaagcagtatattaagtgagctgaacttgataaggcacaaacagaaaacattatctgttaccttgaaatcatctctatgggttatttctttccctgacctagatgaagtctctggcatcttccagagcttttctggtcactctgagacaatgaagagttgtctggttactttcatctaattataccctcgtttctgtaaactatcatgtccaggatcgtgattgaaattcacaacttcaaccaacatcatggcttcctcctcttcctgcttggcctattccacgccagaagcctgcagtgggatggaggatggggtcagtctcttttctgtactcgcctctcccattagctgttgtttctgactcctgggaaggataaagtctakgggatggggtggcgggtgggtacacacctttatctggctgggtttatggtgatctgattctggtgctttctggcttagacatgctcaaggctgattgtttctcttagagggaactttttgtggtatcttggagattctccttgctggcatcctccacatgcaactcccatgagacaagagatatctcttctccagtttggaaggtaaggatgccactgcgttctttggggggtctgtgtgctgaatcatttagctcctccgggaagtctcttgggcacattccctttgaagaaaacttccagtccactctccacagatctatttatcccttggggaaaaaatgtcacacgattcccccacagttaactcctgcagcaggcttctctctccttctctctgtctctttttctgccctgccacctcaggtcctcctagggacggcttctcagagcagtccttacgcttcccaaactctcagatcaaaagttctcagagtakttccctgaaatgcattcttttcacagaaatcttttctcttaatttgcatctttaattttttcatactttatctcttccttgagacagggtcttgctctgccacccaggctggagtacagtgacaccatcatagctcactgcagcctccacctcctaggctcaagagatcctcccacctcagcctcccaagtagctgagactacaggtgtgcaccatgcccaactattttttaattttttttggagatgggggtctcattatgttgcccaggctggtcttgaacttctgggctcaagtgatccccttgcctcagcctcccaaggtgttgggattatagacatgagccatcatgcccagccgatttttcacactttaaaggtgggcattggcaaaaggcacaaaaattagatttcagatttccctttggcaagtcctgcataatatgggtcttgtatctctccttggaatgtgggggtacttggtatccattcaaaactggtacactgcataactctcagggtcttatttagacaaaatataacaagaatagagaatataatgtgaatagtgccccctggaagtgtaaagctgcagggctgagtgtattgtcctgggcctttggagcttcaggtgaatcctgttacatgtaatagtaataacagagctagttatattgtcaccatgtgctatgcactattttagatgctttatgtattttatttgatcctcataactatcatatgagaaaggtactattgttcatccctatttcacaggtaagtaaactgaagcccaaagaagcttcatgacttgttcaaggtcacacagcaagcaagtggcagacctagaatccaaactcagaatatggttcccaactctgtacttctaaccctattctatcttttttattttttatttttttgagacagactctccctctgtcgcccaggctagagtgtagtggcacgatctcagctcactgcagctttcgcctcccaggttcatgtgattctcatgcctcagcctccggagtagctgcaaccctattcttttttctttttttttttttttgagacggagtctcgctcggtcacccaggctggagtgcagtggcgcgatctcggctcactgcaaccttcgcctcctgggttcaagcgattctcctgcctcagcctcccgagtagctgggactacaggcatgcaccaccacacccggcttcttctgtgtgtgtgtgtgtgtgtgtgtgtgtgtgtattttttgtagagaaggggtttcaccgtgttagctaggatggtctcgacctcctgacttcgtgatccgcctgcctcggcctcccaaagtgctgggattacaggcgtgagcccccgcgcccggccgctgcaaccctattctatcttgcctgagggttccacttttctccatgacactctggggcaggctacagatagcacagcacgcgccctcgcattgcgcagatgtggctcagatcccacgctgccattcggtagatatgtgtctttagataagtgacttaactttcccgaattttagagtcctcatctaaagattctaataccttcctgacagagtgagtgtctggttgggaggattcctcatttactttccccatctctctgcaaagagaaaggagttaaaattgcatggaagtcaaacccgaaattataaaagcgacatcaaacatgggtgaagggagggagacctaaatcattacttagtttaaaaaaaaaatgtaacaaatayctactggctgccaggcactcaytggcattggtgctcagggcaatgaatccagtccatctctccgggtcattcacacaccaaggccctgctcacctttggaaagctgggggactgagtggggagggcacggtgtggtgtcagcctgagcccactggatgaccctaatcaccaaacatctgcttccttctctgtagctgtgaccctgataccgcgtggtgtgctccgaacacatggtgcccagaacgaaggcggcgtccagaagccctaggtcccagmggtccgctcagcggcaggcgcataaggcggggccggcgcgggcctttccttccatcggaaccgttctcccggggctgagtccctgcccggactccgaacgccgaagaccaggggccggaagcgcgcgccgccactgccrcgcygtgtcagtcgggagggagggagcgagcaggcgaagccgcggaggacggggtgaagatggcggccttctccggtgcgtttgtggaaactctgggggtggtggggcggcttgttgcacgcctcagccctggggccgcccgcggagagctaaaggggcgggagcggacaggggtcagggagacagaagggcgctgtccgctgcagtccctgatggacccgcgttgcgggatcaggggcggccgcggctcgggttcggaggacgattcttcccaggagcgggccggaacgtccctccccctgccctttcccttctaccagtctccacttggctttcctgccagtgcaccttcggctgcaaaatctaggcggcggcgttgctctggcggctcccagacgcctgggcctcctgcctcttaacgtggcagtgaccctttgggaacccttttctgcccgcggctcatctgggcttggccaggcagagaggcgagacggcgtggggaggagtcattggggaaaaatgacgatcctgcctctgtccagttttttcaggcccttccaaaacgtcccaggcataaacctgatctttatttgttcttaaacgttgttatatcaacattaatgttcagtgttgaagctaaagggaaagcattttcattaacgtacgcaccagtccaacataagtttggaaaattcatatttatttgccgtctgctaccctcctttattccaaatatgatttgatatggcttatcgaaccctacagttgatattttcgcctcttgctttatcatcctcctgttaggcatccagttttaggaagctgtaatcagccttaaatgcgctaaacgtgatacatttatgtagcacttatgtaacgtttattgctatataaatgtatcacgttaggcctaatgtcctttaatgttattaactttttaagatgacttcagatgtagtattttatattttttagttttcttctgtaagaatattaggaattccatatctccagtcatgtaagatattttttttcttttttgggggggagaatgggggggtggggggatgtagtctccttctgtcgccccagctggagtgcaatggtgtgatcttggctcactgcagcctccacctcccaggttcaagcaattctcctgcctcagcctcctgagtagctgggattacaggcgcctaccaccatgccctgctcatttttgtattattagtagagacgggggtttcaccatgttggccaggctggtctcgaactcctgacctcaggtgatccgctcacctcggcttcccaaagtgcaacagtcatgtaagatttctgactgtttcagttacatcttctaataggattcaattggaaactgctcagagttgttgctgtttttcttttcccaacattctcctaaaacgattttagagccaaggtctgtaggatagttctaggtagtcattttataggttcacatctttgggagtcatacacaaatttcatgaatgttagaggtaaaggactggaaaaagtctgtgatatgaaataagacaaaactggaatttcacgaatgtttctaatttttccttaactgttaaaagtattatacttaaggtccgctttcaaagaaaacttgcagggaacatgaccagaatggtacaagagattgtctggaatttactgaaaatgatatgttgtttcttgtataacaattttgcaaasagcttcagcttgcagtattccgtatgcagtaagaacacaccactcctttgtttcaagcagtttgcattttaggagagagaacatagactgtaatacaggttaattcttaggaaggtctgcctggatattcaactttagatcttcattagtttatctgtggcttttttttttcctgagattaagagctaggaaagtcgccaggtgcagtggcttatgcctgtaatcccagcactttgggagtccaaggtgggcagatcacgaggtcaggagattgagaccatcctggctaacacagtgaaaccccgtctctactaaaaatatgaaaaaaaattagcgggcgtggtggcatgcgcctgtagccccagctcctcgggaggctgaggcaggagaattgcttgaatctgggagacggagtttgcagtgagtggagatcatgcccctacactccagcctgggtgacagagtgagactgtctcaaaaaaaaacaaaagaaaagaaaaaaaagaaaaagagttaggagagccttctttgaaaatgatgatccttctcatctgatgcaaagaaaaagctacataattttatgaagaatattttcagtttgtatgtttgctttatgccttttcacaatggcaagaaatacagaatttcagaattggttatttctggggcttgggaatgtttgattcttgttcttttttttataggaatatatatttttatgataaagctatattttataaatacagacttaaaataaaaatcacttgtcttttggaaggaaagtttaagtaatccaactaactactccatatataattaccctctacagttcatatgagaaatgataaaatgacaaaacccggttaggagcaactcatctctattcatttaggatgggccttgaagtagaattattgagatatgtatacagttaagaactcagcagttcttcagctgacatttccaggtgcccacgttttcaccactgacccctccctcttcagttattcagaattttgattatggctgccaataaatgtgggtgctcgccacttgtctattcatttttttccaattgctgagggtattcacatggtcctagaatagccaaggcacataactgccacattrtctctaaatgcaacaaccctgtctattcttggcagacttttcacgagtcatgagaggtaaacaggcactgtagtggctacagtttattaggtgacaaccatgctccagttgcattacatgattatctctggtcttcatatagccctgcaaggtaggcaatatcagccccattttgtgtggagaaaacagatttatagctttgcctaaggtcacttgctaataagtgagaacttagatttgaactcaggtctttctccagaacttgtgctctttcaacagtgccacgctcagtagatttgatgtaactgagctatccttcaaaatctttaccctgttttatgaatagtaattttgagagcaatgcaatttatcatttcagtttatgtggtttttaaaattaatttttactttcagagatgggtgtaatgcctgagattgcacaagctgtggaagagatggattggctgtaagtacataaagcctaaatgtacctgggagaggatgttttataatttaaacagttgttagtgattttatcaaatatttttgtgtctagttgggtaantgaaaatcaggttttttttgygattttctaaattatggaaagtttcctttttttaaccttgacatatttctagtggaataagatggatcgtatttaccacgtaaaattttcttttaggcaaattaacgtgacttaatttgcttaggcgatttttttccccagtaactaaaattcttcaaatatgattcttttagcctcccaactgatatccaggctgaatctatcccaytgatcttaggaggaggtgatgtacttatggtaagtttaaatttggtgaggtgattggtagctggggacacactctaagaattgcataggcttacaaatgctactttacctttattcacaaacatttatgatacatatactgtattcagactattaggtaaaagcttcaaacaggtaagtatttactcctgagaagcttaaacccactagggcaataagacatgtataagaatgaatctcgtatcagagagaatgtggcttcttcgtaagagatgcagagtagtatagaattcaagtgggaatccagttgtccttttgcttgaaggatcatagggactgcttaaaggaagtagatttctttttttttgtttttgttttttggaaaaggccaagctctgttgcccaagctggagtgcagtggtgtgtttatagttcactgcagcctcaaactcctcggttcaagcaatcttcctatttcagcctcccaattaggtgggactacaggtacacaccaccacatccagctaatttattgtatttttttgtagagacagggtctcactatgctgcccagtctggtctccaactcccagcctcaagcgatcctcctgtcttggcctcccaaagtgctggagttataagtgtgggccagatttttcgcaagggaagataaaagagaaatgctttttaggtagagagaatatcagcaaaacagcgaatagtagaatgtaggatatgaccctggaatatttcagttggttggtagcataaaatatgtgtctgaggggggataaacttgaaataaaattgtagagagataatgggtcagattatttgggctctttctcaagtgtcttgttaaagaatttgagtgttagtcttctatgaagactaatctgagtagcagattgtagtatagctctgggattagatgttgttcggatacttttataataatctagattagaatgatgagagcttccgtttgaatggtagcaatgggaaagggaagagaagattcttaagggtatgggaaaggtaacaagatgrgctgtagttggagttgacagaggaaccctggatatctggaggcactgtgaaaataaaggtagccagtcaaatgttaaagatttctacatactatggtgttagtttgatttctttaatagacaacttaatctgtaaaatcaacttttttcccctcattcaggctgcagaaacaggaagtggcaaaactggtgtaagtaataaattatatttactttctctctaaaagttgaattttaaaataactttgaacagtagtttttactttgaaatatttaataaaatagcaacctccaaaaggtaaggaattaattacttgctactgaaaatgatatttttgttgccagctaattatgaagagctaaaaaaagtatgaccttaagaacatagttttaaatgggcgttagagagttacaatagctttagtgtttatactcacttctgaattttaatatgatgactcttaaaataaaaaggttacatacagaagttgatctcctactggcctggactagagaaataatttgtcggactggatggtatttttcctctttagtgtaggttcattctrccagtctccattgttctatctttttgtgatgttagctgcgtcctatttccttcattcagtccactctgtgttgtctgrtgggtatttttggtttgggtaaatgaaattrtagtagcaatctggaatatgtatgattagttgatgtgtgtgcataacttttgtcatttatattggttattaaattgtcgttaatatgtgaatactaatatagatamcttttgtttctttgataggcttttagtattccagttatccagatagtttatgaaactctgaaagaccaacaggaaggcaaaaaaggaaaaacaacaattaaaactggtgcttcaggtaatttttgtaaattgatatttccttttatataaatcattggttctcatcactgacagttaggaaagtgagatttgggtatgcatttttaaaatcttgtcartatctggggggtggtattgggatctggaaccctggaaaccagggatgctaaatgttgttgagagcctaaacactgcaaggttgtccctcctaaaatactaatagtgttccctttgagaaaacactagcattttggagattacatttcaatattatagtgtttttcttaaccttataactttctatgcttaatgctaaaggaaaataggtacattttacaaaaatattaaggaaggattttacaaataatttatggagtaaaaacccatgctggtgggaagtattgccttacagggaacagaggcattttttttcctctaagataagaagggaaccacctaggaagttaaaatataaattttaaagttgtttcttatgtgcagtcctatctacatggaaattggtctttttattaggtttctgatactgtctctaccgtaatcaatcttaccrcagtttcttcatctttaaattgtgttgcttctgttgaatgttttctaaatttcattctatcttaattaatcttttgttttgttatattttaataatattttttccacattttaagtcactcttgtttcattatacaaaacaggattgttacaaaacagcaagttgaagaccagtgaacctgtcatattaacatattcttttcagttgtttgaaagtaatgttatacataaaatgtataatgtagaatctgtgaactcatgtaaattagagatagataattgatgtaactatttacactattggcctattctaaaatagtttcagaatttgtaacaactgtgccgtcatttatgagaaatggtggtaaaagaaaacactcctaaaggagaataaccatagtgataatggttctgaaagtcacatcctatgaggaataaagaaagtagaaatttaaacatggagaagaagtaaaaatggagatgggataattgttaaattattgaagagaactagagagaaagtaattattctagaaagtaggaccaggaccaattagaaatagtttagatgaagatttctgtttaacttaaagtacttcctaatagctacattgagccacaatgcaagggaaaacctcaaagttatttctacaatgttcaaagtgtttaagctgatgatggatatcttttgaccagaaataatctagaaaggatttctaccgtgagtggaaagttggtctagaaagcacgtagagctctctttattacaattcttagtttatacgtatacatacatcttaacaaactatcaagatgtgtcagaaaaggaaaatgccaatcttataaaaaggcggatgaaaaaaatgtgtgacttttgaatgtggtattgaattaagataaaggacttgctttttttttgatagttacaagataattagactctgaaatgttgatcagttatttcctttataattgaagtcaacttgtttggttacttaaacttctttttaatagtgacctaggagtaaggacagagatcagtatcatctgatagagagcacactgaagcaagcaagtgaggagaaaaggttttaggtccagatagaccagtgatgattatcttcaacatgtctgatttttcagttgcgtttttgcttttaataaaaacaagttttacttgtgtattctaaataatatataaaaccatattgaatctagaggaattaaggtacataaaatacttgtttttttttttaatagagcgttttattttatttatttatttatttatttatttttgagatggagtctcgctctgtcgcccaggctggagtgcagtggctcgatctctgctcactgcagtctccacctcctgggctcaagcgattctcctgcctcagcctcccgagtagctgggattacagtcacacgccaccatgcctggctaatttttgtatttttttttttagtagagatgaggtttcaccacgttggccaggctggtcttgaactcctgacctcaagtgaaccacccacgtcagcttcccaaagtgctgagattacagtcgtgagtcaccgcacccggccaagcattttaaattttatatatctgtgggtaacttttcttattttaatttgtttagtgctgaacaaatggcagatgaacccatatgacagaggatctgcttttggtaagtggatagactttccatcagctcatttgtaattcagaaactttaaaaaataatacatgagaacaccaagtaaataagattaagatttaatttaccagatattagaatttagtcactatcattaaacagtatagaactgacataggaatagacagtggaacataatggaaataaatctcagcacatatgagaagttatatgcaggaaaaataattatatttcatttcagtgagacaaaaggatggtttattaagtaaagggtgctgacacgatccatctggagcmatataaaattgacttctatctcatatcataattagaaataaattccatrtgtatttaggacttaaatatatatgtatgaatttgaatacagaaaactacatgtataatttagcagtggcaaaactttcctaacccaaatagaaaatgcagaaattataaaagaaagtatttataggtggagttggacagtcctccttcttggggttaacagaccttacagtggcttttatccaattcaccaggctggctgttcacttgggaataacctccatcatgcatagagccatctgtgattgttccatagtgagcagcgagacctgcatcaactcaaatatgcccttctattctgctgcatttaaaactaaggatactttcctaaagcagttactctcagaatgcattttagtaaagactcctcaggaagcttatgatactgatctacaaaatgtaacagttccttcacactataccctccagtttcagagtgttttggttttgctcttccccacatttactgccttcttggagaccacaggtcttagaagtactttttgttggccctgcataatttttcccttgggggtcagctttgaagctggtgaccaaagctcagatggactgaaatctgaatgtagtctcacatcaagggctgacccagcactcttttacttcattttagctattacagataatagtaaccaaagractgtatactttttttcttatttgcattttcttttttttttttttttttttttttttgagacagagtctcgctctgttgcccaggctggagtgcagtggcgcgatctcagctcactgcaagctccacctcacgggttcttatttgtgttttcttatgcatccagtgaaccagctccccaggagttggatccaactctaaattccactgataatttttatcattagtaactgtgtgtagcacagctgtggctctgtaccataggtgatcttgtggccaccaagaaacctaaagttcctcatcccctacccttttatcctttttctttccaaaccacagttctgtgagccaaggcagttctagcaaaccctgattctgacaccaattctgagaatatagagaaataaataaactccattttccctgtatactctctcagcatgcttctgacagcagatgtgtggggttttttcccacaagtcaagcaagcagtcagttctcagcatttacgagttgagaactgatggagtaagtaacagacacatgtttgtttattcttggtttcccatactttcccattatggtttcttccagctgagaactgtaattcaattcaattctgacaccgtcttcatgaagatagcatcatatcccacaggttgagggttcaatcacacaagactgtcccccacatctgatgcccaggttgtggcttatgcttctaacctattggctataaatcagggttcctacaattccttcctcaggttcaattaatttgctagagtggctcacagaactcggggaaatatgtttactggtttatttttaaagctattataaagaatactgatgaagagatgcataagctgaagtacaggaaggggcttggagcttctcccctccctgggcatgacacccttcaggaaccgtcatgtgttcagctatcctggaagctcctagataactttttaaaagttcagttctacataattcagtacccatatgggtaagaattcatactttgaataattaaatttctgaaaagtgtaggaagatgtgtgttgaggtgcttaacagtttgttctactttcaagtacagaatacgagttggaaagatgaaccaggacagaaattatagtttttttccagtacagacaaaaagctgaatctttacttaaaaccatttagtatgtggacatcactgagactgatcatgatgtatagtatagaatatacctcatcttttagagcccttataatattagcaagtaacaaatacatgcttatttattcatgctttctcctagtttcccatatggtttcttccatggattgaggaacaagctagagacagttctgttatcttttagttatatagtcactcaagctctaatttaagtataaaatcaggacgaatattgatgagcgagttgtgcatcatccttgagtacgtttctttaaagggctccagagaakagttatctaaacacatttgtattgatggtgcaactactattagtgcaagtcaggttaagagctgtgttgaatcctttctagacttgttgctgtaaaatcttaccttagttaacagatggcagcatagaaaatagcccccaacatagccaaggacacccagggaatgaaatggttaattacacttgggaaatactactatcactcaggaatcagtaagtctcagtctctggaacattgcaacaaatgaaggaattatcttgttagtgagactgaatgattttttttggtggtagggggtgggaatgtatgatttataaaacctgtactgacgtgtttttctgtgttttcttctcaaatccagcaattgggtcagatggtctttgttgtcaaagcagagaagtaaaggaatggcatgggtgtagagctactaaaggattaatgaaaggtatttgaacagcatctgcacttgtataaacttttgaggcaaggtattaatacgtgagggtttttttgttgttgtttgtttgtttttgagatggagtctcgcacgtcgcccgggctggagggcccgggctggagggcagtggtgccatctcggctcactgcaacctccacctcccgggttcaagcaattctcctaccgcagcttcccgagtagctgggattacaggcgcccaccaccatgcctggctaatttttgtacttttagtagagatgggtttcaccatgttggccaggctggttttgaactcctaacctcaggtgatctgcttgccttagcctcctaaagtgctgcctgcaggcgtgagccactatgcctggcccatgagtttttaaaaatagctttaagtcgaggatctgggaaggtgtttgatggtacaaatatacctataattcttcatttggtacatacctgtgtaattcagaaacaatgggaagatgacttcatggtaaatgaatcgtgtgtgtgatttatataaatctcaatgtattttacccttgtagggaaacactactatgaagtatcctgtcaygaccaagggttatgcagggtcgggtggtctaccatgcaggcctctttggacctaggtaagtgtttctaaaataactgaattgattgatttacatttgggggataacattttattatttggggaagcaaaataataaatttaaccataaaaaggttttattttaaagacatggaaacaatatttatctgtaccccaccctgttccaaaaaggatttgaaggaacttacaaaaagtacagatattatagcagtatgaaatgagggataagaatatgaatggagtcagggtaaagttagtgtgtgtgaatctgtaccacacagtaccatatagatgcttcatgttattgtaaacttgcatctgaatttcttagtggmcaaagcagagagggatgcagtatcactggtgtccctagtctcacacacgctctgtggcctaagcactgtttagttttttgcaggattcagaaacttarggaatagttttcctgtgggtttatgaaatggacatactatgtgaataaaattacttcttttanaggtcttttaattttatattttctcttaccagaaaagtaaaatattttttaaatctaggtactgacaagtttggatttggctttggtggaacaggaaagaaatcccataacaaacaatttgataattatggagaggtaagcgattatgttatgacttcaacatagcataagtaagttttcttgcatacttaatcactcatgacagaatgagggtatacaaatgattctcaaaatgagcagattntctgtatattttccacagaaagtttggatttggactttagtgaagaaatattgtcaagctrgataaatatgtagtagttataatttttcttttatgccatttgtcatcccctccaaaatacattacgttgtcttctcttttcacctcattttgattttggctttgatacatgttattctcatttcttattattgatcatgatgagtctaaatatagttcgtctggtgagctgaaatctacagtagtgtgaatgagcctaaatatgttgattctaacaagcctgtcaaatgcttgtactattgtrtatgtcatatgctctaataggcatttttgatttaaataattattttgaaacacatacttttgatgcagctatattttaactttatktaagaatttactttctattaatagcatttgactttctggtgttctaggaattcactatgcatgataccattggatgttacctggatatagataagggacatgtcaagttctccaaaaatggtaagctctatatggatcttagtagtgaaaagatacatgatattcaataattgtggtttttaaaaatccccccaccctgtttttcaaatccccgtccctccctccctgcctttacttgaactaatatttattgagcattgactatgtgtaaggtaccctggtaagtactggaggcacagaagaaaatggaatagacatttggggcttacacactagtggtgaaagacagacatataataccatgttaggtggtagtaagtgctgtgaaggagggtataaagcaggggaaggaagtggagagtcatagcggtttgggggtttgtgcttttgtgtagggcagtcaaaaggcttgataagggacatttaggtagagatccaaatgagttgggtggtaggccatgcagatttctgcaaagggaatagtaaatgtggatgccctgagatggaagcgtgcttgaggtgtctgagtcacagcgaggaagccactagatctggagtgctctggggataaaggacggtggtagaatgttagatsagtgaggtggtgaggccaggccatggagagccatatgggccatgatctaaactttggtttttattttgagtgaaatggaaagccatgagggttttgagcagaggggtggcatcatctgtctttagtttaacagtaccattctggctgctttgttgaagacacattggagggtggggtgagattgcctagggattgagggtagttaaagagaagaagagatctgaggcctgggttcctgtggttaggggtcagcaaattgaggagaatccagcagaggggaatgaggaggaaggccaggaggagaaccaagaaagcatgggtcctacagtcctggtgaaggaagtgtttgaaggatcagggagcaatcactgttcagtgctgcggatgggtctagtctagcaagatgaagaatgtgcattaactgctgcatttgacaagtggaaagcattagagagctgttttggtggagcaaaggggtgagggtggggagcctcctaataaggagccagttcaatagagaatgagatgaaagaaagtggatacagtgtaaatggaaatcggagtttcactacaaaagggaggagaaaaatggaaggtaaatggagggagaggtgagttcaagggaggttttcttgtgtgttttactgtgagagtatgtttatatgctttgaaatgtctaatggaaatgaacttgtagacagggagtaatgaaaaatgtagaggggtagaagtgacagtttcaggagtaaagtaaaaaaatgaagaagctggccttaggcagcacagtttatccatagtgacaggagagaggcatgaatgcaggtaagctggtagatttgacwttgtcagcatgaggaaggtcttttctgattgttttaatctctctctctctcttgttttttaaggaaaagatcttggtctggcatttgaaataccaccacatatgaaaaaccaagccctctttcctgcctgtgttttgaaggtaattaggaatctagttagaaaaaatttgctgtggttgtaagctgcttactcttcattattttgtataygatggttttcaattagggtaggaattttaattttctgttttattcaatgctagaatgctgaactgaartttaacttcggtgaagaggaatttaagtttccaccaaaagatggctttgttgctctttccaaggcaccggatggttacattgtcaaatcacagcactcaggtattatacctgcaagggtaaggatttctagaatagtgagaataattgatgagaactccagtaagtaaggcgtctcatagtgagttacatatactttccttgctggtttagtcacacatctttttttaacacagcagtaaaattcatttttaaaacctaattcataaactcttaagtatttggtttcagtgtaggcattttgggatckcaatcataacggtaatgatatctaatatttatagaatgtgtgcttattcagtgccagggcaccacattaagtgctttacatggtttagtcttcacaacaaccctataaggtagtagttttcccattttacagacaacctaacgaatagggactttaagtgatttgcccaaggtcacagagcaaataagtggtagaactgaattcaaatctaagcagtctgacttccaagtttatactcttatccattgtatatctaatatttaaagtatatttcataacttgtttgtcacaaaacaagtgagtcatttttgtagacatatcaatcaattagaattattccaagtagatttttattgttgttttaagagaggggatctcactgtgtcacccaggctgctggagtgcagtggcgccatcatagctcactgcagccttgaatacctggactcaagtgatcgtcccaccttgggccgcccaaagtgctaggattgcaggtgtcagtcaccccaccagcccaaatagttttaatttaaagtagcctttgttttagaaatctaaggtttattctgtttgactgtcttctctactttttgacaattattatgtaaaatgttgatattagaatatttgtcctaatgttttataagtaacagtattataaagtgtgctttgaatgtgttctcatcttttttattccctaaggtaatgcacaggtgacacaaacaaagtttctccccaatgctccgaaagctctcattgttgaaccttcccgggagttagctgaacaaactttgaayaacatcaagcagtttaagaaatacattgataatcctaaattaaggtaaatcttccttttgtgctgaaatgcttattgtcttttggtttgaagttttttggaagaagaataaggtagagaaaaatgaagtagaaattcagtgtgtatacataatacacgtgtgtgagtatgtaaatatactttaataatttccatatacaactcctgtttgtttgctaaatggtaagtatgatttttttaaaattgagattttttttttcctgtgtctcttacatgaaaagtcatggttagtcaaacagcattggagtaaaaatctaatttttggttttttttctgagaccgggatctcaatctgtcgcccaggctggagtgtagtgatatgattgtagctcactgcaaccttgacctcctggactcaagcagtcctcccacttgagtagttgggactgcaggcacatgccaccttagtagagatagggtttcactatgttgcttaggctagtctcaaactcctgggtgcaaatgatcctcctgcttcagcctcccagagtgctggaattacaggcatgagccactgtgcctggccctaacaattttttgaagagagcatttcattcactgttaaatttatttcttccctaaatctctatagaaaatgtgccactctatttctagcatgttagtaaacttggcgaggtttattctagactgcatcacggtggtggctttcttccatttggacattcagattggtcactgtctagttataagactctttccaccattggaaggataccataaattaaagtgaccttgctcagtagcaatccctttgactttgaagaaggctataccatataagtaatacactctgttagtcaatttgacacttgatttttgttaattttgtctttaattactttttaaacttgaaacattcacacaccataaaactcattatttgaaagtgcacaattcagccaggtgtggtgactcacgcctgtattcccagtactttggggggccgaggtgggcggtcacctgaggtcaggagttcaagaccagcccagccaacacggtgaaaccccatctctactaaaatacaaaaattagctgggcttcgtggcagagacctgtaatcccagctactcgggaggccaaggcatgagaattgcttgaacccaggaggtggaggttgcaytgaggccaagattgcgccattgcaytccagcctgggcaacagagtaagactccgtctcaaaaaaaaaaaaaaaagcaagtgtttcttggttcattggtttttagtatattcacaaggtgtgtaactgtcaccactatcaaatttcagaagctttgaatattttgacatcacaaaagcctgtgtttttttttaggttttttttttttttttttttttatgaagtctcgctatgttgcccaggctgaagtaagtggctgttcacaggttcagtcttcctacactgtagccttgaactcctagactcaaggaattctctctcttgcctcagcctcccgagtagctgagaatacaggcacatgccactgtttcaggcaggcctgtctttttaatattgatcttatttacaggttgaacaaacttatttagggataaattatgtaaaataattactaattttgttttgaagattgatgcatgttccttattcagcaaatgttcatctaccttccatatgtgaagttttaggctgggagccagggcttcaacaatgaaaattaatcttcctttcacagaattaagtgtgaaagtgtggggatagtgtggaggggagagaaacaaaacaaatacaataaatgccttgagcataccatgtaaccagggcatctgcttagtgtaagaaactcagggacgtctttataaaaggatttgggaagaatgtaaaatgctagtgkgaattgatttttgtgctgtgattatgtataaaaatgaacatgattatagacaaaagttagaggggaagatgaataataaaatcaatttattggttaagatggtaaagtcatgggccacttgtttggtattcggtacaaatggacattttctttcttaaaacccagctgaagtcatgatctttgaatgaagctaagctggctgtcccagcccagccatctgcccctcctctgatacactgactgtacatgcctttccctgatccttacatactgtcatgtgttacttttccttactttttaattttcttaatttttatttcctttttagagctatacttgctttaagtttcttgctttgaatatgcaaagcttttatctaactcagttttacattccttagtgcaggggtggttcttttatattcttcaaccctacagtgctttgcgtataagcatcaattatcatgtgtatgtgtgtttaccttctgccaagtttatagggataaatatatctgattataaatgtggataaaagtaaaagtattgttggaaaaaaaaatgatagtttaggacaatagtccaaacctaggaacttgaggacctcatttaaaaatataaaatgtattggttccctcccctggatatactgaatcagaatttccagagaataggaattagaatctttttttatttgtttgttttttaagaaaagcagctcctccaggtgattctttttggttttggttttatttttgagatgaggtctcactctgtcacctaggctggagtacagtggtgcctcatagctcactgcagtctcaaactctagggctcaagcaatcctcccacctaagcctccagagtagctgggactgcaagcaagtgccacagtgcttggctaattttattttttgtggagacatggtcttgctatgttgtgcaggctggtctcgaactcctggcctcaagcaatccttgtgtctccgcctccgaaagtgctggattataggtgtgagctactgcatctggcctttactctcctgatactgtcctttggaagtcttaattttgatgaaatccaatttatctgtttttctcttttgtcatggtgttttgatgytgtagttaagatagactatgcctaacccaaggtcatgaaaattttatttgtgttgtcttctgagttttatgtttaggttctacatttaggtctgtgatacatttagagttaatttctgtgtatggcatgagaaagggttttaacttcagtcttttgcatgtgcatatccatgtgtcccagtgccagttggccagtcattgaaatgagaaacattcaaacacaaaagggtactgtgaaaagtgagtcttctttcactcctttccccaatttctagttatcctttctggaggcaacgttttaaattgatttttgtatattccttcagggcattttatatacatacaagtatatatgtctgaaaacatagattgaaaccaggttttaaagaaccttgaattatcctaatgtagaagaatatgtagatgagaataattttttccatgttacaagctcacgcattctctttcgtgactttaccgcacttcagcaatagatacagctacggggatttaactgctttgtttcccaccttccccagacttgtttttttttttattttttattttttaatttatttattttttattgatcattcttgggtgtttctcacagagggggatttggcagggtcacaggacaatagtggagggaaggtcagcagataaacaagtgaacaaaggtctctggttttcctaggcagaggaccctgcggccttccgcagtgtttgtgtccctgggtacttgagattagggagtggtgatgactcttaacgagcatgctgccttcaagcatctgtttaacaaagcacatcttgcaccgcccttaatccatttaaccctgagtggacacagcacatgtttcagagagcacagggttgggggtaaggtcacagatcaacaggatcccaaggcagaagaatttttcttagtacagaacaaaatgaaaagtctcccatgtctacctcctactacacaaacacggcaaccatccgatttcccactcttttccccacctctccccactttctactccacaaaaccgccattgtcatcatggcccgttctcaatgagctgccgggcacacctcccagacggrgtggtggccgggcagaggggctcctcacctcccagtagggacggccgggcagaggctccccccacctcccggacggggcggctggccgggcagggggctgacccccccacctccctcccggacggggcggctggccgggcggggggctgaccccccgacctccctcccrgacggggcggctggccgggcagaggggctcctcacttcccagtaggggtggccgggcagaggcaccccccacctcccggacggggcggctggccgggcggggggctgacccccccacctccctcccggacggggcgactggccgggcggggggctgacccccccacctccctcccggacggggtggctggccgggcggggggctgacccccccacctccctcccggacggggcggctggccgggcagaggggctcctcacttcccagtaggggcggctgggcagaggcgcccctcacctcccggacggggcggctggccgggcggggagctgacccccccaccttcctcccggacgaggcggctggccgggcggggggctgaccccaccacctccctcccggacagggcggctggccgggcagaggggctcctcacttcccagtaggggcggctgggtagaggctcccctctcctcccggagggggcggctggctggcggggcctgacccccccacctccctcccggacggggcggctggccgggcggggggctgaccccccccacctccctcctggacggggcggctggcctggcggtgggtgacccccacctccttcctggacggggtggctgccgggcggtgacgctcctcacttctcagacggggcggccgggcagagacgctcctcacctcccagacggggtcgcggccgggtagaggcgctcctcacatcccagacggggcggcggggcagaggcgccccccacatctcagacgatgggcagctgggcagagacgctcctcacttcctagatgggatggcggccgggaagaggcgctcctcacttcctagatgggatggtggccgggaagaggtgctcctcacttcctagatgggatggcggccgggcagagacgctcctcactttccagactgggcagccaggcagaggggctcctcacgtcccagatgatgggcggccaggcagagacgctcctcacttcccagacggggtggcggccgggcagaggctgcaatctcggcactttgggaggccaaggcaggcggctgggaggtggaggttgtagcgagccgagatcacgccactgcactccagcctgggcaacattgagcactgagtgagggagactccgtctgcaatcccggcacctcgggaggccgaggctggcggatcactcgcggttaggagctggagaccagcccggccaacacagcgaaaccccgtctccaccaaaaaaatacgaaaaccagtcaggcgtggtggcgcgtgcctgcaatcgcaggcactcggcaagctgaggcaggagaatcaggctgggaggttgcagtgagccgagatggcagcagtacagtccagcttcggctcggtatcagagggagaccgtggaaagagagggagagggagaccgtggggagagggagagggggagggggagggagagggcagcgtgtaacctttgtaacttcccccagacttgttttattgtaggcttttttcctcaattactttctcaaccttaatttccacctaaaataaatggatgsagatcaaacaatgtaaagcagactttaatttttttttttttatattatcatcttgatatttatttcagggagcttctgataattggaggtgttgcagcccgggatcagctctctgttttggaaaatggagtaagttgtagttttaatttttaaaacataatgtcatgsgctgtcgttttagcaatacagctctgttttgtttsaagaaaatttaagtgaggctgaaattagagcaaggtcagaggagtatgtttgttcaaagacatcttgcaagtgcgccttttcttctcctggaagtatacaaagtctctcccagacctctcargcaaaattccagcatacatgattttttgttgtttaccctctgaacatttgagaatttccttctggccttcatgggtaaagagtcattctttttggggagataagtgaaaaagaagaaactggagttaagaacaaaagtagaggtaaaatagattgcagagaaggatagaagttcctgcagtgactcttgggaaggatgaataatgataagacagtgggtaatagttccagtgaggagagacatgagttcaattatgtgtaaggggaagtcgcaaaggctgtgctcagccatgccattacgaaggacaaagctaagaggatctgatctccactgttggagaagaagtttaggaattttttttttttttttttttgagaaggagtttcactcttgtcgcccaggctggagtgccatgacatgttctcggctcattgcaacctctgcctcttgggttcaagcagttctcctgcctcagcctcctcagtagctgggattacaggcacccgccaccatgttggctgatttttttgtattttcaccatgttggccaggctggtcttgaactcctgacctcaggtgatccacccgccctggcctcccaaagtgctgggattacaggagtgaactactgcgcctggccgaagtttaggaaatttttaactgtttatcagttctgtgaaggtaggacttcatgaaatatttttcgtgtgtgaaataacttacagcttataaatttctcttttatttcctttcctaaatatttaatcattaaagctaaaccatccgatattgagtcatgacaagcaattgtgtcctttctccaattccattggtgctcttgtcaaactaaattttgtgccacacagactttacatttgacctggtatgccatattaagagcaaggaatcatattaccatacttgttaatactattctaagatgagtaatattgctttgatatgtttttatttagtgctatggttttaatgtccccaccaaaactcatgttgaaatttaattgcccatataatggtattggaaggcgggggcttttaacagatgattagatcgcgagggctttgtcctcatgaatgggttaatgcctttgctgtaggagcgggttagttattgcaggagtttcggcccgttttcctctctttgttgctcctttctgccatgagatgaccctcactagttgctgctggcactatgctcttgaacttccccaaacctccagaaatgtgacaaatattcttttctttataaattatctactttgtgatattctgttaaaacagcagaaaatgagctgaaacatttagtgtgttttattttattttagtggttgtaagagagatttaataagtttattcccaatcttgcttcctcaaacccatttttcccataagataatatgtttctcaattcctattttcctaaagcttatagagcttttagggaattaaatctgctttcatcaggatgtctcaaaatttggtactaacttgaagcaattggaaaggtagtgttataccagagcattctttgcagaattcaattctactctacttcttaggggatctaatatgatctttatctgttcttctctctgtcttacattctctgcttctgttatcttccaccacactctggttcagccttagccctgtgttgggtcttatgctggggcagaagtcagcttggcaatgagagtagaagaattttagttttctaatcttttagtcttacggtattatgcaacatgtgccactgaggtcatataaataaagatgtctcacaggcttttctgatctaactgacttaaaaaaacaaaacaaaaccctgagaggccttgtgtctgtcttcatgcccactttacctgctgaaattcggaaggaggaaactcacgtggttagaatactgtactaaactgatgtcatagaaccagatggtattttgttcactgctgtgtacagcacctgtctcagtgtttggcacatagtagattcttaatacattggacagattttatcttcacattttcagacaatattttctaggttgaacttgctgtaattatcagtgcagatgaaacaatagcttcagaaatgtctgctttatttttcatgggataataagtgcctcatattggatcaagttaaaagttctgtttattcgaggggtgagatattgaagtaatggaactagaggaataactttgctaatagaaaactatatttttagtacagggtggagaaaacaggtaaaaaagaatggaagtgttgttttttaatgcctgccaattaaggagtagaggttttgaattgtctgatttactgaatgatcttatgtaataccttatttgtgctcacataaatacatcatatacacactttatatatttttatttatttatttatttatttttggagatggagtctcgttctgttgcccaggctggagtgcagtggtgtgatctcagctcactgcaacgtctgcctcccaggttcaagcagttctcctccctcagcctcctgagtagctgggactagatgtgcacgccgccatgcccggctaattttgtgtgtgtgtgtgtgtgtgtgtgtattttagtagagacggggtttcaccattttgcccaggctggtcttgaactcctgagctcaggcaatctgcctgcctcggcctcccaaagtgctaggattacaggcgtgagccaccgygccggcccatatacacactttaaaaatacctcatctttattgactgctttctagaaatgggtcaggcactgtactaaaaacataacatgttcttactcagtacttacaataatcctctgagatggtactcttccccatttttacagattaagaagagggcttatatcaaatattaagtaacttacctaagatcatacaactcataggtagaactttactctgaaacctgtgtgtctaatcaccatacctatggacttgactacaagatatgtgtgggagaatgcaaaatgttaactgtttgtactggcaccgaggctcactgttctcttctatgtatgtttgaaaagttttatttagtattctaaacttccgttttctcattgaatagggatgattatagtagtatttaccttagtggtaacatgaaataaaacatgtacttgtaaaacattttgcagagtgcctgttcattataagtacttgacaaatagtaactattactgttttcctggacagtctgatcaccattactattaactataaccaaatttattgagcacctgggacactctgcgtctagtgctttaygcatcttatctcttaattatcacaaccatcttgaaaaagagaaggtattcccccaattcaaaaatgggaaaattggtactagaggagattaaataaattaaggtcacagagcagagtagtggtggaactgggacttgaactctaggttccgttgagttccagtgaattcatcagatttttgcttggaaaatataaattttatgcattagaatgtatatcagttaaggatgtcaaaatcaattttggtcaaaatcttcacattaatttcaaaccaagtatcagttgaacatatggcattatctgtaactccttttttttttttataaatttagagttgactgactacttcaatatgcatgtttttattaaaaagacagttattggttgctattttaacgtaattatactgtttctttagttttcattaagtggttggtttgctttttttcaggtagatatagttgtaggtactccgggaagactagatgacttggtgtcaactggaaagctgaacttatctcaagttagattcctggtcctggatgaagctgtatgttgaaatataatcatactttttaaaaagtttacttatattttttgagataaaatatataaaatgaagaagaaatataattcagtcatgatcctactacctagagataatcattgttatcagtttggtatattttcatatactttttatttatatattattttatgtagttgaaatcaagatatgaggaatctgggaaaaattttaaaaatgtaatgtcataagtatttcctgtaattgtacataatttataaatgctgtctagtggtctattatatggctacttcatggtatatttaattactcttatttctaggtatgtaggcagatttgatttttgctccaaataaccagctttgtttgtacatacattttctacatactataaatttgttccttgtgtcagagatacaaaatgtagaccatctggaaggacataaatgtgtttgagtctcttagacatacttccaaatcattttcaggttgggttacctagttcctcagcactsagggtttttaattttttatatgaaaagtctgttgaaggatatatgttagaagctgttgactgaaattttcattctagattattagattatggttttggattgcttattgtcactttttcatattttantcacaagraacttaaaattgaatttataaattatctttatccaacaaaataattttgaaaatataggactatgtatatgcatgaattagtttccttatattttgtttgatttagaaaaaagatttttgatactgattaaaacttacgtttttttccatactgattaaaaacttaatttaytctttgyttctcatgcaggatgggcttctttctcaaggttattctgattttataaataggatgcacaatcagattcctcaggttacctctgatggaaaaagacttcaggtataaaatttatcaatgcatcttaaaatgcatgtaaacaattgttatgtmtaatgttacgggatcccagggggtgttgcttttctggctggaaacctctgcggctagtgatgcccttgcccgggttttgctcagttccacccacttggcctggcaggctgtgctcagctctcactaccagcctggaccccatgcctcccaagggtgagccaggcgcggagtggtgaggcgtgtatgagcgaacgtggggtctggccatggcacacagccaggcacattggctgcggcagggcgggtagctccaggcactggcatgggcaccggctctctgtgaggctggtggccaggccccgaggcttcaggtcttccccagttgaaggtggggcttcaccggggactagcccccttccgcccaggagcctgtctgcctcctgctgctgttcatggtgcccagactgttcatgccaagggacacgtgcaggccagcactgggccgtcctcagcctgccttggccctccttccgtgttcgctggcgcccaaaggctggaaggggccaaagtggcagtgggttggtgtatcaatgctacctcaagtgtgcacacccagctggcccaagcttgagacagtgcccaacctcggccttaactttgttctgtgatcagagtgggtgttgacagcagggagaggccaggcagtggaagcagacatctccgaacctgtgggggcaagggagggccttttagggccccccgagtgcagagatgtctgggtccgcagccataacttgggcagctgcagccatgcctgggatggtggagctcctgcctgccctggctcccaccaccaccctgggcccagctccatctcagggctcctctctctctgcccctctgtgcccaacctcactgctccccctctggcaggcgactcggcccagccccattgaggtggctcccagggcagtgggctccagggtcctcccaggggtggactctagagactgtccgcctcctctctgtgccctccccgcagcagtggcgggcaagagcggcaacacggggccagggtccagagtggtggagactctgggcctgggagcgggtcctgcccagcttcgcgaaggttggggtggcccagtcagctgccttggggatgcggggcacagggaacccaccaccaccactgcagctcctgcagcctctcttgctgccgctgctcatgtctccccrctgcagccagcttgatggcagcagctgctcctgacggcctgttgctgccatcattaatgcttatgagcagggtcaaagggtttttgtttggtcccctctcattaaatttattactatgtaaaatgtttgctttacgttactggacgaaatagtatactcaaaggtaacagtcttaaaagctgcttttagaaatagaaggaaatttgaggaaattacttgggtgttgcagaaaactacaagtaaaaattcttagttactttgtcctgtagaccrtttagggtgtgtattccagattattagtactgttgcctgttcgaaggaaaaataacttcagctattgaaaaattgttgtcttctctgtagttatatccttctttcttaggaagcatttaagaaggacaagcttttgagagaaggggacagacagtaatacaggatttttggcttacaaaaatgactcattttacttagtttttgtagggacgtgaggaagagatggcatgatttctatgtgacagtgagggaactgaacctcagagaggttaacctgcccaaagtcataactctagttgtcgctacatagagtaaggtgttgaacttatctttggagtctaggctagcacacttwgtgtttcatatcagtgtttgtgtgatttattaattattattataaaagttcatctcaatttggggtttcctcttcttaggtgattgtttgctctgccactttgcattctttcgatgtaaagaaactgtccgagaagataatgcattttcctacatgggttgacttaaaaggagaagactctgttccagatactgtacaccatgttgttgtcccagtaaatcccaaaactgacagactctgggaaaggcttggaaagagccacattagagtaagtggtttataatattaacatttatgtagaataaagcaatttataaactaggtcagccttgggctcttagtgatgcttaaggcaatcagttattgtatcaaagaaaagtccaatacatcgtaaacccttagacctttaaaaagcactgaataagtgatggactccatcttttgtttttctgtcttcgtaatattacttttgtgatcagcttccttgatacagtctttataagtaaataacatatatttatctaatttcagatacaatgatttccatttttagtagtattttagtaggagccctcatctgtgtcctcttgatgtactttgttctaaaaatcaatttcatgtggtcatcttgtcactttcttcactgtgattagatttgcctttatatagtaaggttatatttattataaatatacaatattttagaaaccacattttcattattattattacctttaaaagtggtcttagacctatagttaaygaaaggtttttctgaatctgaagaatgattttgcctacagattatattatgaagacatatatctgaaatacagtctaaagacaaatataaatctcccttttaaaacatgacatatattctgaatcattatttaaccactcctctatcctgtttttattccttgcttttgatagactgatgatgtacatgcaaaagataacacaagacctggtgctaatagtccaggtgagttaaaagagtcaaatgtgttgaaagattttgaaaatgaaatttataccttacctattctcatgaaggatgtgaggtgacctgcaaaattaaaacaggaaatttggaaataaaggcaacaaaaataataaaaaagaaatggggaaaagctgatactagtcaacttagaggaatatgaatcattgaatttatttttaattttttgagacagagtcatgttcttgtcacccaagctggagtgcaatggcacagtctcagctcaaggcaacctcggccacccgggttcaagcagttctcttcttgcctcagcctcccaagtagctgggatcgcccgccaccatgcctggctaatttttttatatttttagtagagatggggtttcaccatgttggccaggctggtcttaaactcctgacctcaggtgatcctcccacctcgacctcccaaagttctgggattacaggcatgagccaccatgcctggccttaatcattgaatttagatgttagtctcctggcatctaaatcactttttttttttttgtttttttgagacacggtctcactctgtcacccagactagagtgcactggtgcgattttggctcaccacaacctctgcctcccaggctcaagcagttctcctgcctcagcctcccgggtagctgggattacaggcacgtgccactaccacctggctaatttttgtgttttcagtagagatgaggtttcaccatgtgggccaggctggtcttgaactcctgacctcaaatgatccacccgccttggcttcacaaagtgctgggattayaggcgtgagccactgcacccagccacaaatatttttgattatctaattctcatcataggaaaacagcgaatttttctagagagattattttatattgaccctgaattccataagaaatatcatgtaagtttctcatatcaggaatattgcataagaaagaaaactttctttagctatagctttgcaaaagatactgaaattgttttgaaatagttgttgacttttttgtgtgtggtagaatatacataacataaaacttagcattttaactattagtgtacagttcattggcattaagtacattcatattgttgtacaatcatcaccactgtccatctccagaactttttcatcttcttaaactgaaaatctgtatcattaaatatttatcaatttttaaaaagcctaacattaaattccgcctcaatgaagattcttctttgcagagctgagactctttgtttcaggttaaatagtgttttgaaaatataggaaggtacatcatgatacaaggttggtgcttagaaaacctagaagaatggatcttaaacccattaggctgcatgtctgacatgagatgtttcaggtggatcattcattggtgagggtcggactctgcttgcttcatggttgaatttcaactatatcaaaatggtgaattatctgaaatcttgattaaagatttgaactcagttttatatgtaggtctaaattaacaagacacatacttagttatccttattgttggagaagagcagagacactgtttgaaaatctgtcatcccaaatgcattttataaaattccagtttttattgcttcttatatttttcttgcataagttttgcttagtttagactaacaattagagatgatcagagaraccttagaaatatgttgggtcacagaattaaagtcttacattcagtggttgaggartaacaattatagcacagcttcacactgaaaaatagagagttggaggatggtgactaaaaaattactagagttttgtgttaaggtttttactgcgtagagtgaagtatgaactttctggtatttagattgatttagaaagtacattaattatttttaaaaggagttaaaataattgtataaagcatttattgagcatttagggaagttcatgcaaggcagaatatgatttgttcttcatgagagataacagttttgctgtatgtatttctgttaatttgtacgtgtgtatgtgtgtgttccctcataaggggtacggttatgggtgtttatrtaccccataaagtagcatwaaaaatattaacagaaacaaaaataaatgaatgaatggtttaactcactgttttactctatctttacttcttgtccttatctatatataatacttttattaaaacaagtattcttttttaggaaaattaagcagtcagtctgtgactataattatgtgtattcatgacaagttcagattgaaattctgttggtttttgttgttgttatgatattcaagagatgtggtctgaagctattaaaatcctgaaaggggagtatgctgtccgggcaatcaaggaacataagatggatcaagcaattatcttctgtagaaccaaaattgactgtgataacttggagcagtactttatacaacaaggaggaggtaattttttctcacttgaaataaattgtgtttatatcctcttgtaatagattattaatctcatgttgatgcaatctagaayacatgcacagaatttaaagcagttgatggcatattttaagtatctatgcttattcagtacttttccatatgataagccctaggaaaaacaagagagaattttccacgtaggtacattttcattacagtaaacttgaatcacagcatcctaagagttttatattatatggaagaaggataaagtaatttattagtcttaaaatttaaaatatgatcactgaaataatagaatgtatgtcttttaaaccagtagatggggaaaggggaatgaggaaaaaaaacctaaacaagagcaagaaaggaaggggaataaaatgagaaaaattatggttagaaattatagaataagatcaatgttggaaaaatctgaatgtatgagtaaacactgtaagtatcagtggacacggtcttctgttataaagcatggattgttggactggatgaaatctagcaatacgctgtttacatggagcatacccaaaatctgaggacatagaaagatggaaaaggaatgaaaaaatattatgcatgtgtcagctaaaatattaaccaaaagaaagccagtctagctatattaataagagttgcagtagactttaagacaaatattactagaaataaagagtcactatgtaataaaatatccaagctacaatggaagtataagggttcagattttatgcttcttataacttcgagaatgtaaactgtattagtctgttcttatgctgctatgaagaactgcctgaggctgggtaatttataaaggaaagaggtttaattgactcacagttcttcagagctggggaagcaaacaygtccttctttacrtggcagcaggaaggagaagtgccaagcaaagtaggaaaagccccttataaaaccatcagatctcatgaggactccgtcactatcacgagaacagcatgaggataaccacccacatgattctattatctcctaccaggtccctcccacatgtggggattatgggaactacaattcaagatgagatttggatggagacccagccaaattatatcataaaccaacatggaaaaattctcaatcagttgttatggaaatgcaaaataaaatgacagtataataccgttgtacatgctaaactaaaaatacaacaccraattttggctrtggagcaactgcatacagttgttgagaatagattgttggtgagaatataaaatggtatgagcactttagcaaagggtcttgcagtcttttataaarctaaaaatgctgtcttatggcctagcaattaaactgctagatgtttacccaggataaatgaaaacacatattgacaaaaagatgctagaatggccatagcagctttatttataatattctaaaactgaaaacacactaagtgtccatcagtaggagaatggataaataaagtgtgaaatacagtggaatactactcagcagtgaaaaggaacagacttttccttgctgagtaaacacagcaatgatggatgaatctcagaaaccttatgccaaatgaaagaattcttactcaagaatatacactgtatcaatctatttatatgacatttttaaaaagtcagaactaatctgtgatggaaaaaatgtcagaacagtagtagtccccacaagggtggcagtagggataggctgggaaaggatatgagggtattttttggtgtgataatgatgttctgtatcctaatgggactttctcagcaaatctacttaagatttgtagatttcttgaatacaacttttacctcaaaagaaaaaactaaacaaatattgaattctagttaattatatgcatgccgaactctgtactgatgtctgcaatttacattgaaatgtacaaaaatatgaagatgagttgatggatggatacaggtataggtagatatgtggttaaagcaagtataataaaatgttaattgttgaatctaggtggtggatatacaactgttcatccttaaaattatttcagtgttgctacgtgtttgaaaatataaatattggaaaaatataaaaagtaaaaattggcagatatagaaggtaacatacaaatcccattattgtactgaggaaagactaacacattttgttataactgatgtacgtcaaggaaatagaaaactcaagaaggatatagaatatttgaactaatggtcatataaagaatacattacactgttcattacagtgagtgcttaagtaacacattttttttttcaagtcctggcaaacagacttgcttggttgttatagtgactgttttgtagtacttaattttcttcctgtctatgttttgaatggaggagttgattatgtagtaaggagtactgttgattaagtagtaatatccctttagttactttgatgctccttccctaaatattctggatgtagatgttacttctgcctagaaaacaagtttattacaccattactaacactcaaacacaatatataccagattacaggggtttaaaagaagggatcaaaggatccctctcccctccacacataccctaaccagagagttatagtgtgtatttgatacttccctaaaccacttgaatgcaggatgcaataaaatctcagctgtatacctctagaagttctggttagctgttatttcacctctgcataattaatttytgtgttattcattttgaatagatatctgtcaaaatgtattgtttccttgaattttcaagtatacttactgaacttaatttaccttggagaatagttaagtgccataattgttattttgttacatcccagtggttactctttttgttactgtgtctacttgaagagttttcttttggggggttggctaccactgcacttgcctctaaaataacacctctccatctttacagtttgctgctttgaatcttctgtggccatgaaactagataactatgttgcttaaaataccttgagaagagagcaggcttatgggcatggccttttaggaagcacattaacttgatgatgcttaattttggttcctccaagaatgatctcttttgcctactttttgagtcttagctttatggaggatagtgaggttcctggtgtacacataggcattttagttggtacactgcttgatccactcctcctacagattgggaagggtgacttaaaatgcccttaaaagcaggacaactttaatgctccgtagagttcattttaatggtacttcgtttgtgacataaattgtgttaaccatggtttatagcaagttggggcatagatttttatggaattgtgtggcactattgtagtctgaattttattggcttttttacatagtcttaggcagaagattttccaaggttaaatgcttaatgtgcttttcactaggacctgataaaaaaggacaccagttctcatgtgtttgtcttcatggtgacagaaagcctcatgagagaaagcaaaacttggaaagatttaaggtactgatacatagttgattgtttccttaatacttaagaggggcattatatctagttttaagcagttttaattaatattattaaagcaattattgtcctagaaatttcaaaatgtttctaccctaactaatgtgtcatcatcatgacaggaattagtcattgttgacactcaaatggtaaattatacattctctatcagcataacactactataacaggaattttcaatttcagaaattttagttaaattatttcaggtagatatttttaggagaagtatcattggatagttaagccatgtctatgtgccttaaaaacagtctccagcaatagccataaggaacttaatttgtagattaattaagacaggtatcagaatatggctatgtagaattaaaggtattttgatactgtttggggcagacctttccagttatatgcttgcagcacatgaacgggtcatatagctcttggtgtaagtgggtgggtaagtaaatggcttgagccatttagaactaaagatcggtaacctgtctacctgcaagcagtctcattaatttaataggccccagtgtatagcataagtatcattttctaagaaaaaagatgggaagtattgggttgaagaactttggcttacgtttccatgctgggcataattgatgcagatgtgaaaacacatygcatggcctcgtttgaatgtgtgctacccttctcaaccgtaggcatttttctggaccataagtcagtatacccttcttccctcccccagatctctaattttgctgtgccttgaggcacaaatgacattgaaaggctaatttgtatttcttggtgagcaccaggggcctaccctcattttcctccccttgagaattttgtctgttacaaaaaatgtagcctccaggtaaaatatctagtattctgagtttatttgaatttaagagtaaagataatgcttatgtctgtacattgtattctgttttgtctttctcttcaatttctaaagatatttataaagattaagccaagttttagcaatagtttaatatctttgagtagaaaaagaaaagcaaaaatgaacccaatctctgatttaatcaccttaaatgtcatgtttcagcagatcatgacataaaacttcaagacttggtccagtaaattaggagtatgtcgacctctaatctgatagtaacacttgagtttttagaggtctcatttagtggaaggatagcatttgtttttattgtttagtatatgtgctaacaaactcctttctctcttcactgttctctttagaaaggagatgtaagattcttgatttgcacagatgtagctgctagaggaattgatatccacggtgttccttatggtaaaaagcaactttttatgcctgtagtgtgattgttacggaatctaaagtaaagccttctaatatgtttgaaaaatttagaaactactggcaattgttaataatggtttttatttatagttataaatgtcactctgcccgatgaaaagcaaaactacgtacatcgaattggcagagtaggaagagctgaaaggtacttctgcaatttttttycccccatttttaagcttgtatrctttaggaataaagtctaatagaaggcttttaaccatctttcaggatgggtctggcaatttccctggtggcaacagaaaaagaaaaggtaatctttgtagggctstattatattcattgtgtgtgttgtgattttagatgttggaaataaaagcagtttgattttcccatttaaatttaattcagctgcgtatggaatacaaatgaactttttaatgtcatcttttttcctatattcattgaatggacaaataatagggtgaaatttagaaaggaaaaatgcaaaatataatttttccaactagctttattgtactcatttccaccaaaaaatatttaaacattttctggcatggtgccatggaagacctttcatggtgaggggagatttattttgatataattacaaatttatagaaaagttgtattcataaagagctcccatatactcattgccaaattcagtagttgtacattttgcattatttgctttattattctcttatacaaaagatttgaacttatttttcttttgaacttttttatgttaatattgacatagtatgcttcaatatttactttttcatcctacttttatctgagaattccttttgatatctgacacccattttaggaaaacttttggattattctcaaaaagaactttttcagaagacctatttattcaatgagctactgaatagtagtggtaattggatgatatatcatacytataatctatttttctagtgccttgaggacagaaaacaattaaaaacaaatttagaataagatatttagcatgtctctatctccatgcatgttaatattttttcctttttaaatttaggtttggtaccatgtatgtagcagccgtggaaaagggtgttataacacaagactcaaggaagatggaggctgtaccatatggtacaacgagatgcaggtaagacttcgagttaggctcacaaataatgtattaaaatggtagaatagaaagcatttatcttcaaaaattatatcttggcttttatctgtttgtcacttataagggaaagtcgtagttggttataatgttatctgcactttgctaattgtaagttgtgaatttctctcttcagaaatctgacttccatttataccaagcattctggcctttccagctttatttaatgatgataaaatncaactctttctaaatgaaatttttatttggaaattttctctccattacttagttactatctgagatagaagaacacctgaactgtaccatttctcaggttgagccggatataaaggtaccagtggatgaatttgatgggaaagttacctacggtcagaaaagggctgctggtggtaagctttgaattattttaaatacaattttaaatgtaaatatacctgttttgaacttcggtttgggaaggcagtactttcatttcattaggttaagagtatatttttagcgtgttaatcattccctccttattaccctcatagtactttgtccatacctgccttgtagcatttttaaattgtgtcatctttatgtgaatgaaagacttcagcttmgctctttctcttgaagtgttaatgtcataagagtagttgaacattttgtggaattaktaggaaacaagagcataataggtgattttgaacaaggaatcagaagcctttgacttaactcaggtggtaattcagcatattatttcctctgcctgggatgcccttttgttagcttgttcctgaaaaattgtaagactcaggcctaactagttgtttccgagccaagggtgggtagaggtgttgggacagctgttagtgaggcctaattatttatttatattgaaataattgatttaacattttttaaagtcaaagttctggagataayttgcccagtagtacattttattgctgcaagcaaagtttaaagtgatataattgagccaaagtattgctgacaagttatttcaagcatgtcatttacattactttgttatttgtgtgtgatgcaggtggaagctataaaggccatgtggatattttggcacctactgttcaagagttggctgcccttgaaaaggaggcgcagacatctttcctgcatcttggctaccttcctaaccagctgttcagaaccttctgatttttacatttactgaataagatttgagtaatgaaagtctgtagtcttaaaactctaaaacagttgtactgcttccaagcagcagtatttatagtaacgtaagctattaatgctaactcttgcatgtcaagaaacattagtcttaggaattcttcaaaaaatggcatcccaatgaaaataaatttgatgactatattttcatgaaggtttgtgtcttattttaaagktatattgatatattttttctatttcttttttaagaacagtatgggcttatgaagtagaatttatgggtatgtgaatctggcagaggacttacgtggaaccactcgggaatattctaaaagtaggttttcagatggctaaggttgtctatgtgtatattgaagctagaggagagttggaacatgaagggaaattcgatgatcccaatgtagaagaactgcttggttagtttggaagcatggaagttttgagggagtcagtaaaggttctgtatctaaggactgatgactgatgtgatggtgccagtgaagatgtatcttctttttatgaaccttgctttccagatgatgcatacccatcaaagtagaactaatctgctgtccctacaggtcttaaaatcaaacttaaactcagggttttttttgttggttatttttttgtttgtttgtttgtttgtttktttttgtttttgagacagggtcttgctttgtcacccagcctggagtccagtggcgtgaacacagctcactgcaacctcaacctcctaggctcaagcaatcctctcgcgtcagtcctctcacctcagccccccaggtacctgggactacaggctcacgccaccatgcctggctaatttttttgtatttcttttttagagacagggtttcaccatgttgcccagggtggtctccaactcctgagctcaagtgatctactcaccttggcctctgaaagtgcggggattataggcgtcagccaccatgcctggccctggaatatattttcttaaacactggctcttgcctaaaatatcagaaggaaagggaaaatgtaaatacatataattgaattgttgctttgtgccttttgactcttagtctataaggtagttttttgggggaaattattcttgtccaagagtttccttaagagcacagggtgttataatttcttatatgatggttttcaaaccttttagcaatgaaaaaccttgagtgaaacaatatataaacagataaaagctgtagtgagaaaatcattgtcttgtatatttgagtttagggtttgtgtgaaatgattatgaggataccattctttcacttatctctagaccacttgctttggagatgtcctggaactactataaccaatctcaaagctatgtgatgacagctctgtgcagtcttcacgcacattaatcactcgtttagaaacgaacttttaattgatgtgacagcaaagacaagactgaatttcagacatgtaaatattagaatggaggggatctttctaatcaccttgttcatgcccttgttttatgagagagaaagctgagtttagaggaatgcacattcacatggcctggtggttagaactggaaatagaactcgggtttcttcagtttcagcttttactctttgggctggctacctttggaggatgactctcaggtccaaattgcaaggccagagaggaatcctggatagagctcagcaatggtggagatgtttttttcctctttaattacttactgaccaactggaattacccagggaacaagagttttcaaaggaagaagccacatgtaaccagactagccgaggagttgtttggagacctgacttgctcttttttcctgctcatatcaccattaattctttcctttattctcagtcttgcttccagatgctgattccttcaggccatcgtattaatgccaagaatgcaagtaactgttaaaagtcgggttaagatgtggtcactgggcctgagagatgctaattgcctgcctccttcgggattgcctttcccaggttctggtcaacggggtacgagtcaaagtgatgtgtacaacttccgggccttgtcctgcccaccctgtccctcttctctcaggctagaacttggatgtggtattagtgagcctattgccaccattagaaaagtgtaatacttggggagtggcagaacaaggcagaggaacctggtggccttgggaaagagagctgcccaccctctccgaactgcctgttataataacttgatgttatctgagctgctcatgtttagggctctttgttacagaactttagcctctaccccaactaatatataaaacactagaggcccttcaaagtccagaaaatgctaaatattaaccttcatatgatagtatttgtgattcaaagcttccacttgtccattctttagtgcaggaatttttaaatgtactcacagatctggtgtctgtagttatatgtcagtcttagaacctctgtaaacagaaatgtcaagacttgccccaactttaacacatgatagacatggcctgagatcttaggagcctcggtgcattccttcttactcacaatctagtctttgactgttcattctcgtcaaagctaccttcaagctttgattgctagaacttgactttcatagtgactgaagtggtttaggggaaaggctgtttcatatcttaataaacttaagtgttctgctctaactcaggtttatgtctttactgtattgctaatttgagtcccttactaggacaggctcatttaagtgcaacaagttatatttcatttaagagagcatagaaaaccaaataaagggaccaaatgctattgccttaggatatttgccttaagagaattgattctaaagggttctaactagtggtctttgttatgagattgctaaaacatttctgcacctcctttttttattttattttatttttttggttgttgttttgttttttgagacagggtctcactctgttgcccagactggaatgcagtggcataatctcggctcaccccaattcctgcctcctggcctcaagctgtcctcccacttcagcctcctgagtagctgtgactacaggcatgcaccaccacgtgtggctaatttatacctcattcttagcatatcttttcctgttagttacatggaaatttcagactagagtaatccccactcctccttactttttatttatagtcccacttccagagaaagtcatcgctaacattttggttcatttcttttttctgtaaatgttttggtctatatacgattctgtatttttatttaacataagcatttttcttataaatactatagtggctacataatacattgaatgtactattgtttgtgtaaccattgcactcttactgctcaggtgcattgaggggagttggaaaggatgtgaactttataatattagtcttggatttgaatctggctctaactcacactataaatatgacagaaggcaaggtccgttaagctttgatttctttatgaaaatggtgaaaattcacattattcaggatcatgttaagcattcagcaaaatgtctagtagatgaggaggcatgtgtactgtatttatagtagttacattttttgtgttacacagaatgctgcagtgaacatcttctgtcttttgaattattttaaactagattcctagaaattgagttattgaattaaagagcctgaatgttatgaacatttttcagagtcatcagattgctttctgaaagagttgagctggttgacgttaacactaacaatataggaagaagtctgtacaatttattttacaaactgaagtatagtttgttgcgctcaaagtatgctttcctgatgtctcttcatatggtgtgtgaattagtgctggtgagtagaggtagtctcacatcttacatgcaacttcttgcctcccatgggctcccactcctggtcccaccatcatcagataaacagggacctagacttgttttaaataaggtgcaggctttttttttttttttttgatttcctaatttttgtctttaaaggtagaagtgcatgtggcaatgactgggaactgcccagattaaaaaaaaaaatgttggttcctggccaattccaaatgggtaaagctatttaatcacattcctctccttgttctgacttaaaagggaacgacacactatttcaatttgaatgagatttgtaaaatatcaaaaaagtatagataaatataaaatgaggtccctgataggttctcttgcagtaattttatcatttctctatagatgttgacagtttctaaagtcctaccaggcattttttctaagtgaccttatttgggaggaaaaaggaatatgtgtcagaagggaaaaaatgtagtggaacaggaaggaaagggagggatactattttgctactccaaagtaattgatagaggattcctttggagggaggagtggagagggaatttttgcagttgttttccattctactgctttaaatcattacctttcatttaaactcatttaaatgtctacttttttctgatggattccactctttctggtcaaaagtattgaggggaatttgaaagacaagtcatcaggtaggcctggatttgatcccaacaatagttactgacttctagagctaaatcacatgcagagatcattagatataaggtgggaaccaggaatctgcattttaacaaattcctgaaataattgtgttcatgcagatggaccttgaaccacaattcaagacacactgttacagagaaacaactcttagagcttttattctcactgcaatcttttacttgaggatttggttaagatctaaaatgacgtctgaaagacagatgcttgctgtgttagaatcatgtctcctagttcactgcctttggacccaagatgtccaccttgagttctgtttccttagcttagtggttcttaaccccagctgcacattaaggtcccctaggatactttaaaagaaaataccggtgtctgcacttcacctccagaaattctgatttaattgctctggagtggggcctagatggcctcagtgatgttaatgtgctgccaggcttgggagcagctgccttaaactgagtctgaccctagatgtttcttggtcctattgcaaatccttgtgtcctttgcacccatccaagccaatgtgtcttaaggttacatatagtcagactcaagctggagcccttgttgaaatattatgtagtggggattattgtagagaaacactttgatagaaattgtaacatatgtaatttttcaagaaactgataagattattcaccacccgtagtctactcagaggctactcacctgtagccaagtgagtttaattcccttcaaaatagtcactttggggattgaggcaagtctttttaaggatgcttcaatttttcaaaacccatttggccttttctctgttttagacgttgctactttgtttttatttaaaacattgccattgctttagataggaccagtttatactctaaaaatcactggtttaacccaatactttacctcacatcttgttctccagctgggtaactcattctgttcaccagaaaagactgtgattggttgctagttttgtgtttccttgaattgaatcccaatttaaggataaatatttgctgctgccaaagtaggactttgaagaggcagccagaggatgtttctctgcagggcaataattgggtgtgaagggtttccagttttttgtggtggattagagtctcggggaagacactctgagatagaaaatcctgatcagaacaggagtcgagagagaggagaggccggtagggacagggtcagttgaatattggagcaatgttgtttgataatgagttttgattttccttttctacattgtgattctcttaataccttcagatgtttgctacctaggtcggcaagtaggtctgtcagtatgacttgcgtatgaaagagaaagctcttctgtgtttagacaaagtaatgctaggaacagggtgtgggaactgattaggatcctgttctgtgggaaattggtccctaatggtaagaggggacaagcaacttctctggagtagtagtctaaagctcagaagagtgacaatcaggcttagtggcaatcaggc

SEQ ID NO: 93278 - DNA, 235848 bp, Homo sapiens
  misc_feature (1)...(235848): n = A,T,C or G
tctccctctaaaaattcacatgttgcagtcctaacctccaggacctcagaatgcaactgtatttgaagataggacctctaaagaggtaagcaagttagaatagaatgagctcattagggagggccctactgcaatatgaatgctgtccttacaagaagagaagcccgggacaaagatgcactccaagggaggaccatgtgaggacacagggagaagatggccatctgcaagccaaggagagagacctcaggagaaaccaaccctgctgacacctcaatcttgaacttccagtctccggaattgtgaacaagtaatatagctgagagcagccaccaacttttcattgctcagggaaaaatcttggaaccaaacttacctccttctttctcccaaaccctacctcccacccatcaggaaatactgctggttccaccctcactgctggctcttctcttctgcttgctcccacactggtctcagcaccagcaagcggaagagtttcccaaaaggtcggaaagactgcttctgcccctgccttgtgtaatcaaactcaacacagcagccagcatcagatgtgtttgctcttctgcccaaaaccctccactcagagtagaagctaatcctgaaagcaccctgcaggatcctacattctccaactcactgtgaccttctgacccagctccgacctcttccttcttattctcaattcaccatgcaggctggacaagctctgcctcagagacttcgcctgactgctttagctcctgcatggaaggcccttctcccaggtgcctgcttggctgattctctcacctccctctagtctgggctcagataacccctgctcaccatatccagggtggccactgagtccgcactcactgtcactctccccttccctgctccacctgtccttgtgtgcagtgtacatgtgaccttctaacacactacaggggacccttgaacaacatgggggttagggcactgacccccttcgtggtcaaaaatccacatataacttttgattcccccaagacttacctactaatagcctactgttgactagaagacttactgataacataaacaattaccacatactgtgtatatgtcttaaatactgtgtccatacaatacagtaagccggagaaaagaaattattaagaaaatcatgaggaagagaaaatacatttcctattcattaattggaaatggatgatcataaaggtcttcattctcattgtcttcatgttgagtaggctgaagtaaaggaggaaaagaggagttcttcttgctgtctcaagggtggcagaagatccacatatgagtagacctcatgtggttcaagggccaatttgtatttactctacctactcattgtgttgaatgcttactgccagtccctcccttccccatccaccactgcactacagtaggaaccccaggagggcagggacctaagtctggtttttttttgtttgttttgttttgtttttggagacagagtttcgctcttgttgcccaggctggagtgcagtggtgtgatctcggctcactgcaaccttagcctcccaggttcaaacgattctcctgcctcagcctcctgagtagctgggatcacaggcatgtgccaccatgcccggctaattttgtatttttagtagagacggggtttctccatattggtcaggctggtctcgaactcccaacctcaggtgatccacccacctcggcctcccaaagtgctgggaattacaggcatcagccactgtgcctggcctggttttttttgagacagagtccaccctctcacccaggctgtagtaccaaggcacaatctcagctcactacaacttccacctcccaggttcaagtgattctcatgcctcagcctcctgagtagctgggattacaggggtgtaccacaacacccggctattttttttttttttttgtatttttagtagagatagggtttcagcatgttggccaggctggccttgaactcctgacctcaggtgatccacctgccttggcctcccaaagtgttgggattacaggcgtgagccaccgcacccagtctaagtctgttttgttccctgatgtaacccaagtttctagaacagtgcctggcacaaagcaagcgcctaatagagaatggctgatggaataaatagaacttctcactaaagtccacccatttccttaagtctggggctatgggggcgtctttaaccatgagtctcctttcctgcctaaaccttcccactcaagtccagctgctgctgcttcccagccagctcttgtttgattcctccctgctccctcagagacctgactggagctcagatctgccccaccccatccagctgcagagcatggactcgtccccttaccccaacaggtcctgaaatcacctattaatcttttaaaatgttgcttttatcctaccactcccttgctctaaaaaacccaccacccctctgtcagctgttggatcaagttcaggtatagcagcctgagagccaagctctcagatccagggcctatcctcctccaccacagctgtctgcggtcgagaacgcctcccagaatgctcaccctcatgtctgaaccatacccatcctccaaagcccaactcaaaccctcccctcgacccttccttggaactccagcccacaccgatgggtccattctctgacttctccccacaacaattgagggcagctcctgatttaaaagttggattaatgcagcaggagattaaggacaataaaccttttatcatttggaaatccccaagagattttgatagcaactagacttgctccccgccatatatattacatttaaaattttctgttaacctcttaagtgtccatatccagcatttgccactttatttattgccttactatctatttcacatgtgcgtgctctgtttgtcaaacaagggaataagttccttgagggtaaaggctggtttatacagtgatacgttgattagaaattccttgggaacaaggctcatttattcaaaatcgactatgctcaaaaataaaaacaaaacatcttcataagtcattctaagcagagctgccagcttacagctgcatgtcagaaatatttcaatgcacagtttctgtttgtctctaccgattctgaagttaacgagacccgtcttggggagaatctgcagtctgagaagtttgctcttggcatgcagagcctcctcatttccaacttgagcttccgcagcaccattgtcaggcccctgaaaagcgcacatctccacctccccacctcgccaacctcctgcagagtggatagacctaggagactgccctttatcttcatggatgcattgaaactgactccctctggactgtgtgcactgcactcactcttagaaggtgtgagatttttctgaaggcagagatgttcttcaccttcttcatccgtgcactccagtaatctagaatagagcttggcaaaacgtaaatactcaataaatatttgtggaatcggtgattgttatctcaatgggcatttatactttcaaccttttatctccagttgtttcataaattgttgaggacttgtcaattacctacatgggagaaatgttctccctccccacaccttcttaagcaaaaatgcccctgatgtttcaattaggctggtcaatctgacctgtagctggcctagcctccctcaggaggaggtgattcatggagactttcccattgtctttccagctcactgcctggttcttgaagaggacaagctatggtgggatccctttctcatggcccatcgtcatcatgtctacagactcatccagcccctcttttgagcccccttctctccagggctctcctctatcacttacctctgcaaaggtcaagcattcatccttaacaatgacctaattctgccctcccgtcccctccctaggacttccaaatgcaccattttatgttgctctatttgggatctgatttaaggacttttcttagtaaaaacctctcttttccgacatcctgaagagtcccatatcatttctcttcctggttcagaagtttctaacaaagataatctgcctggtaaagaaacctgcttgctaacggagctataatttggggtgctttaaaaaaacctcctagtgaattatatccaggacaaaaaatcttcatggagctaaatttaatcattagcagctcaaggacaggaacccatagtgtacattttcatttttttttctcactgtttgtagaagtcctaggcccagcacagacctgtaataaacacctgttgaataattgttgaataactgattgattgacagcctgctgagyatgccagatgtttctgtctggctacaatgtctgggtttttcttttcttctataaaaattgttatgattttcaatgcaattattcaccagattttcctcatgtgcctttatttttctttttctcccagcttttcattttgaaaagtttaagttatagatacaagttgaaagaacagaataataaccccattatgctctctacctggatccaacaatgagtgttttcccacatttgtttttatctcttgctatatctatgcctatatttgtataactctctacaatataaatactttcattgctaggtcatttgaaattaagttgtagacatcaagaactttacccataaatactccagcacacagctcctaagaatgaggacatttttctaagtaaccacaatagcaatatcacagctaaaaaattaataataactccaaaatataatctaataccccttcatttattcttaaattagaaaagcttgccttttgatcagacaatgactttgctttccaaagtggaattgtggtcctagttccctacagatccattaggatttataggtatagtcaagatgtacagttcacataagatagttgcattctctggttctgggatgacaaagggatgttcaggcccccagaatgggctgtttctagggtagaccaggtccatcatcaagtgggaccagggagatgttgctttgggactctgagggttgccatgagccctacatacctgttagagtttctaaccccacagctccacaatgtatgcttgctctgtctctttctaaaatccctgtttctactctcctttgtctacttgcattggcaaatggaaacactatacactagtcagctccactcttggcagttctgattcagtaggtctgggatgggaatctcgagaaattttatttttaaaaagctctccaagatctgcaatctggcagggggaggggggaatggaaaatccctcatgagttacgtggtctgcctacacagctctgcacatcttatgtatatgtgtttgtgggtttctgtaaaatgtctccaattatctttggaagtgagtggagtataaactataaataaacgagagactttctcagaacatctatgtgcggtgggaccagtcttggggactctgcagctgaaggtgggggacggtggagagagactgtgaacttgaagggagatgactggctgggtctgtgtttggtgctgccattggctaattacatggatggttttggacaagttgcctgacttttctgagcctcagtttgtcatcctctaagatgagcagagtaatatgcacctcatgagaccttgaggtcgtgcatgtgaaagtgctttgtaaactacctgcaggagtctaagttgagccagagataagttcacccaagagcccggatctgcctgggggcaggggcaggcacacaaggaactggctaccggaggagctgcggggcgtcttgagaagaagcttaccctaaaggaaggtagcaaccacaggcaggaggggtaggaaatgggaaggggcattgctggggttaggtaagtgtcgtccggggctaggaggattccgctggctcctttccccaggacgaagggaggaaagggctctgatacaagagtgtacacgaacgaaaagcactggctggagatcatctatgtggaatgtggacagggcaaggtgcccgtagcccctatggctgacagagtaagtagaacttctcactaaagtacacgtatgtccttaagtctggggctatgggggcgtctttaaccatgagtctcctttcctagcactcctgacactggcctcctccttcctaggcccaactctcaggctcactcaggggcagcctgggctggtgaagcatcagcagaggccgtagtgctatgagtgctggctggcggcacggcgacatattccctgggagcctgagatgagagggttacacagcggggaaggtgggaacaagaagactgcctttcagcagaatgtccccaggatcccctaagcccccgtgatgctgtgctcggtcgctttcctgccccaccctctccagatagctgctgtcctgcctaatgggaagattcctttcccccaccggcaagtgtgccaagtgcctcctagtgactcagtctccctgactctgctactcgctgagctgccttgggcaaggcacttaacagcaccctgctataaaactgaaatagtgagagcatttacttgataggactgttgcgaagatttaataaaataatacacaaacagtgcctggcatatggtaagcacatcattaatgtttatatgttcagggcaatcgattcctttaacctaaatcacatttgataaactatttctcagtcacaattcaagccaagcaatttctgggaagacmgcagcaggtggttaacactgtccccggggtgtggggattttgagcttagtgtcactaagagctgctcactgaggatagaactgtagtacttcaaagtgtcccctctcattaaagacagcccattgtgggtcctgggagtatgacagggcctgggcaagctcttccatatcttctttttataataacctccatagaaatgtgctttcagtttggtgggaggggcgtgcgaacgagttcccattatccaatttcagtgtttaatattttgttccttttaagcagtcataattttgtttctccttttctcctgattgggtattgtccccctttaaagtattttagaaaaaaggaaattggacaatcagattataagaaaggttctattgtgcaaagtcacaatgtatcattaaattgtacagggctcccgacaactctgacaacagtaactggtacagtgaattggcagcagaaacgctgaagctgtatttatgtgctgctacaaatatgtagctattcttactgtactatacagtcaggaaaaagccctaagggcttctggcatgaaaatgttacattgataaatgacagccacggtgctgaacagtactaggggctgacaaaaggcaagtcaatgtatatagagtttcctactcattaccttacctgtaaacactagaagtcatgcacaagtgtttgaaagtgtctgtggagatgtgttaggaaagtaaatgaaggtagaagaaagacaaggagcgggtgtttatatgccagccgtctagggaagcaagttgtagtatcttttagacgcttgggctgtggggttgttgcaatggaatgtttttaggtttctgccttttatctaatcagcagaatgaaacttcagggtcaccatattgcatgtaaaaccacttttaaagaaaacgatttcaaacttaccaaaaaagttgcaaaaatagtgcagagaattcacctatgtcctttacccagactcgccattttaaratattttgccacttttttttatcattctctctctatatttttcttgaatcttttgaaagcagctcgtgtatgtcatgcccccttaacccttgatactttagtttatatttcctaacaaatatcatatttcctaacattcttctaagcaactatagtacagttagcaaaatcagaaaattggacattatactatttacyatagtgtaccatggtatatcagactatgctatagtccgtagtcctgttttattcattgtcctactcatgttctccatagtatttttactttccactacaggggctttattgcatttagatatcatgtctcttcaggtccattaatctgggacatttccttactctttctttgtctttcacaatagccaaagtgacatttctgaagaatacaaaccacttactttacagaatgttccccatttttttcctgatatttattcacatccttggccagaatacatattttcatttgaatatattctcccttggacaccttgtaattattctttgtttctgggatagtttttgtcattattttcaatttccttcttgaatttgctcaacccttgtttatatacatccttggccagaatacaaaaaccatgatgctgtcaccttctcagagtctctyygcagactcaggatatccatctgaccctcataagtgatgctagttttggtcacctggccaaggtgctgcctatttctccaccagctactaaatcccccatcccctcaccaccaccacccccacccagcagtgaataatatgtctattatccaactaagaaatgtctgttgaaagamayttgaagaccttgtaaatctcctccttttcatcaaactcttcctcccctaaccacttcagcatccattcaggtgtcttctccaaacaaacctttactgcgatggttgtaagatggtgatccactcttccctgaatgtctatcagttggcattctactcaaagagttctccttttgtccatttatttattatcattgtgtatgcctagatttctactttattcagtgtttattttgatgcatatatggtcttagatttagccagtggggccccttcaagctggctcctatgtccttttaacattgtgctctctctctcctctgcttctctctttctctctctctcgctctttctgcccttccttactttctagtacaacaagatgytccaggctcatttaataccctctcaaccccagtcctggaatcaataatttctccagtgaactcttacagtggagaatggtatttagaaaccaagatctgggtgcaaggggtgctcattgctactgggatattattaatcggggccctttaagtggacagatctaggaaatatgtatgtatatttgtttaaatatgcatacatatgagcatagatgtgtgtgtgtgtgtgtgtgtgtgtgtctgtatgaaataatgagttcataccgctatctctaattacaaatctactccacaggaatctttcttgccttcttccatcccattctgtatctcccttcttccatagtgaaaagcctagctccccaaaacaatgtatttcctgatttgctcaattgcataccatgcataaaataatacaattgctatacccataacactatgaaaaaaataaagggctttaaaattctttccagttctaggctgagagcacatagctggcatactttgtttaaagttatgaatatwtttttaagctttatattattcatttataatataattggattcagatatttctgtttggattcagtttttattcctctcccctcagctttcttgattttattttgtttttttaatatagagaacactatcatgtttccaaaatttaagcctggaaaaacagtatactcagagaagcatcaattcttctcctatcccttctacctttccctcccaccccttctaggtaaccaactcaattgttttctggtttaccactattgtgtatgtgagtgtgtatgtgtgttttgccaaaatatgcagatacatgtgtcttttcttttctgcatggagtgctttccagtgaaaaccagcaaaccttctacacaagttctaaaagagctataacacttacatgtatgttttcttctagtcccttctttgttacagataaagtagcagatgatacataccctattgcaacttccttttttcatttaacaaaatatcctggatattacgctatatgtgttcacggacgtcttccttatttatttatttatttttgtagtcttgccaacagaatgttttgtcaaacttttgattttttaccggtttgatgggaggataaatagtatgtttgtagttttaatttacaactctattaagagcaaagtttaatgtctttccatatgtttatggactctttgtagatctttactatgaattgtctgtttatgcttttcgccattttttataggagatttggggtttttccttaatgttaagtactttatatgtcagagatattacctttttatctataatgttgtggaaataatttctcccaacttgtcatttgtagttttttcaaattgtgatgaaatatacatcacattaaatttaccatcataaccattttaagtgtataattctgtgccattaagtacatttaccatccatctccagaatgttatcatctcaaaccgaaactccgaactcataaataataatgggaactcctaattcctctcttcctcaagcccctggtgactgccattttactttttgcctctatgattttggttactgtaggaaactcatataagtgaaatcatttggtatttgtctttttgtgtctcgctcatttcatctagcatattgtcctcaasgttcatccatgttctggtatgtgttagaattttcttcttttttagggctgaataatattccattgcatggatataccacattctgcttgtccatttatctgttgatagatatttgtgttgtcccaccctttggccactgtaaataacactgctatgaatgtggatatacaaatatccgtttgagtcgctgctttcaattcctttatgtatacaaccagaaatggaattgctggatcatatagtagttctaaatttaattttttgaggaaccactataccattttcaacagcagtgcgtaagggttccaatttctctacatcctcaccaacacttgttatttatttatttatttattttaaaaatgttttataggctgggcgcggtggctcacacctgtaatcccagcactttgggaggctgaggcaggtggatcatgaggtcaggagtttgcgaccagcctggccaatatggtgaaaccctgtctctactagaaatacaaaaattagcagggcatggtggtacatgcctgtaggcccagctgcttaggagtctgaggcaggagaatggcttgaccccaggaggtggaggttgcagtgagccgagattgtgccactgcactttagcctcggcgacagagcaagtgtccaccaaaaaaaaaaaaaaaaattttatataatagctatcctaatggatatgaagtggtatctcactgtgggtttttgttgtgttttgttttttatttccataatcaacactggaggtacattacagtttgtcctcatgaattctagttgttctcatgaggtacattttgtccttgcagttttgactttgtctttgaaatgccccatgtcacatctagctattcttctgattcccaggtctagaaactacagtgacttcagacctgccccatgtacaatggaaagacttccataaccttttttcttctacctctaacattgtctaaagtttaatctctatcatacatcgcttattccatcaaactaataatgattttactttgcagatcaaatcctaatgatatacaattgataagtgtttaggaagggaagttttgggctataaattgtccctcttcatctcatttaatgctttttggcctactctgttttgtttgatatcagaatcacagcacctgctttttcagagttggggtttccgttatgcctacatttgaaaatcttttattttaaagggtgaactgagcccacttataaattgttatatctgatgtgggttggtctcagctgtgtcatattgtttcctattataactactgcatcactgtgccacacttactgtgtttctttcattatttggtatgtattctttgctatttttagaacttttggggttttggaatagggtttccaatatttgggaatacatatattttgttgtagtgatttttatttatatttttaatatattacccttaattcctatattttgtttctaaccttttaacatctggtctgtctgttttatatggtatcctttcactactacctgctactgatattgcagacaatgatattattctattttcccttcgctcttccccttctcctccagttgtctttagttgcacctgttctaagtttatcagaaagtataatgtatatacactagtctttcaccttctgaatatacaaaatgctctccattagtcactctgctggcttcctcagctgtctcttggttggaggaagctcattctctaagattcctcatgaaaggcccatgtgagtcacgttctctgaatttttgcattcaggtcatatctgtttgcctacaaccttgacacttgagggctgggtataaaaatcactgcctggtacttttttgtgtgtgtgtcatggagtctcgctctgtcacccaggctggagtgcaatggcatgatctcagctcactgcaacctctgcctcccgggttcaaatgattcttccacctcagcctctcgagtagctgcgattacaggcacctgccggctaagtttcatattttttttagtgatggggtttcaccactttggccaggctggtcttgaactcctgacctcaggtgatccacccactctggcctcccaaagtgctgggattacaggcatgagccactatgcccagcctgcctggcacttttgttccttgttaatgctgctccactgttgcctggctttgcatgttgctgttcagaagtctgatgccagcataaatttttatctctataagcaatttgatcttttttgcctttaaaatctaatcgttttactaaaatatatttaggagttgataattccagatcatttcccaaggtacatggaagtcacttttgacatgtacatttaaattttcccttattcctggattattttctggggttatagttttaatattaattaggttttattgtttaatgtttgtactttagggactccacttaacatgtattttggtcttcctttcctggcttttattttaacctcttctctctgaacctttttacttctatctttatattattttcaatttcttgattgttttcttgccattcttcagtgtccttttacatattttcatttgaatatattttcccttggacaccttgtaattattctttgtttctgggatagtttttgtcattactttcaatttccttcttgaatttgctcaacccttgttgcatttcttcctaatttttgtctagtctgtcttcagttcttgaaatttcttatcctagatatgtgtgtgtgtgtgtatgtgtatacaaatacgtgacactttgttcagtttgacatgtggtattacaattttcttatgcttcatggtttttattgtgggggttttcatcagcgaaaatgttatgatttattttttatcatcagaaatgtgatttctgttttctttttgcagaatctttaaatgcagttgatttgatgtttttctgttactaggcattttgaggcagggttcccggttcaagagtgttttcttttatctgtgtactgaaatgcagtttttaatagataatgttggtgtttggggaggggactggctgtcttctctttcatttctgcaggatttgtaattttcccttctgacttccttctttcccttcattgtcaggcctctgaaggacattatcttcttttcgtatttatctgactttttcccagaaacaaggctccttcaagcctctcacctcttgtcccattttctttcaaatctcttcccttgatcaataaggcacctgacctctgttcagtttttagttcttggtgttggactttctatttataaagaggtgacaaccctgtacttcacttaagtccttggcaatagtggagggagctcagttggaatttggtatcttttctttcttctacttaagtaatttaatgttcagttcatggcattctctctaagtaatgctgaaggcttgtttttgtttcgttgaggatatgggtacggacttatatcaggcagctgccattatcctctgaccgagaagctcctgaaaacatttaatatatcaagttctaagtaaaatttctgtctttcttaggaacactggaagctttgcgtgttgcaagggcatyaccaaggttacatagattatgttacaagacagatcgttttcttgtatcgttaaagatgcttaatgtgctttttaaagaacgcaacgaatgagaaagaaaagattttaaacaatatattattgctttccttcttcctcattttgtgtttattgaaaagaacaactctaccattgatagctctgtcacccacagaaaaatgttcttttgaaaattaccttctcagttcctaccaactcaaaacctccacatctgcctatatagataaataaaatcgataccagcgggtcaggaatgttttgctgcaagattagtgagaaaactgcagcaagcagcagcaaagtcgggttcaagcgggcggtttgcaccaaaaactcaggtcagttggccaataagagcaagcccgttaagggtctgaggtggccccaaagaccaaggctgaagaggtgacagtctgggcaggaagcaccgaggccactaccgcccccgtaatcgagaggccccgtgtgcgtgagcaaggctctttgcccacgtgtgcgcgcgctccagtcgggtcccggggcagccacctgtcactcacgggggagggggcggccggcggggggagcacgctgaggggcgggcgggcccccaccgcgcccgcggccggcccaggcagcactcgcgagcagcggcggccccgccggcggccgagttgggagaatgcggcggcgctcgcggatgctgctctgcttcgccttcctgtgggtgctgggcatcgcctactacatgtactcggggggcggctctgcgctggccgggggcgcgggcggcggcgccggcaggaaggtgagtggagcgccctgccgcggccgggcccctgcgcccaccccccaccctgcgcccctgtcccctgccctctccgcgccgcccctgcgctcctccgcccggacctccgctcgcgtcgcccgccctcgtcccgggcctccgcgccgagtgcccagggcaggggtgcacccggcccctctgcgcacgccgggctccgaaagggcggcccccgcagcctttctctgccccctctcgtggacgtcgcccctctctctgctcgtcgtaattcgagtcttgtccggccgccgggagccccatcccctgcggttggaagtttagggatgggggtgttgggaaacacaaagggggtggggaggagaggagagagaggcgaccgcttttccaacgcgtcatgtacagcaggagagaggagtccaagtttcttttcagccctttgataccagcggctgcaaatcctcgtccctttccccctgtcactccgcggggcgtgggttccgtgtttctgccaccttctttgccctttacctttggggggcaggggcggccgctcccgtgccaagtaaagccccagggcccgtgcgagccaggggccagtgcgcccctgcgccccgagcgaggccagtcccggccgttcccttgcggccccagcgttaccctctgcccaacccggcccccggccctcccgcgcgagccggacgtggcctcctgcgcttgcattttccatccccactccccgcttcagggagaatccctcttctgtggctgtgtttttaacatgctccaggggccgagtgatcyggctgtggggaccgtgtgagccgctctgcggttccgcgtcctcgtgccgccgctccggacggccgggccctgggcattcgggaggatggtgagcgccgagaggagccgggacagcgcggtcctgcggccgagcgccggccgggagagcagggcgtcgggctgtgtgctggagcatgccggcaggggacgtttgtagtgttttactggctcctcggctttgaaagcagcgttatcttttccgaattcctgtaaccctcgttactgtgacatttagtgtcaccgcaaacccagaaaattctgagttaatggagatggactacgggtggttgggttggaacaagagagtggtatcctgaaacaagccagagggaactaactagatgaacagacttcagttctgaagtcagacccctaaatgtccacgccggggtttggctgcttcagaggttttttctttgcttcattcattcattcatagccgaagatgttaggtggaatgggtgccttatgtggtttctggtaaattacgtggatttgttttatctagaagggcagaaataaagccctctttccacgtgctgaatcggcctagcttctgagctgacattgtactcttagcgttgtttttgtaaaaaatggtataggtagtatatgtacgcgaagacttggtttattcttgaacagcaaagagcatgcaggcagcaaaagccgtgcagtccattcagagatataatcgtgtaaaactggaatgatttttaaaactttgcttcccggtaaactgtgccttggccactctgcatagcctggtgtgctggtgagacctggcaaagctttctgcctttcatgcaaagaaaaccaaacacataagccacccttggcgtttctctttccttagtctgccactttcattagtacacgtgattagaaagagcaagcgtgctcgttcgcctcccggaggctgattcctcactctggtgggcttcagttcctggatggtgtgaggggtcttccatgcagaagtcttcagacactcctgaagtgtgtgattcttagtttgtttttttttgttttgttttgttttgttttgttttttttaaagaattcctggtggcaatatagacaggtacggagaccaggtagaaaaagtgggggaaatgaacaattaattacacatggattggtgatttgggattctattctttctgtcaacgaaccataaaatttaatgctaccccttaggatgctttagtgatttgtcggttgaggaagaggtgtgtaaatgcaatagcttttgaaattgcagtggaagactcattaacttcgtgtggtggacccagggttaaagagaagccttaagatggtttctgaaggaggtaaatagagccctgctgtcacgaatgcctgatgtataggaaaatcgtgtagtcttctttcttccccaattgtttccatggatttagacactagaagtgtctctaaatttatttcattctcataccaaaaaaaaaaatgtggtttgtttggcttgtaaagtatggacataaaaaaagatagcgggccatgcacagaaaggcagaatttaaaagctagctatagttttttagagataagtggacctatattttttctcttgcctcatactgttcaagtcagggcttttattccatatttagccagtttctgcacatcctgacgtttttcatagggtactaggctgcagtattgggctttagggatcgtctgaggggagtccaactaggatttctgctgcttcagcagcccagcccaggcttgtcattgtgtgccctgcctgttaagtaactcatcacagaactgttattctccacttggcaaaacccagagagccagctcacctcagattgcaggtttagtaaactaagcaggagggagtgctgaagaccaatctcaggcactgccgcacaactcgggactcaacacccaggctcaggacatgtatgttaaagcagtttattcaaaatattgtttaaaattatgtttcatttacatttgtgtccataccctttccccccatattttgctctttccccctaaattgatgatttgcacttcaagcgtgcctttcctttgagcttcttaaatgctttaaaattttaaccatgttaagtctcccctgggctttggtacgttggcagtggatggagccgcagaagagaggaagggatttctctggaaatgaagctgcctgtgggtgaagtgtggctgtttagggtggaaagggaagggttttctctctgctgtaagagtgtgtggagcctgagaccccttgcctgtgtgcctgcatgctgggaggtaagggacggtgttagttgagggacatgatccggagccctgggagcctgtccactttgcacagtagcatcacccttattccctgagctggcacgagtcctgtggcccttgcccgagagtccaagggtgggggactttgggtgggatcttctaggaatcatgcggggaggcgggcaggttatttcttggaacagtgaaggaccttgccgggctagaccatggtacacatggaggggaacgttagggtgtaaagttggagaaattcagaactaaattgtaacgggcttcaaatgccaagctgaaccatttgggaactagtaatgtttttgagctagtagtagacattaaagggaaatggcacaaatccacttattggcattgagtgagacctagctgtttacctctttgtgcttagtgaccttcactgatgcattgaacctctctgaccctcagtttcctcatctttgcagtgggagtaatcattcttacctcatggccttgttcggagagttaaatactgttagtgggtgctgaataactgctatctctaaaagaggaaaatgaaaaaataaaagcctaaatatccccttgaaagtgtagtgaaccaggaatcttaagttcacggtattcctgatacaattcttgatttctggaaaatagtcgtctttcttttttttatcygttacccccacctctgagattgatctgactggttcatttggggtttgggctatgaatcttaaatgctgttagagacggactttttgggaagttgtccagacaccatgccagctctcttgtacccaattgtggtgtcagaatggggatcccagtagtgggcagccatcgggaatgtgggtggagggtgcagcttgccttggcggttaggcagttgtagtgtccaacagtggacagacgtgtccctgaacgaggggttcctgtggtgggatcccaggttctgagctccactgctctccctctgtagccctgcccctcttgttagaagggcaggtcgctgtgatccctggaagcatgcatgacttgaggtggagcatggggccctcacgtggtttaatgggtgccaaaaatctgtgagcatcttggtggatgcggaggggaacacmcataccactccttgccacctatcatcmgtttggagtttaaagaaagtccacttcaaatgagagtttgargttgacacagggaggacagtagcagggaaaaccactgtatagccagataatccgacagtggcactgtaacataaacttctctctttaaagaaaataaagtttcccaattctggagtgaagctgtggctgcctctgggtcagcaaacataatggaaacagattgtgtgactgctgaacagtgcaaaagtaacgagctcttccctagacccttgagcaaaaatgaaaaagcaactgctttacccagcactgagtggggtcagcttgcccaggctctgttggaccttggggtgggggacacctgggaggctggtgaaggttttatgagtcttcagacccgctgtcagtttccccaccctagctcctgtttggatgaatgatgggtgagtggttggtctcctgtttggaacagaggaagaggtggtcagaaaaatgatgggagagggggtgggggagattgggttggggaagacataatttcttcttgctactgctcatgtttcttagggctttggggagagggaagtcagtttgggaagatactgattttagtgtcaaagcaggcaaggccactgtcctgcctaacttctagcaagtccagaggcagtgggcttagtgaaagcaggtgtggtggggcgggggtggcggggggtgcggtgaggctgcctgggacagagacacaggtgtaagcaggagtcgactgtgaggctctggctgagatcccaggaagggaagctaggtattcctgggaaaagcctgtgaagtctcctggagtgcccagcagaattcacgtgatgagaaaacacacaaacctggccaagtctatgctccctgttggtttttgtgcttttgtccttgtgaagcctcttctggaagctctgcatgggtgatgctgagccrtacaagtcagtggatatccagatggaaacacactggcttagccatgccactcacatgtaacagtggggcacttccatgctggttgttaaatatgctctgccttgagaccccctgagtgccctccrgttcctagctgccctggtctttccttgggatctctttcccatgttcagcaatcaaagggttgaatcctgacacttgaggggcctcttggacccacttctgtgcctgtgccatagtgaacatgctgattgtcacccctgcaaatgtgccacttggatagaaggaggcctagccccacttccatgatgggaacaatcccttttccctctgagtaagtcttgattcactgttactgttgagagttctggttccaccattgtaatcttgtggccttgcctctagactgccttatgggtgaggtgtttttaaggaggagggatgtcttggtacttccatatgcaaacccccctgaatgggtctgggataggctgggcctggcggggaactctcctctatggagaattacattgaattcattgatgtgtgctcaccagtgatcactcctgtccttagagtggaacttgaccttgttctcttaacagtgtgaagattcctttaccttggccctgtgcttgatcttcatgatgaacccagtatggagttggcaggaaagctgtcttcagattacctgcccagtccagaaagcctctcccacctttctctattgtaaaccatggaaataaaaggggctcaagacactaatccatcttccctgatgggcccccacctttctagggttccctgctctaagcaggtggcactgtgctcctgcctggctcttgcctcctgcagcacagggtgaaacactggcatttttgcacttagtcatgtctactagtatgggccccagaagcatggggtgttttatatggattargtttcttagcatgctgaaatgtagatgacagtgattcatcagggccggatttggagataaacaaaaactgtcacatagagtctcactcataggcttacatttaaaaagctttcccaggctatgggagttatatgagccccttgtctcactgaggcgggctgtcacaaagaagcagttaagggctggctgcctgggggctgggaaatgggccgatccctcatggctcagcctgcccttgctggctgcttgccctggtcaactgtcccttctgccgcagccttccaggagctccccatggaacagagagtctctcctaggccactctgctgaccacctcctcctgcccatggctggcagttttctgtccctaactcttagggaagaggaatggccaggagggttgggggtagagttactgaatttccagagttcaggtcaggacatgcatttgggcagggacaagggtactttcgggacygtggttgctctggttcagtttcttaactctggcaccattgacatttttggctggcttttttttttttttaagacagttgtactctgccacccaggttagagctcagtggtacaaccagagctaactgtagcctcaaactcctgggctcaggtgatcctttcacctcaccctaccgagtagctaagactataggcatgtgtcaccacagcaggctaatttttaaattttttgtagggacagggtttcactatgttgcccaggctgggctcaagcggtcctcctgccttggcctcccaaagcattgggattccaggtgtgagcgactgcactgggctggatcattctttgttgtgcaaggctgtcctctgcattgtatgatgtgtagcagcttccccagcctctccccactagatgccagtagttctcccacccctgatcttccaagttgtaacaaccaaaaatgtgcagacattgccaagtgtcctggcgagggtgggaggtgggcagaattgcccttggtagagaaccactgccttagtccgttaattttgatttcattccttctgtctgagccwttatggttagaccttcttgtaatgagactgcctttctgtgtggtctggggtgaaccactgtggggagggctaatatattaatacgttttaattttcaaaatttaataaacactttcatggcactcactgtgcatagaaataaaagggctgcatttcatctcagcccttttatttcttctagtgtactgatgaaactgaagcacagaaaggttaagtgactttcccaaggtcacagagctcacaggtggcagacccagggttgtctggtggaagagatctcctcagggcctctggaggcagtggggtttttctgcaactcctggccgagggtttctgccagccagcagtgaacctggcttgctcctgctccctgggcctcccatgccccttccttgcattggcagtgccctcatactgcggcctcatttggaaagttcctggaaggcatcttggagcagatgcacacttgataatgctttgatagtagtgctggtctgttttgcttttttttttttttttttttttgagacaragtctcactctgtcgcccaggctggagtgcagtggcacaatctcggctcactgcaacctccgcctcccgggttcaagcgattcttgtgcctcagcctcctgagtggctaggattacaggcacctaccaccatgcccagctgatttttgtatttttaatagagacagggtttcaccacccaggctggtctcaaactcctgacctcaagtgatccacccacctcggcctcccaaagtgctgggattacaggcgtgagccaccgtgcccggctgctcttttcttcatttttaccttttgctccatggaatttgtgttcctaccctccaggcctctgcctgtcctgaaggccgcaatcctcagctgcccctccggaaggagcagagatgaaaactggctctggttcttttcatttattctttcagtgagtatctcttgagaccctcctatgtgccaggcactgcttgagtgtttgggagtacaccagttgttgtagcagacacggaatccttgtggtcttggagctttcattctagtggggggctgcggggagccagacagtagacatgaagtcagttatgtcgtgtgcagaaaggtgctgtgtgctgtggaaaaaatagagcagtgtatggggattagggatgagggcggaaggatagttgcagtattaaagtggtgatcacgtaggctcatggggaaggcaggattggagctgagactaagagggagccattgtggttccctctgcttcagaggtagcccctggtttcatcttcgtccagcctctttttcggtgatctctctactccttggtttcttttgctaaacaaatgagccagttttctttcccgaaggatgttgcctttggttggctagtggtggagtttccctccatgctgtagacatcttggtcacctgttcttgttctggtctcctcgatgaggcatgaatgcatcctggttaaaaggttgtgtgtactctcataatcgcttcccttactacagacctgcagctgctcgaggcagttttaatttagactgctccagcagtttaatttgctgatcagcttcgtgggatatgcttgtggaacaatctcatttcttgattcctgagctgacttctgtgaagcaccaagcatcgggtaagtcattcattgttaggtgcaccattgaagaacagtacacattcttaaagtgctttctgcacatattgctgtttaacgagaaatccccctgggtccctgtgcaccttttccagcacaggatttccgctgtgatgtgatctttgggagttgctgcgggtgggagtggggtttgttgattcatatttgcaggaaaccagagatcagatgcctgcctgatacccaggctttggagaggggggttattcttggcaatgtgggtaacactgagcttctgtgatagatagtattgtacttggggacagtaaaatggagatgtgacttcatggccaatctcagggaggcggaactgtgggaagttgtggctggtcctggttctcaaggtgagggcatgcaggtgcttttcatagaggccattctcatttatgaagggtcattagatattttatyggattggtaggtaccaatcccataaaaccattgggatggttaggcaccrtgcgtccagtgtacttctggataaaacaactggagcatttacatggcgggaaaaagaacaggtaatttgagaggccttcacattcaagagtggccatcaaggtttcttcctctctgcgtcagagaccagtccagggagtgaactcttttctttctgacaggctgctgccctagaaaaatgacgcacttcaaatgaagggtctttcttagctaaattgccctgtgagagcttgaggagccggtgcaaattaaaggcctgtgttttggagatgcccatgaattaagtactctgttatcagtatttgggtaagtgtagatgactgttgggtaggggcatttgtatggctgtcctggatgatgagagggttggcccagtgtgggatgcctcccagtctcattgtttcctccttgctgcctctggggctttccccttgacctagatgttgagcttttgctctgtgaccttcaaaaggcctgccctgccgcactctccttcccctcctgcccttgtcctgccccatcccctgtgccagggagctcacttagttgtcttcctgtctcacttttgatcatcactaatttcccctgtgtctggaatacaactttttcatcaattccgagaggccattatttgtcaaacatgccattattttgtggaccactaggaaagaaaaaacactgtccattgacctgtgacacaacgggttcttatcagttggcattcttattttctacttattgaaagagctctttcagaccgagacatcaatttttccatatatcactctcgggcatagatagatacaaaggaaaatacaagtgaaatacattgagcaaagtgttctaaaagtttttcagagtccaagcactctgagtcactttttgactcagatgttagtgcctattttcttcaaacagagtcatccactgtgccaccaaaagcgctggtgatgtagcatttcctaaggaaaaaaatccataaaaatactaagagccattggttctggactttgaagacagcttggcaatgaagtcgaggtagccagcctttgactcttctgggaattttgcctaactcctcaattcaccatccattcctatcccaccatgatttggtttttagggattaagagtgcttgcttcattgtcgtttcttggattttcttctaagccattgacgtatatgtcctgcagatgtggatgattgagcatgggctggtaagaatgcatcatgggccttgcccagcccatagcattgccgacgtcattgattgtgagctgcattccagtcgggggtggtggaggaaagggcatcttagaattgaccaattacagcctttctttttctcgtgtgtcacattgcagttgggccttcatatctgcgggttgcacatctgcaattaaggcaattcctactttattagtggttatattattaaaaatccttattttttgaagaacaatacaaactgtggatacaatgtgtcgtatttggggggggatcatggaagaagccagatgtgctgttgaagttgaccagtgggttcatggagttcattctactgttttatttttgtgtacttttgaaaagttcatttaaaaaatttaaaaagatatttactcatgtatgcagcataaattaaagaagcagctgaaaactagtatttttgtaaaaagcagctcaaagggtttgtgatcgtattagtccagaggtgcttctgcctcacagctcttctgtagtttgggatattccacagtgattcttttcatagggagcatcagagatyacgttagatcctgacttagtacctgtatcaccagggaagcattcttacattggttgctgtttcttctgtgaggagtatctacattctttggaaattgctaatcctggtgcagtttctggtggtagaggatgagctcaggcggtctgtgaggtcatttctgcctaagcagactgcccggtggaccaaagaccctgttacccaccagagttcactgtagatgttttattttattttatttatttatttttagagtcagggtctcaccctatcacccaggctggagtatagtggcatgatcatgatcatagctcactgcagcctcaaactcctgggctcaggcgattctccacttcagcctcccaagtagctgggacaacaggcatgagccactgcgtccagccagatgttttattatcttgactacacccttctcatttgccaggcacctctttatgttcagtctttctgccagatttttcactcatgctaggcagctttgcttgtggttataagctatccatcaggagctgtggatgacttgggaagctgagtgggagaccgttaataaatatgtgttagtccttttggttctcccaacaagatattgatgctaaaggctattttacgtggtatttgtcaataagagattttggcaaattatgatactgcgtatcttctgtaaggtataattcctggtacttcaaatttatgtcagctttgtctctgagatgtctgaaatgctttagagccattgctcatttgtcttgcttttcagcatgcctgggagaatgaacagctggggagaaagaacagcttttcttcccacattcacacacagtttctgatggacccacaggttactagcctgccccacgggtcatgcagtagcaaagttgggactagaatttcagtgttcctccacctgcctaaagtacggctctggagaaagtcagccctggctgtcctggtcttagtaaagctatagttcgtgaaacatcaggttacaaatagcaggtttccctcttgctgacgcagagctgcagcttcaggcttggaaggtgctgattactggggctggtgatctactaaccctttattgaaactgctgatgtggatgatcgagaagcagagagccgggaggagaatgtaattcaagtctgggttcttggatggtctaagctccaggcctgaggctggccgtcatgaaaggaacataactgtggctgtccaggcctcataattgggctcatggaggcagacgggctcatgaggaatgtccctatggagagggttgctgaggctcagcctccatctgcacttcagtaacttaggagctcacacattcttatgggtcaagaagtaatctgggtcactaagcatttgcctaggaagatgtgaatttggcgtcctttgttttagaaagaaaagggatagaggtaaagtttcccctcttcctggtaataaatgtgacttggcatatgtcataattgcagtagtgtttgtacttaagacataggttttagtttagaggatttttctccctaactggcagtggagagtgtgtggagtcattttccttgtactggccctggaaggatatttttggtgatctaatttttttattccagtgttgcaaagcgccgacatcattatcaaatgtgccatagttgtttggaagcgaagctctcatcagctatgtaagtttttattttaggttactgtggagaaggggaggcctcggtggaggactgatgtgtgttcagagtcggagctttctgcagaaattcgagtcctgttgacccagggagcaggccttgacatcaggccccgtgcatgaagcagtgtgatgtcccaagcagtggtgctctgaccacttgccatttaggtcctggtgccagcgggaaggtctagcatcagcaggttgccagggtgactctgtaaatccatactgggggctttggaaacagttttgcctgtttctggccctagcctcgtttgacagcagaagcccaggaggcttgtgcatgggagctcttggtggacagctagctctgggtgtctttctggggctgctgtgacatggcagagaggatgcatagcacaggggccactggcctgggctccggagcagactctgggtgtgcattctggcttatccagttagctctgtggcctcaggcaagtcacttaacccttcagtgcctcagtttccccattcacctatcatcaggttgttcaatgatgaataaattagtttatgtaaaatgctcagaatggtgcctggtacatacatagtaagtgcttaaaagtgttaactgctgttgctaatgtcaactgtcactttgaaggcggggaggtgttgacacgggttcttggggaagctgcatcagtgtgctctcacatcacatgtgacacgtcgcaggcattcacgagcccagaggctcctgttccccagccagagccagcctcctctgccaggtttgaagtgaaccaacctactttcctcgaaagcgcctccagcctccgcagaccatgcctgaaactgtcattcctaggtaggtgggttgttttggaaggagtgtgaggatgaaggggctcctgcagccctttgcttcttccttgggtggggaatctgagccccagacagcatgaggaagctggtcagggtcccccccagctggtgtgaggaccgagtggcccctggggttctgcaggtagcttcaggccagaaccctttccccatccagtgttcagtggccaggagattatttcccaattccacccttaatcttttccagcttgtctttgaaaaattataccgagatatggttttaagtgcgtgctgtttaattttttaatactcttattggcaattggatttttcaacatcttgagctgttactatctgaatatagcgtgttatttgaaaacttttctgcaaggttttaattaggaaatgttctttcattagttcagtttctggcttgcttttgaaactgcagatgagtgacaagtggaagacaaattaataattgtggcaatgcaacaaagcccccctgtgagggctgaggactagttctgtcaattagaaaagtgctcacgtggctttgctgatggctctaattaagacaactcacaactggattgcagatcaatagatacactctgtgatgattttaaggaggaatgacctgtgtgaaaacccacgtttggtcatgctaaccatgacgaggaaggatggcacagtggttgggagcctggcctgtcatgttagacctggttcagatcctgctgttactacggagtagctgtgggacattggcttgcgtttccttgtctggaaaagagagttagtgagttgatgaagatgatgctgacgagcttagtgaggacgtttatttgtgcttgctctcccttcctgcaggtacttctggggctggtctggcttgacttctctgacccaggamgggtcttgcttggagcagacctgcaggtcagtggtgacatcaggtgtgaatttttggactaggagtgtcagtcggggtgcagaggcacctggtgaggcaggcttttccatccttcttctctagtccgtgtccctcctttgggcaatgtggagttgccttcaatctgggaaggtctctgtttctttgtgtaaggtgaagctgtggtgctgaatgaagcaggtgtcacatttgggttacatttttaaggttctctaatcggtcaaagtgctgtgtaagtttccaggggcaccgtagaacaaagcaggcttaatggattaatggacatgattgagtgagctgatgggttggtgatttcataggtgtctggctttaagccctgccttgcctttgcagttccacagccattcaggctggtcatctcttcctagggcctctggagttggcctaccttggagagatctccaatgtgccattcctcctgcagccgactctccttatccctacttcctcagtgctgagccagaggagagtaccttttatcacttctgtatcatttatttatttcgggaagggagtgtagtggctgccaggagagggaggcacacatataaattgtggacaaagcctagaaacctaggcattgcccctgctcataggaagtcatatgcatggaacatacgcactggagtgctagttagacagctgggatgatagagcaggggatccaggctgatacatcaggggaacttgcagagagaataggggatccaggatgatagagcaggataaggacagctgtggatggagcaggacgactggataatggagcatggagccaggatgatggaacaagcagccaggatgatggacagggagctgggatgatggagccgggagctgggatgatggagcagagcagctgggatgatggagcagggcagctgggatgaaacagcagggagctggaatgatagagcacggcagttgggatgatggaggagggaagctgggatgatggagcagggaagccgggatgatggagcagggaagccgggatgatggagcagggagccaggatgatggagcagggagcctagatgatggagctggcagctgggatgacagagtggggagcaggatgatggagcagggagccaggatgatggagcgggggggccaggatgatggagcggggagctgggatgatggagcaggcagccaggatgatggagtggggagcccagatgttggagcaggcagccaggatgatggagtggggagcgaggatgatggagcaggggagccgggatgagggagcaggcagctgggatgacggagcagggagtgggatgatggagcagggagcgggatgatggagcggggagccaagatgatggagcagggagctgggatgttggagcagacagttgggatgatggagcagggggctgggatgatggagctggggggcccaatgatggaacaagaagccagactgatagaacagaggaaatgatctgagaaacaactttgaaaggtcacctgcagccccctgatgcttgcattatgttaaaatgtttgaaaatttagaatcctcattttaaggcattgatctttccttcagaaagctgtccttgctgttaaacggtgtccggagagtaaggagatggtcagcactgagcatttagtttcttcagaggaatgacagtgggggttactctgtttttacttggagtatctggattgttcaggaccaagtaaaactctgtaagaaagggttggaaatcctggtgggcctctgttagcccttccaatagaagggggccggagggggcccactgtctgtgtccttggacctgcatgcaagctgaaggaaatggtgcctgctgcacatggaggagctggagccgtggacaggcctgagctcatctccatcagcacccggatgttggcgtacatgcctgtgaaggtgagggtctgcacttccagcagccctccccctttgtatgtcactttggacacccgagatttccctgatttgcctggagcctctgtgtaatttttaatttgatcccctgcgtcccagtggactgtgagtgtcttgaggccagcacaggcttggcccctcccacagcagggagacagtggggagccaggctaacatgggcccagggatgtatattctggaaggagggcaggctgggggacggtcacgccaatatcagagtgtgaagtggggctccatgagaggtgagtcctcatcaggaagggccgaggaggggacctgtgggcgaggcctgttgaccagaatgatccagtgtggcagaaggctgtctgggcttggagaagatcctgtgcagagatcctggggccagaatgaacttggcatgtctgggcaaccaaaggaggagggcaagctggtgaatgggacgtgaggtcagagagacagccgggggatggtgagcatttaggatctgattttgtctgccctggcacttcctgtgtctggctcagcaccgagacgttgctaggtgagggagatgaggctgagactggtgggctcgggggagaatggctgagagccagggttgtggagggtctgccacatgggggaccatgcctcacaggttcaaggcatccctggcccctggctccctcctactctccttcagctgtttgcctgctgggtgactcagctatgggctaccaagtcattttgcccttttctgctgggatctgcgtgctgagtctctgactggtaacatgctgtggtttggcagcatgcttgggagttgacatcatttctgggtgcaagtctggctttttctccctggtgcagggtgaacatgggattaggggagacaagaatgtctgctttttcgtccagacatgctgccttgctcttgcagctgaacagaccccagctgtatttgtaagttaagcccttaaatcctgtgccctaaaggtggaggtgccatttcatctccgagaagtggagaaagattgtgcagtgatgctgaggtacaggagagagctgatgaggaatagaatgatcagttgtttgtaagcaatctcctctcttctggctctctttagcaaaagtttttattattaactctcctttcaccactgcggatggcagacatacctgacggcaaaactgaagcataccctgacagtgaccctgtggggcagacacacctgaatgtgtgtttggagttttgagctaaggaatccgggagtggccaacctggagattcattccttgtttatgaggaacatctgagcccctatcctgtcccgtggaacactgggcatacagatgagcgaggccctttgttttgggttaaatgaaggttgccccgtggaggctgttaraggatgctaggtggaaactctatttataaaccacaggcttcaagcagttgcagttttcctgcccagtccactgccactgggccatccctgtgtacaggtttcccactcgtaagcccctgtgtctcatttgctggctctgggtctccttcagcttcttggacctggtgccgtccctgtaggagttcattaggggtctggcatgatccagttcatcactggaaaatggttctgaatgtaggcggtaatgtttgtgattgtctaggttgaagtccggggcagtctacctgtttaggcaagatgcaggattaggcatctgaggttctcttattcattgcattttggatcttctggagctcctcctggctggttattttaatgctctataccttagccaaccacttacagaactgttttgataggccactgacttctggtgtagacgttgggggtgaaggatgtttgacagatgggacggagatggatttatgtttgtgaaatgttggggaaacccgaggcaatacctggagcccagaagagtgggctcaccgtatgtccacagctctatcagtgcccctaaggtgattggaaactgcttgctgacctgcctggttaaggaacgaactcgggttccaccagaaacgtgctgagagatttccgtccaccttcatggaattcacagaacaaatgacaagattttaatccaggtcttggtattcctagggtgccagaggtgaaactgagaaaattttgctctcaattatttggcgagtttgtaggtagagaataatacgagctcctggagggctggaatctggaggcatttcagcaagggtttagaaagggtgggtgatggtgactagggatacagcacgttgctcagctctgggctgagaggtggttagttcagcctgacgacccagcagagcacctcctggtcattctgccggccctttatctggtgaggtagggcaaggagggagttggagtgaggaaaaatgcctaagtcaagggaatagagggagggcaagataagagatggcccttgtgcgagaactgtctgcattgctcactctttggagattgatgctttctccattttacagtttttagggggatgttcttactggcaaaggaggaaaacagctgtaaagtgagcagtttttttttcccccgtgtgttaagggaatttattttccttttcattctttgttcctccttggctcacccctgctcaggacataacttttgcagaaatgaggattttgctgcagcctgaatctcctgggttggatctcttagagcaattaataacttgttattcatgtgttcggggcacagccctttgtactcagtggtgcgtccgtcatgctgtttgtgctattggggaccactaagagtgctctagaaagttggtgtgggcagtgctgagctttggagtcatggagtggctcaggtgtcagccctgccacttacctgtgtgcccttagacaagtacctttctatgtctctgttactcctctacgagatggagtttatcacagggtttactgcatgaagctgtcacaagggttcaacaagatgttgcctggtgagcacttaacccacaccaggcacgtagggagaaagagctcagtagagtgtgtgtgggaggggtcttcttccatcccagggagggaggtatttcacctgggaaggtcctggctgggagctgtcttctaccccttctttatgcagcgggctctaagccagcatctggcamcgccctttccaaaccagtgcacactctccccatagggaaggggcctggcctgctggggcatgcttagtttctgtattttaagagctccctcatctgatgaccggtactaattaccgaatttcacaaatgaaatatgtgcagggtgaaggaatatgcctgttgattgcactcgaattactgcagtaaaattaaatttcaaggactgcaggagcctaagatccttctgctgtcctccacttcccccatcttaattggttttccttgccatctgtctttcttgcctttactcccccataactgccagcccgcactgttaaccagcggttttcaatctggctgtacgttaggaacacctggggaaaactttgagctgtagatgcctatcacccaccctagactgattcagtcagaatgtctggctgtggggcccaagtgtgttttagaaaaagctccccatgtgtgaatgactctcacgcagtcaggtctggggacagctggttaggaaggcgtcgctgagagtctccatcttttgggagtaactgctgatggtcatggagcccttgaatatctgtttggactttttgagggctctgagcttgagcttggtcttctcttttggaatacttgggtgtttgctttaatattcagagttaaatattgatgggcatataatgaaatgcctactggattactggacgatgcttttagctatgagtacttactctggaagctctgagaataataaaaacgatgaacagcagatattaagtgacagtttagaacagaagaaaaatacaagttttcttacaggctcttggctaaatgaatatgggggtggactggggtattcagtagttgagcaatcctggattctatttttccatatttgcatctccccccgcccccaatgtttttgctttatttaacaatttttggggtaaaaaccatgtaacataaagtttactgtcttaaccatttttaagtgtacagttttgtagtgttaagtgtagtcctgttgtgaaactttgtcatcttgcagatctggaactctgtatccattaaacagtaactcccattctcaccagcccctggcacccaccattctgctttctgcctctgtgcacttgacacctctaggtgcttcatgtaagtggaatcttgtaatatttgtccttttctgattggcttgttttcactagcatgatgtcttcaagattcatctctgttgttctgtgtgacagggttttttttttaattcatttttattgaggtgaaattcatgtaacataaaattagccattgtaaagtatacagttcagtgacatttactacagttgtacagctaccacttctgtctagtttttttttttttttctttgagacagagtcttgctctgtcacccaggctggagtgcagtggcgctatctcggctcagtgcaagctccgctacccaggttcaccccattctcctgcctcagcctcccaagtggctgggactataggggcctgccaccatgcctggctaatttttcatagttttagtacagacggggtttcattgtgttggccaggctggtcttgatctcctgacctcatgatccacctgcctcagccttccaaagtgctgggattacaggtgtgagccaccgcgcccggccacttctgtctagttttaaaacattttcatccaaatggaaaccctatgcccattaagcagttgttccccatttcctcatctccccagtccctggcaaccactagtgtactttctgcgtctgtggatttatccattctagatatttcgtataaattgactcaagcactgtgtgtcctttagtgtctgagttcttccacttgccatagtttttgaggttcattcaggtagtggcatgtatcaactttcccccccgacagtttttattatggtaaaatacatataacaaaactgaccattttaaccatttctttctttctttttttttttttttgagatggagtcgctctgtggcccaggatggagtgcaatggtgtgatctcgcctcacagcaacctccgcctcccgggttcaagcgattcttctgccttagcctcctgagtagctgggactacaggtgcacaccaccatgcccggctgttttttgcgtgtgtgtgtgtgtgtttttagtggagatggggtttcgccatgttggccaggctggtcttgacctcaagtgatgtgcccacctcggcctcccaaagtgctgggattacaggtgtgagccgcagtgcccataaccatttctaagtgaacagttcagtgacattgtgttcacattgttaccaccatccgtctttagaactcttttcatctagcaaaactgatactctgtacccaaaaaacagtaactctccattctccctccctgcagccactggcggccagggttctaccttctgtctctgtgaatttgactcttctaggtagctcatgtaagtggagtcattcagtatttatccttttgaattggcttatttcacttagcataatacctacaaggtttatccatgtagcatgtgacaggatttcctttctttttaaagctgggtaatagttcattctatggacatacaacgttgtgtttatacattacgctgctaacacgtgcaacacatttgctattcatcctactgtgaacacaggtgtgcacatttcccttcgagaccctgcttttcattcttttgggagtacacctggtggaactgctggatcatatgggagttctgttttttaatatactgaggaacctccatactgctttccacagtgactacaccaattttacattcccaccaactgtacacaagggttccagtttctccacatcctcaccaatacttgttattttctgttgtttgatagtagccatcctaatggatatgaagtggtatcttgtgattttgattatcatcttttttttggatgagggaaagtttgaccccatatgtgggtgtctgtcaccaagatagaatgaatgtaatttccaaggaaaaataatcccaggcaacctcttctggattatgtcccaactgattggaaatgctgggaactttctgtggttgaaggaccttgacatttgttgtcaaactgcctgtgagtcacttatcttctgggggaaaataaacataaccgtgtcttccagtctgaagtggggtgggtgggtgatatgaagcattgcacacagcagagcctgctgcccctccacagcctctgcaaatgccgtgtgaaggtggtggacctgctaccagaactggtgtcctgctgtctctgtagttaactcttaggagaaataacggttgtgtgtgtggaggtgaagaatgggaagggaaggaggggtggggagggctggtgcttctgaggttcccaaagttcctggactcgaattttctgttggcaaataagctggtcagaacttaggaatgtggtaagttgatccaggaagaagttgaaggtttctatctgtgtttttctgtgcggttgtgtatgtgtaacacgtttgcagaaatagttgaagcttattattttcttcaaaagatcttattttctagtgtgtaaatcacaggtaattaaatatgagttaaagtaagagagagacccttgggctatctcagacttagctttgagagagagaatgatcatgggtctaaggcatcactcttggttttataggtttggaaactcaatgttattagttccatctaggagttatcaatgggggattggggtttacatgcatcagaattgtaagatactgctaagaatgacagttcattaattgatgagaactgtgcctcgctgagaaagccagcactcctggggtgtgtgtactccgcagaccttttcttttgtttctttctttctttctttttttttttgagacggaatctctgttgcccaggctggagtacagtggcacgatctcagctcactgcagcctccgcctcctgggttcaatctattctcctgcctcagcctcccaagtagctgggattacaggtgtgtgtcaccacatactaattttttgtattttttttttttttagtagagacagggtttcaccgtgttggccaggatggtcttgatctcctgaccttgtgatacggccaccttggcctcccaaagtgctgggattacaggcgtgagccattgtgcccggtcctcagcaaaccttttctatcggcctatttctatctattttctatcggccaccttttctattggcctatttccatctgtctgaggaatcttgatgcatcggccttctcgttctggggatctttctgtgtatagaatcaataccctctccttagggtagtgatggagattgatttttcaaaaatcccaacatgtaatttatgaaattattgtttcagctccagactctgtgctctgttctgcagtgttggagctaggaccgcacatcccagctgctttgccagtggcttccgggccacctccatcagcaggaggcggtagaagcaccagcaagatggggctttggtccttcctgttggcttcctgttgccccagctgtagctgttgaattcagtcttcagttatcccagcactggccagccagcctcatcgtccacactccctgcagatcccaccactcctccaaggaagtctctacctcagggccctttggctacgcttctaaggttaagtctaaccggttccctcaggcctaggggtggtggctgcttcctgtcgttgctacttccctgatatctagaattttcctttttctacccagttacctggttactgactttctacccagttaacaatttatattaaagcccttctgttcaaaaagcttatgtagtttctgcgttctaattggatcctgactaatacatctgactttcaacattctttagtaatcagtcagcaaaatgatttcatgagatagacgtattatatttaattggattacagttcaccttatattcctttagtttttttttgttttttttttttgtttttttttttgcactgatctttctgattttcgttaggctcgtctatgtaatttgagacataactcctctcattagctactttctaaatcatcagacttgagttctttcctggaaagatcaccacagatggctaatgtcattcattttgttggctcttttggctttatagtagagggtgacaattcttttgtttttggtttttttttttgagctggggtcttgcatgacctcactgcaacctctgcctcccgggttcaaatgattcttctgcctcagcctcctaagtagctgggattacaggcacgcgccaccaagcctggctagtttttgtatttttagtagagatggggtttcaccatgttggccaggctgatctcgaactcctgacctcaggtgatctgcctgcctcggcctcccaaagtgctgggattacaggtgtgagccaccgcacctggccaagggtgacatttctaaaccttatctctaaattctgtgtccattattcagtattcctttaacttgtagagcatggctattacgtgtttaagcaacatatatctctaaaaagattcgaggccgcttataagagaaagtatattatgtgtaagcacagattcattaaaataagagtttaaaaatctggggtcaaatttagggggtagaggggatgagggataaaaaggtgaaggaaaaaagaagtggatggagaattaaagaatgaaggagaattaacactgaacacccacccccatggagccagatcctggctaggtgtttgccatctgtgtttagtttaatgctcagcataatcctgcgtggcaggtatgttacccccatctataggtcaagaacctgaaacccaaagagctggccgattgtgctctagtccccctatacatttcagcttacgtctactgacactaagccaaggggagctccttcagttgaacgtgcaattgtatcttggtagccaaagcaagaaaggaagcatgttgggttgcatagttctcatttgataatacaatgaaacattttcttgagagagataaacattttcttagccttcaagcttgataagaatctagtggatattaacttaaagggcactgaacatgataatagtgtccgtcagggggagaaataacagaaaccaaaagcagagatgcacacgtggccgtttatttaaatcaaacctgaagcagaaggaggagcattagatcacagtgtgtaaaggcaattctaggagaaaacgatggactgtagctagctttctgcagtcctgacctggccaagggtaaaactagatcggctgcgggctgtgttccctgggcttcctgctgcttcactcctgggaggcagcacagagtggttgttacggggaaggttttcctaagtgctgtgaatccaccctgggccgtttactggccttgcacatgtgggcaaggtacggtcaagctcagcatgatgacattttagccaatgacagatcgaatacccaatggtggtctcataagattatatactgtatttttactgtacctctgtgtttagatacacaaatactattatgttatagttgcatacagtattcagtacagtaacaagcagtccaggtttgcagcctaggtgtgtagtaggctataccacctcgttttgtgtaagtgcatgctatcatgttgccacaataatgaaatcacctaagggcacatttctcagaaggtatccctgtcattaagcaacacatgacagtacttaatctctctaagccttagcttcatcccttcttaaatgagggtaataatactgtttcgtccacctgtgtgtgtgttttgagatagggtctcgctctgttgcccaggctggaatgcagtggcacaaacatcactgcaacctcgatctcctgggctcaagcaatcctcctgcctcagcatcctgagtagctaagaatacaggtgtgtgccaccatgctggctaatttttttttttttttttttttttttttggtagagattgggttttgctatgttgctcagggtggtgtcaaactcctggcttcaagtgatcctcccaccttggcctcttaaaatgctgggattacaggcatgagccaccatgcctggccttatttttatatatttaagaacatatgctttcggccggggtggcagctcatgcctgtaatcccagcactttgggaggtcgaggcgggtgggaggcgggtggattacctgagctcaggagtttgagaccagcctggccaacatagtgaaacccccctctctactaaaaatacaaaaaaattagccaggcgtggtagcaggcacctgtaatcccagctacttgggaggctgaggcaggagaatcacttgaacccgggaggcggaggttgcagtgagctgagactgcatcactgcactccagcctgggcaacaagaatgaaactccgtctcaaacaaaaacaaaaacaccatatgctttcccaacacatctggacagctgatattaaaaaagggtgtatgtagtagaattaaaactattacaagagaaacagagccagacagtttggggaagggagaaaacagagaggttgtgggggcacttaccttgaatcttcttaggtcccttgtgtgttgttttgcctaatccttcccacacgtctgcaaagaggatgatctccccacgtagagacaggaagcggattccgatacctcgccttccctgtgttagatgtgccgtagctcctactgagggtgaggattaattggagatgatgcaagtggacctctaagcacgggccgcgatgatgtcgtagttcacggtcacaggactgtcactgctgttacaaactggcccttctgctccgagtctgctggtcctcatacggttcctttctrtctctggttgtgttggttaagacagagtagctgcaatcagggagagtgtcgaccctgaccccaasaagcagggagagctagtgcagaatgtgggcagtggcagcagacccgcggggctgtgacactgtcctttctgtggcttgggtggacttcagggtgacccatctagcagagtaaaaatagtaaccccacatgctgaccatgtaccccctgctttcacgcacttttatgggtgaattcacctatccgttatagaaactccrtgaggcgtttttattatccccattttacagatgaagctgtcagggagagaggttgagttgccggcagtctcacatgtagaagtggtgaagtgggaattcagacccacccctgcgggctcctcagccaggcctgctcttagcatcccagtgtgctgctctgtgaygagccccagtattgggatccactctccagatgaggtttgaagagttccgaagtggaacgtctttctgggttggytggctgtagaggggttggtgactccagtgtcctgtggtggtagacagtctccagccaagggcatgtacttctcacctccctgcctcgtgaatctggtcagtctggtgtcaaacttgaaccagtagactgctgtggatgtgacactgggcgtggtgcaggctctgtccttgaggggcctggtagccccacctgggtcccctggggcccaactgccaygctagaagacgtccaggctgctctgctggagaaagaaaccgtgtggggttgcctggagggtgagacatgttggaggggagggagggagargccaaggcctcagacaggtgagagagccccagccgcgaggcacctgtggtctcaccatgggacataagaacttgtttaagccatgacgttttgggagggcttttgtgcaggaatggcacccggaactcctgcttcccatgaacccagggctgtgggcctggctgctgggagtgagccatttgctgggccagggatttgccctgctgcagggacttttctaacccagccgggccaggctcacctgggggcccttttgattttgagaggacgcatacctcagcctgcattttggtgtcctcttgctagcacctgccagctgaggttgagccatggtggacaatttttccttttaagacgattctagttactgaaccaaagatattaattatgtgcttatctgtggtaattacaactaaagcattctttatcactgcagcttagtcrtttgcttacgtgatttaaatgtgatatatgttaatatgcatatctcgtcaaagggagtcatgggggtggcatggttagagcatgctggctgagggcaggaggccagaggtgtctgcgtctccctcgtccatctcgttctcccctcccgccttccttccccwttcccctctctcccttctttctgtcccaccaggatttctttaaggtttgtgtttcatcaccatcatcctgtttgaaagtttttttttgttgttaatccatcagtctttctcaattcataattaatttcttccaacctccctccctgctcccatccttggcagcctgggggcagcaggttgggaactaccaccaatgttgcaccttcttaatattcttttatgtatctcttctcaaagatagaattagtttggtctgaattatacatacaatcatagaatcaaagtgacttgaaacttagaaggtgcattttcttttagggtttaattcactcagaggtcctccaacccagcctctcattcagtaaagacttcccttcagcaacagatggtaaatagattctgcagaatgagtaattccttcatttctgtctgaatggtttgtttagaagcaaacacaatgattccctctccttattaaatttgttgggagaacatcaggatcatactaagttactgtccaaagctacaactgtgaagagggggtgcacrgtgacaaaaaagagaaatgtcgcttgacatttcagaattcaggcccagtatcatcggtgccctcataacattacacgccaaaccctttaataaaactgtcaatccagattgttaaaacactgagcggtttgctcaggagatagaatatttatcatactgaggttcccagtttttaatgagccaaatatatttccttatttttttcatgatctttaatttatcawcttaaccatttttaagtgtacaggtaagtggtattaagtacattcatattattgtgcagccatgtccaccgtacatccacggagctctttcaacttgcagaactgagactctgtgcccattaaacacaactcccactccccactctcccagctcctggcaaccaccattctactttctgtctccgaatctgactactctagatacttctattagtggaatcatacagtatttgtccttttgtgactggctcatttcacttaacataatgtcctcaagattcatccctgttagagcgtgtgtcggaattgccttttgaaggctgagtaatattccattttggaggctgagtaatatgtacatgtgcacattttgtatatccatttatctgtcagctgacttttgggttgtttccgctttctggatatcatgactagtaatgctgttcctcacattttaacattcaaatgacacatcataatttcatttattcttgatatctcaggaaaattttaaataccgtttaatagtggagaattatggtaacacgcaccaaatgtacattatatttttaattgcttggcaatttgggacaacttacaaattctgtctttaggtttggtcgctatacaacagataatgctgctatttctgctttagtttcagggatcaaaatgagttaatacgtatgaatgtcctttgtaaagagagaatgtaaatgtttgtcgatagaaccagaatacattctgaactttcttgcttgtattctgggtaggtagacatttaaagtagagatttggcataacttagttcttccagaaacttcaagcactttacactcactctttttascccaggtttgaattatgtggggtcattcatggggtttatgaggtttgaagacatacttaaataacatgtgggttctctagaatgaatgtggaaggaaacattgtactcctgtggaatgctggcaccctaacaggagtgactttctcttttctctctcttttctccttttggtcaactctgtttgtatgtagtgtgagctctatactgtgggatagcattctttttagaatgcatgcatgtgaattgtgtagtgcagagatttgctatatccatttccagaatgtacatattgaacactgttttgcgaaaggcaggtctatgcaaactaccccaaagtccgaggaagctgagaggctgaaggaagagcctgacaaatcccgtttcttagaaagaaacatttaatagagacctacaagcagaagccgcatctgtgtctagggcagcggtaagacgagatgggggagccccacgccattaccccccagacccagggcttctatgccatagcggggagggaggagtggttccaaagggatacgtaggacaattgaagtawgataacatcaaggttgtttgatctgagggcaggatttactgtaagcacctgctcttacacaggaatagtagataaatgggaagtcttagaggccttcttggatagggggttaatcagaagccaacgtggcagattagcatccaagatggagttgctttagcctccacaagcactgactgtatgccaggagttgaccatgatgtgttatgaggcactggggaattcattcctatatgaatctgggtgattgacaagaaattctagtggaagtgacatgtaggttgagctgtgcattgagcgggctggtcacgtgcccccctttagatgttcccgatcgcgcggaatcacgacatgagaggatgagatcagagttctgtcagcttcatgtagccaaggactttcaagttcttccttgaggagttggccctccctagtctcctctgttacaccagtcattgctacgttagcagctttgcaaagtaggtatcacgctccatgtgctctgtgcctgctgttggcctgaagcattgtcatggccttgcccaggtttgctttccttaagggcaccatttggtcccttttgtcaaacccatttgcttacacaggctgctrcactatttctatgattgcaattccagagtttccgagtcccgggatgggggtgtctgatgttagtagcatgccatggtcagatgtcttggggaatctgggggtaagcatagttgaatacactctctgctgcaagtttctcaaaaatgtgaatacaccaatggtgtttcatgaatccaccaagaccatacagcactatagctttgcctggagagttttctctcctcagcaaagctctccacctgtcccaagctgtgattcccaagaaatgccagctgggaagcctggtttgagggtagcatatgctccattgccatggccaagtcagtacaagccttttagcaatggtgcgttccctcagaaggtttgctgtggcccatttagccatattttggctttggttcctggaagggaggtgtctgccttcttcctagtggtgtgctgcccaccaggcatgcccagtggctcatctgtctctgcagatagcttggctgaacccaaaagggctcagtccttcctgtgggcttgatgcctgtaggaagggccagtcttgtccccatgtctgcagtgtgccacagcctcctttccaatttgtttccattataggattatgagacctcctgactctaaggaactgttttatctggggcttggtgttgcgggcacagcacctgtgaatagttaatgacattttttattcccaaccaagacctaggctcctttagggcaagggccagtgttgatctgaggatatattcccagcttctcacacagtctgtggtgcagactaggagttccatagatcgttgaatgaatggtttaaaaaatgaagggatcaagtcctggaagtggttttaatttgctgtgactccaggtagcttgcttaaacactctatgttttctaaattttaaaatagagctaatatttctcaaatggctccataggacattggtgacactcagttctgcaccagctctttgcctggtaatgtgcaggatgggggatgcccagggtatctttttattccttttttttttttttttttttttgagatggagtctcgctctgttgcccaggctcccaggctggagtgcaatggcgcracctcggctcactgcaaactccgcctccgggttcaagtgattctcctgcctcagcttcccgagtagctgggattacaggcacctgccaccacacccggctaatttttgtatttttagtagagacagggtttcaccatgctagtcaggctggtctcgaactcgccacctcaggcgatctgcccgcctcggcctcccaaagtgctgggattacaggcgtgagccacagcacccggcgtttttattcttaaaataatcctgtgaggygtatgtagtgttcacctgattttgtaaatgtgtaggcacagggaaccgaataacttgctcaagatcacaaaggctttaagtttgagaagtgcagtgaaaatgcrgggctgcttcactccaaagtcgatgtgtgtatatgtacatataagtgtatatgcatgtgtacatgtacatataaacaaaagtacacatttaggaagtgtatgggaaatatacatgtacacatgcgtatacagtcataaggacgtttcagttaacagtagactgcatatatcacagtggtcccgtaagattataatcttgtatttttactgtatcttttctattttagataacaaataccattgtgttacctacagtattcaggacagtcacatgctatacaggtttgtagcctagaagcagtaggctgtaccatctagcctaggtgtggagaaggctgtaccatttagttttgtgtaagtacactctgatcacacgagcaagaaatagcataatgatgcatttcttagaccagatctccattgttaagtgatgcatgactggatatacacatacacatatgtgtatgcctgtatagatgcgtgtattctacatactcctaaatgtgtcatatggcaagggtgcctcattgtaattctggctttttccataaatgttaaacaagcatcttctcccaccgccagtccttttcttccttcraggggacagggcctctggagcttatgcccagctcctgtyggatgcccccgtgttctggtcactygtgtgcccrtctcttcacactcagttttcccacccctgagcacctcaggtgccaaggtgtgtttgttgaactgaaattcttaagcctgctgagtacattctcagtttgtcaagayagataaacaaataccttttttagatgatttaaaagattcttgacacagtcccagtggtgttttaacaacttttcaggtcctgatcagccaaactctgggccaaaagtaaatgtttaataaacaacataagagtgatggaggaaaaatgtatcttaagtggaactgtgtgttctgtaaatctatgacagattactgttcctgcttttgttgtgtataattattcttgttcctcctgagaattgccctctctttcatcatgaaacgtataagatggcctcctcctctggtaatttggagcaattggcctgggagaggattgatgtgtagtaaggacagtccgtaggagagatttagtgggggcagtttccttatcttctattctgtccctttgccagacagaagcacaaaaagtagttggactgaaaatgctgcttcctaaaattagctctcctctttgttttccgaatggttttactggttgatgcgggcacaatttgcccttcttggggagccttctgcattgtgtaaagtgcaaagacacatctatcagagaagctaattttaggtgctagtaagttttaagggcatgcaaagctcaaaactttgcctgttctcttggaagaagatttttccctcctgaaaaacaagcttcctttcaaagtcagaaaaggggagcttagacgaagccccaggagggcaggtatgtcttgttcactgcagtctccagtgccttgcgagggcccggcatgctgagcgctcagtaacccttggcctaatgtasagtttttcattctgtgaatcaggaatagagcaacataaggggagcttctgcttgagacagcaatggcagcatcaaaataaacgtggcarttttggtcttcaagagtgaagttgtgtctctgaaattgtaagcccaaatggatcatttccttttttaggttttagaattccaggtttattttctggaagagcttgcagcagatgggcttctgtaggggaacgtttataccttgggggttccgtttcgagagtccttgatttattattgtttacaaatggtggttggaaattgttcattgatttgacataaagctgcccaggcttattgtaaaaacacctctgcatccaattagaatgacagacacttagtgtgatgactcaggacagttgatggccttaaaaaaaaagcgaacagattaaatcactctctgttttttcatagccrttgatggaaacagattctgtggggtaaataacagagtcttgggtggtggaaaggttgaagaygtccagtagttgtggcagggcaaggatggaggactttttctttgcaggggcagtggagaggcggggccatgggtgaagactggagaatactcagaaggtagcatggacgagagtgttgtttgatgactctgcatgtgaccagtagtgacattttactcactgaggctcatattgaggttaagcccgaggtccattggccttgctgagatcgtgtttagaacacagcactgtgcagtaagagactcctataaytctatcaaatttgcatttggaggaattgtaaagagcctctgttacctcctaggtgaggcagtccaggaaaacagttgctagaaggagctatctgcagaaatagacagttgtggtcctttcatgttttaataattgttccctggatttcaaggagtcagtccaaaatccccgtaatagattttagtaacgttcatggaatctcagtttgcacatcatgagacctttagtgtggtgtttactgtcttcaccttaatatactttgtatccatgagcaaccttgctacagtcatgcaaagatgattattttttattcagcaataattagccacagtgttgagcacccagatgccttcctgcagcagccccccttttctccccagccaacatctgcaactgtgaacagatttccatcttcagccttggtggttggaaagaraygtaagtcacctttttttctggttggttctggggcagatgccaccaggctgcagaggcagtctgtgtctgtggggctcaccagggcatgagttctgctcccaggaaagagattcttgcaggattttgtctgtggttctaaggagacaagtaggtggcacacaaaaacagaaaatgaaagaacccatccctccaaaaccacacacacaaagccaaaaggaaaaaaaaaaagcacataattatcatgtaggcactgttgcagctaaccctgattttggcctcaattctgaaacaagttagctggtttagacaaaccccttattaggtaatggattgttattcattcctccccttctcctagtcatttactcygtgagagctgctcctacctgaccttccactgattttggtagcagcatctcccagagcgactgtttccttcttcagcagtgttccttactcagggtgtaagatcttaaccccacagagccccgtatcaggtttaattaactaattgattcagcttgtgcttactgagtgcgaggcagtcatgtgcttctgtttggtaaatggcttcattttccctctaactcctgagcgtcctgaagcttctcttatggttctctccaaaggagtcagcaggctggctctgcaagggtcagtaggttctggggtggtggggggccgagggaggcagggaggttggctctgtctttatttggcatagagctccccgaacagggtctctcctcctttctccaaaggttaatggaaccactatcttaaaaagctgaaatcttatcttctggggtatttgggtagagaaggctagggaatcccttttccatggtggtgcagtaggttctcagaaccagctggtgggcctcaaagagaggcggctgtattttagcctgataatcttgattcctggtttcctggctctgtagcatcagaaatgggaagctttaaaagccgtgccttgttggatgcaccgagtcataaaataaatgtgatgtgctgggtgggggaaatgcgggaggagggaaacaggtggttggagctgcttcgtgatggccgcccaccctggctctcctttcttaataggcttcagaaatcctggaatgcgtaattcaccagctcacagagttccacccatgtccccagtggcttcaaaatgtaaatgacatttgcagwgctgggaggtaggagggcratcccgttccttccctggatctcagtcgcagaggtgctggctcatgtgcctgagtgcagcggctggcccgtcattactggtctttgcaggaagccactctgaaggcacctgggcccttgccaggctgagtcacagctgacttagggaaatgccacacaggacgcttgcagtccccccgttctaagcgtaggttttgcaactgcatactcggaaaatgaatcagagtgggggaaagtgtcagagaaacagcagaaatggaatgtaggcaggagggccacagtggcgctgtggattcagaccacaccttcggctctgtttggggcccttcctgtaaggagcgtactgatgccagaggctgggggtgtggaagggaagctgctgtgctgttagatccattctgctatttagccagccttccttttcccagctggcacagacaggatgtgttagagaggtgctcagacctcctttcagagcaactgaatcattctccaggagggacagggagtctgaaatgcaaacaggttcccagggttattgaagagcagccaaactgaacacccactgctctgtggactcaagctggttttagacattgtttggtcaggaccagagccgagctctggggcccactgggggctcttstcgcaccatmtcattgattctacaatgcacatttcccccscctctcatgttttaacatgtctgaaatcaggatgcatcttccatggatggtgtttcagggtttcattgatcgtgtttttcttcctgagtggcacacaaaattaatggtgctccctagagttgatggtccctgcggttcagtgaaccgtgttgctcttgtgtaagctcctgtgggaacatagagtctctgtgtcccaccttcttcctcgcagtggtcagcacggatgaggtgggagttgcataaatrtcagcattcgaaagtgagggcgtctgtcggtgctgtctcactgtggggcttcagaraacgtgagcacctgtgtttgcattctccatcaaggttcatgtcctgttggctcataagcatgattatatccattatacaaactggggcacaggcacccagagagaagtcaaaagacttgttcaagatggacaactaggaagtggtggggacagaccagtcctgtctgatgccagatccagcgctgtatctgccagtcagcatgcacactttcatctctccagcctcttcccactcacctttactcaacatttctgggcctccatagtgattgtagtaattcggtaaagatgattcatttctttagtccggtcttcggacttgacttcttaraagcaggtcttgtgcaatagttgcatattaaccacttggtgacacagtgcaygagggtatgccaactctttttgctcatggccgtgcagtgcagaatttccaggcattgtccgctctgtttcctggacttcggagtgatagcaaagttttgtattccctgatcagctgtgtatctctgagcagcaagttgatctctctgtataagggtgactgtgcccatggaggatggcatgcaattgcctaaagatttcagtctgagaatctgagaaacgatactgaatggagatgacaggcttagtgcctgcttccaggagccatgcctcctcctggcctggaatgaatacctaaacacctgaggctctgagttccggcagtgtgctgaaactgctgttggtctggcccactgacccggaaacccagccacctgaggttgtgactttagggcttctagttttgtatttagctttaattccatctgtgaggcagtggagactgttcattttattttacatcaaaggcttttggaggttgagatgggaacaggatgatagaacagtaatgcataattatggagcatttgctgtatggcaggcattcgtaagagtgcatttgttgatattattgtttggcctctcctgtcattagccctaagcagctacacttgctaagctctgtgctaaggctgcagtaagcaggcaggcagtgcgtgctggtgagcttgggcagtgctggagtgtgtcttgcccagtgtggggatgaacatacaccctttcatgctcacaggtgccttagcctggatgataatgtttaagttcattctgtttatatgcaccgtgtcattaaacaatgctgtgaaaagggcactattatttcccccatattttcagtgataaggcagaggcccatgggctccttgtagcaatggaggcattccttgaggatccaggcaatctgactcccgagtcccrgggctggacagaaggaagctggctccgagagctagactgcagtgcagaggaattccacgctccgcaggtgctgtcttcagaagttgcatctcgtcagcaggatgagtgcttttggaatagacaatcttaaatgtcatagtgaggtgacttgcagagataaggaaggacgccagcctcaggcactgactgatgaatccagatggtgayttcctccttgcaggagaatcagccacttacacagactgggagggattctactgagggaaaaaatgaattcgcagccagggacagtggctcatgcctgtaattccagcactttaggaggctgaggaggcaggaggatcacttgakcccaggagttcgagaccagcctgggcaacagagcaagatcctgtctctacaaaaacagaacaaaccaacaattagccaagtgtggtggcacacacctgtagtcccacctactcgggaggctgagacgggagcattgcttaagcctaggagtttgaggctgcagtgagctatgattgtgccactgtactccaacctgggtgacagagcaagaatgttaaaaaaaaaaaattctcatttcttctcatggactttgtgtgtgtgtgtgtgtgtgtgtgtgtgtgtgtggttggttggttggtttaagccatggattaaagaaaggagaactatttcctgtgactaaaagtggtttacatattggtgctttagcaggaattttggagggtggcttaagtgaataattaaaacagaaatcttcctagacgatgtttatcacactcaagacattaaaaattagagtcaagggactgctaagacttggggtgctggtgggtgaggctgcctttcagggaggccatgctgtgagttgagaatcctaggccaccttgcctgcactgccagctttgcagctgtgggcacatctggatccccatttctgtgcgggtgcagacaggtgaatgttacctgcgtgcatcataaaatgctgtgaaaggggtcacaggtattgcccaggcttgggcagactcattcatagggctcactggcttgcatgagaagggatgctgggcacsgtaaacacagaaggagaaggcaggctctgctgccaggagcttgcascctgagccacgtggaactggtttgcctgtgaagcaataggcacagtcctgaaagagcacagtcctgaaagagcacttctaattgggcatacaagcaagctcataataaagttctcctaggaagttttcctcatgttttgaagatgatacacttagtccctgactggggatggtttcgcttacactttttcaactttacgatggtgtgaaagtgatacacgttcagtacgttcctcaattaacaatgaagctatgtcccgataaacccatcataagttgaaaatatcctaagtccataatgcacttctgatataatggtattttcaacttacagtggctttaccaagatgtggcgcattgtaagtcgaggagcatccatccctgatgggatatataaggatgagatttatgcacagatgttcctcagcttatgatgggatcatgtcccagtaaasacactgtaagttggaaacatctgaagtcgaaaatgcatttgatatacctaagctatcaagcatcatagcttagcctcacctgccttcattgtgctcagagcacttaaacgttagcctgcarttgggcaagtcatatccaaacaatgctgacagcaccgcacactgtagggtatcagttgtttaacttcgtgaccgtgtggctgactgagagctgtgaatcactgacattgcccggcattgtcagagactatccgaccgcatatcgctagcccaggataagagcagaattccagatttgaagtacagtttctactgaaggcatattgctttcgcaccatcgtgaagtcagaattgttaagtcgagccatggtaagttggagaccatctgaataacaggatgagatgtagagcaggatatatatgttagaaacaaagtttcgcgaacagtgcaaacgttttctagatggactatcctactcttctctatctcattaaacactttgctggcagcaactcactgagttgaattccygctccaccagtagcctcccctgggcgttggaaggctctgccctctgatgggggtctccctgggagctgcggctgcggacccccgtagatgggatgcrgctgcccagtgtggtccttgcctttgcaggtgagcgggtgcagggaggtgcggggtggggtggcggctgcagcagtggtggttgggggccctgcaggctccctcggggtgtagcagggacatggtgtggtggttaacaggagtaggccactcatgtgggacgtcaggactagtgccacaaaggcagccctgtcacacgaacaggttcttgggggacagaggtctgtctgggacyggctaatgacctggaaagactggagaggcaccattgtccaccaccagatgtatggctgcagggtaggagtagacttaagaaggaacactgttggctgggcgcagtggctcacgcatgtaatcccagcacttcgggaggccgaggcaggtggatcacctgaggtcagaagttcaagaacagcctggtcaacatggtgaaaccccatctctactaaatatacaaaaattagctgggcrtggtggcaggtgcctgtaatcccagctactctggaggctgaggcagaagaatcacttgaacctgggaggcggaggtcgcagtgagttgagagatcacgccattgccctccagcctgggcaacaagagcgaaacttcgtctccaaaaaaaaaaaaaagaaggaacactgttagggaggcagtcagtgagcctcaagtcagaaagacaaacaagctcattttatgcatttgctaacatttgacctcttctgggacgcgtaggtctctcaagttctgtttctgtttcctgtcacgcagatcagagatgtgaaacagacctggtgtacacccgtctggggtagcactgggagccacggcgtcctggcagagcaggtgtgcctcccacaggctgatgcagccgttctctgtgcagaggctgagccatcctaggagcagctgtggggtgaaagtgtccttccttaaactyagtgctcctgctcattctctcagtatggctaatagctcatttaaatatactatggtggtttttaatttttgtgactcattccctcccctcctcacctgtgtttttcctgtgtgtcagggacattttagggggaccaaaaggatctctgtctctgctctgtgcttgctctgaggttgaatagagaatgttcagggctgttcttatttgagtcactggagctgttgtgagctctgacggcctgggagccccactactgtcacatgaggacagggcgtggggtggctcaagcatggccgcttggggttgggtcctagtgctgtcatgttggaggtgtctgacctttgcactaagtttccccacttacactaaatggggataatcaaagctttgtgtggggattaagtgagttaatgtaaccagaacacttagaatggtgtgctgcatacagtgataatgcagaactactcactgctgctggagtgcgctgttatattctttattaggtcctcagactttttctatgcctaagccttgagggtctctctcagctgtgyttttctgttttttttttttttgtcttcaatagatttttctagggtcttttctggtaaaaagagactgggaatgcaaatacattgagcatgagttgagaggagtttggacatcagcctgaccgtggaaaactggggaggcgtggagtatatagtttcctctgggtgggttactgacagaccatgggagttctggggaaaatgtatgctcttctctttaagtacaagccaccattgccaggcagaagctgataaagtaattagaattgttgttcatacctgacttgcaggaatgtgtgtgcgtgtgtctgcatgcgtgtgtacgtatatatactgtgcatgcatatttgtgtgygtgtacatacatatgtacacactgcatgtgtctgcatttatgtacatatgggcatgtggcatgggcatatggcacatgcrtatctgtgcatgcacacatgtacacagcacacatgcacacatgcagtgcatagtatgcctgcatgtacatgtgcgtaccatgcatgcatgtacctacacgtgtgcatactaatttgtgcacacgtgcacactgcaatgtgtacttacatgcaagcctacgatatgtgtttgcaggcacatacatgttcacacactgcccatgcacatttgcatacacatgtgtgcatggaacatatgcagtacaacacaagtgtgtttgcatacatgtacaaacacacatgtgtatttacctacatttcaaggtgaaccctccccagaaggctctgctcaatgagactctgaaagtgttcaaaagcatggtctgagaaagcatccctccttcagggcatgtacccaagtagtctttctcttgctggctgaaatcatcagggattgtttccaagttttaacttctgattttcactcttttaaatcccagagccgatacttgaacagaagtaagtttgctgttacacctctcactttgattagcttgttgcgttaaattaattgtcagattgcctgaaaccaaagcttcttaaaatgaacactggttcactcgggaaatttttgcaagatcaaaaatggaagactgtgtcactgatgaaagggagagatagccagaatacaaaatctagrgctttggacctgaaatctggctgcaagatggttttttcctgtcttacctaagaagtggcccccaggattcacataccagtagcctctttttgttattctttttttttttttaaacatatccccttgttaaagatcctcttgattgcaagcaaaagcagcctactgtgcaggctggcttaagcagaaaagggaatttattgtggggacatggtggggaggtgtctcattactgaraggaagaaggctggctggcctcagaaggcatgaraactgggacctgggtccagcccagtccatggtggccacagctggatctcagctctgctcctccaggccaggtggctgctttctcctctctctgcagtgggattttctctgcccaggactcatgtgtctacctgtgggtctaatctcctagcataggctgagcctgcacctccttgagaaaacagattagcttagcttagtctgagtgttcactccaggcgcaccctgagagggagtgcagcctgcacatggggtgggtagttcttaaagggagcctgcctccagaggcgccgggggagggggggggcctgcatttagagtgtgtgcgtggagcatgtagcttgttcctgttttcatggagtcgcagagatcagaaagcatttatgcctgtttctgacagagatgcacacagctggtctgaatgggcaggattggggtgagggcagtggaggagggatctggccacacaggcagtctgctgtgagggccacttcaagccactcttcccttgctgagctgtgattcgttcttttccaagtgacttaaacagaggccttttctcttgtttgtggggatgaggatggcgaagggaggaggagggagagggtggctgagtggaggaagcgcagttgtgctgcggagattcctgctctgcagcttgtctgctgtggattggcccagggggtaggtggcacagtgtgtgtggcaggggggtgggggggaccaggcctggctccgctggtccactcttgggctgtgagccaggacaaaatcttataccaagcaagcatcttttccagtaaaatagagtgtctccatgcccttaggaactgcctgggacagcctcattctgtcctggattttgttctgggctctgctgcctgttgagcgtggaccagtgacctcgtaactgtggcagaggtgaaggtctcagcaccttctgtgtgccctcttgcatgtgtgtttgccagcatgcttggggctttcttcaggtgtttctggcctgaggaagtgtcttacccccatgttatttgtgtggctgcacagcatctggagggagggatagagccccagcgctgggcacatcggatctgtgctctgaacagctctgttgatgccagagctgcctgacttgctctgtgtggtgctgtgaaggtcaggcttggagagtgaggagctgctgaaaaagggtgagttttgttctcttcttccagggctcagtcttccttgtaccagtttctttctctgttcttctctccttgactcaggaatccagtttgcgcagcacttacatggcgggcaaactccagtttatacctggagctgcagggcggagctgctgtcagctgggagctgttattgaggaacagctgtggtagaggtggataagaagaagacctgaccccacctgctggggcaagaagcctgcatagcacagctaaacagccatgtgggacaacggctgagcaatgacagtggaacccagtgtcccatgcaaagtgctcaagaagtggacgggatggatcgctgctgagtggctcttgaggagctcagagtatcttggggctgatgttgcctgttgggactttccccagcacagacrgcgtgcgggatttcagatgctcttctccttgccttcagaagcccagggagtgttggcagcttgtttgcacctgatcagataaaagaggtcatgatctctgtgaaggtcttttcggggaaggggtcactggccttgccaaatgtgggaagcgaggcctcttcccagttctgcctgtgactcaatggctgtggctcagggcaagtcattggatttgttttttgttttttttttcagaataacgtcagcatgtgctgagcatctgactcacggggtgaggcagtgaatgaaggacttcatctccgtgaagtgcttgacgtgatagaatgaaaacccttgcgttcccagccttggctgtcagagtctcattttaaggaaagccgtttttgacgtgtgtttcctttcagttcggagctggcttctgttaggacagggggtttctgcccacttagctgtgtctctggtaatctgagattcttggaaacgggccacagtgattcctctggccacattcagggtcaggttttcagttcgtcttcctggtgtttccgcgcctcattctagggggaggtttagtcgttcctttctctgctgtcccccagtagcttccggccattccttgtgaaggaatcttcctaagtcaattttccctggtgaagactgagccctggaagaagagaacaaatctcatcctttgtcacttgggaatttcactggcgaaattcagtgaggcacttgaggtttgtaaaygggcagacgtttcccacacgattacgtctgtatgttggaaagatatttctaagttgtagtgaggtaggagggattctcagcgagaggaggggcttgggctgaacccggcactgcygggacatgaacaggggaaacagcgttggcggtggagcaggtagacattcccttgacctcgtaagtcctggatgccacccggcgaactggcctgcgggctggaaatgatgcagctgacccagtaaacgcactcagctcaccttttagtctggtccagaacgctgaattgagctcttggatcttggtgctaaatacgtggtgtggcattaatggcagtaaagatggatggttatgtaccatgtagaacgtgcaaatctgttttcaataggctttattttttagagcagttttgggttcacagcaaaattgagcagaaggtacagagagtgcctgtatacctgctaccccaacatccagcttcccctattagtttcccttcrcaagagttatagtccacaaacctacactgacacatccttaagtctcccaagtccacagcttacattagggttcactctttttttttttttttttttaagatggagtctcactctgtcacccaggctggagtgcagtggcatgatctcggctcattgcaacctctgccacccgggttcaagcgattctcctgcctcagcctcctaagtaggtgggattacaagctcctgccaccacacccagctaatttttgtatttttagtagagacagggttttactatcttggccatgccggtcttgaactcctgaccttgtgatccacctgcctcggcctcccagagtgctgggattacaggagggttcactcttgcttttgtacattctatgggtttggacaaatgtacagacacacgtctgagaaaattgtgggtttgatttcaggccatcacataaagcaaatacggcagtaaagcaagtcacacacagtttttggtttcctagtgcatacaaagttatgtttacactgtattgccgtctgtgaatagggcagtagccttatgcctaaacaatgtacggatcttaattttaaaatattttattactgaaaaatgctaaggatcatctgagtttttagcaagtcragtcatagtctttttgcccagatgttgatggctgctgactgatgacggtggtggtggttgaaggttgaggtggtggctgcgacagtttcttaaaagaagacaacaatgaaatttgccacattgatggactcttcctttcacaaaagatttctttgtagcatgcgttgctgtttagcattttgcccacagtagracttctttcagaataggagtcagttccctcaaaccctgccacgtctttgtcaattaagtttattctgaatcctttgttgtaattttgacatgctcacagcatgttccctaggaatagattccatctcaggaaaccactttctttgctcttccatgtctttttccaggttctatcatgagtttgcagcaattcagtcacatctgtcgtctccacttctagttctcttggtgtttccaccacaactgcagttccttctccactctagtcttgaacccctcaaagtcatccatgaaggttggaatcagcttcttccacrctctggttagtgttgatattttgatcttttctgtgaatcacgaatgttcttaatggcaactgtaagggtgaattctttccagaaggatttcacttgactttgcccagatctataagaggagtcactatctatggcagttatagttttacaaaacatctttctttttttttttgagacagagtctcgctatgtcaccaggctggagtgcagtggcacgatctcggctcactgcaacctctgcatcccaggttcaaggaattctcccgcctcagcctcctgagtagctgggattgcaggcacacaccaccacgcccaactaatttttgtatttttagtagagacggggtttcaccatgttgggcaggatggtctcgatctcctgatctcgtgatctrcctgcctcggcctcccaaagtgctgagattacaggcgtgagccactgtgcctggccacaaaatgtatttcttaaacaagacttaaaggttgaaattactgcttgatccatgggctgcagaatggctgttgtgttaccaggcatggaaacagtattcacctccttgtgcatctccatcagagctcttgggtgaccaggtgtgtcatcagtgatcagtagtagtcttttgacaggagtatatattttttttccgagcagtctcaacacggacttaaaatcttcagtaaaccgtgctgtaaacagatgtgctgtcatccatgttctgttgttccatttatagagcacaggcagagtagatttaacatcattcttaagggtgctaggagtttcggaatggtaaatgagcattggcatcaatgtaaagtcaccagctgtattagcctcttacaggagaatcagactgtcctttgaggctttgaagccaagcattggcatctcctccctagcaatgatagtcctagatggcatcttcttccaatagaaggctgctgtagggtagccaccttcatcagggatctcagttagatcttctgggtaacttgctgcagcttctccatcagcacttgctgcttcaccttgcacgtttatggtatggaggtggcttcttcccttaaacctcatgagtcaacctctcctagctttcagctcctcttctgcagcttcctcacacacggttagctttcatagaattgaggagagtaagggccttgctctggattaggctttggcttaagggaatgctgcagctcatttgatcttctatccagactgctcacaccttctccgtatcagcaataaggctgtttggctttcttatcgttcatgtgttcactggagtagcacttttaatttccttcaagaacttttcctttgcattcacactcagctaactggccttcctcactaagcttaatcattatcagcttttgatttaaggtgagagatgtgccgctcctcctttcacttgaacactcagaggccattgtaaggttaccaattggcytaatttcagtatcgtggtatcgcagggaatagggaggcttgaggagagggagggagatggcagaacagccagtgagtgggggagtcagaacacacaccatgtttatccattaagtttgccattttgtatggttcatggtgctccaaaatgattagtatcatcaaagaccactgatcacagatcaccataagatataatagtgacaaagtttgaaatattgtgagaatggccaaaatgtgacatatagacatgaagtgagcacacgctgttagaaaaaatggcagtgatagacttgctcgatgtagggttgccacagaccttcagtttgtaaaaaacacagtatctgaagcatatcagtgtgaagtgcagtgaagcaagatatacgtgtctgatgaaagcatccgcctcactctgttctgggcagtgtcatatggaatagcttcgctgcccttggaattgtctgtgtgctccctgttcatccctcccaaccccgataaccactgatctttttactgtctccatcactttgcctatcccagaatgttggaatcattcagtatgtagccttttcaaattggcttctttcacttagtcctatgtatttaaggttcttccatgtcttttcatgactggagagctcatttctttttagcactgaatactgttccgttgtctggatataccacagttaatccatttgcctagatgtgtccatcatgacaaaggacatcttggttgtttcacattgtagcaattatgaataaaggtgttaggaacatttgtatgcaggtttttgtgtggacataagttttcaactcctttggataaattccaacgagtgcgctcactggactgtatagaaagtgtatgtttagttttgtaagatcctgccaaactgtcttccaaagtgtgcaagcctattttttgaccagggcggttagtcacacatagcagccacatctgttgtggtgccttcctgggaggcccctctcttttatagtcccatcagtgccaccatctgcagggtcaccagagtccctgtagggccagaagcacaagtatggctggttccttatctccctggagccctggcttcttcccacctctctccagcctcaactattttttgcctttgccctacggggactggctggcggttcttccccgcgtggctcctccccgcactgtctcggtgggagcatcgtccggccttcatgccctgtaagatgcggttcagatggcacctcctctgtgacgcccttcctctcatcctactagcccaattaaaaaaagttattatagtaaagttcaaatatatgtaagtagactcaatagtataatgaactctgcctgcccctcaccctgcctttatccgatcagcctatggtcagccctgtcctgtccatgaccaccctggaaatgggccccagaaatcatyttattttacctataaatattttagtgtgtgtctctaaaagatagtttgaactcacagtaccataaatcatacttaaaaacaattaacaagttccttaagggcatccatatttaattatcgctcaaatctccatttggttcctaaatgttatacctgtatttataatttttcttaattcaggatttatataaagttaccgactgtggttgattcatacaacctctggttcttggaaaatcggagttttcttttttccctctgcttttggtcatttcattgacttgtgcgtacaggtttttgtgaagggagctgggaatcgccttactgttttccagcctggattttgtggcttgcgtctccgtggggtagttttccatgttcctccgtgctctgtttcctgcaaatgtgaagtcgggtgtagagccttgatgagattcccatttgatttgtttcttcctctttgagggatgggcgaggctgctcgccacgtggggtctgtgctgcactcttggacctggaggcacagggcactgggtttctgtggtggaggcaaccattgatactcagtgtctgtatctcctagttctttaggctttcaacattgtaacattttaattctatctgcgagtgtaatttctttgctaggctgtttgtataaagagaactccccccacccccactatttgtttacctggtggtactgtccatgggggaaagataacacccatgtcagtttcttccttttatttatcagtttctagtcagtggtaaccagatagggctttttgcttgtttggttttatggcattatgtggacttacacatttgcatttcagcttattccagttattattattagggttcacattttcccagctttggtcagtgaaagctgcttgaggtgggccctacatcccattggcgtgattgtcatggcctttgaggaccgtgttgctgtatactgtggtaagattcccggggtcacattgtctgttcctgccccagacctggagtcagcctttcccagagagccctggttctctgtgctgggaagcgtttgcggttcgctattgggctcagggcggcctgctttcctgttcctcccctgtgccctcggcacctggccggagcatctccaagcgtctgccaccatacactgcagtcctcactagcctcttgcatgcgttgggggtgggggtgggggtgagtgggcggtgttaaaggctacacctgggattctccaggcctcagcagctggtgttgtaaggttacatagtaacagtgttaaccagcttgccctgtcttttctcaaagttccacccattcagttccaggggtccaggacgtgcctatcaggaacagcccttggatgcccttggatgcctgccttgtggatgtcatctgctcccatgtcagccatctccagggctcttcccgagaagagggcagtccccgccaagggtgttgcctctcaaacctgccaaactacaaaccctcttggtacctccacacatccctggagtcggctttggggaacactgtgttccatgtctaagtggagtcccgggcctctcccctccagtgtcgcctgtgccagctggacacgaagcagcagatcagtcatgaaaatggctgctcagctccgatctgcccttccttccgcaggactcagggacgcacagctccccagggctggtcacccaaacaacagcattcctttctcctcggcctctccccaggctgcttgggagagaaaacttccctcatcctcctccgcacacactaaatgccctgccggtatcttctttccagtgactgtggccccaggtcgtcacacatggccagacacagctgaatctcaggctagatcatgttggcactgcttccaccccttggataaaataaaattcccagtgacttccttaatattttgataggctgagtggcttatatgcaaactttgatgtaaacactaggccagaaattggttaactgtggtttaggactcctaatctttctccggatttattgaaaacatgtcttagaatggtacgcaccaagtggttctccctggtactgcatcctgctggccacgtaccctttcctgatgctcctctgaagggaggatgtttaacgcaatgatctccagccagtgtccaaatggcatagagccacttccttgttgacattccctgggatctggaggtcacttccagctctttcctcttttctgcaagagccatggtgctgcacctgcctgctgtgtgctggcacatgcctgtggggttgtgaaggctttgtatgggtccctggaccacacctgaggaggcgctgtcttagtcccgtggcgggcggtggggcaggctccctgcactggaggaagcaccagcaggcttttgtgcgtgaacagacaactctgttggctttcctgccctcccctgtttgccttcttgatttttcccttctctttttgtttctgtctccatcctggwtgcattccctcactcccctcttctttgtccctgccaggtttctgatgggttacttctttgaggaggagaaccctaccaccattccagaatactcaaggcaaggtttgaggggagaattaggcggatgtccatttcacaaggctttgtttttgccgaggagaacatcagtgtctgcctttagtaggttgccatcatcataagcaataatagctgactgtaactcagggactgtgctgggaactttccatgcccacggagtcagtcccttcagcagccccaggaggatgagtgcttttgcataccccactttgcatagatcccaaaaaggggacattgggacattgggagcatcagtaacttgctcgaggtcacacagctagaagaggggaggagggatttagaatgtatttatttatcttataacgtttattttttgatatataaatttatatttccctttgtagtttatttaaatactgttatgcttttttttttttttttttcaagggacagggtcttactctgttgcccaggctagccttgaactcttgggctcaaccattcaagcctcagcctcccgactagctgggactgtgggtttagaatttgaatccagtgttcacccttcctcctgagcggtgctgtacattatgaacaggttgtttgccaggaactgggataatgccattttcctcataaacctttgccccgcaagcatgggtagacagacagctggtgctttccttggttatatttggcaaactatataaccaaaccaaacttgattatatttggctagtggaccagttcttttgtagttggttagaaaagaaaagatatcgctttcccttgaaagaattcattctccatgagattgaggttcagaaaatctgttaaataaatcccaagccctgaggcctccaaatcagtggctgctccgctgctcctctctctccctcgacctggtctctcagtgaccccctcatcttttcaaatcatagcatgttgggacaagtgttccagggaaggcctctgtcagtgtttagcttacatttcttgggtgtatctttttgacaaaattttccccccagggataaggaaaccagaaaaccacagtggatcagcgtgcaggaatgcataagggtggctctgtgtgtgtgtgtgtgtgcatgtacatacgtgtgtgtgtgtgttcatccgtgtgtgtgtgttttccttcagagcattttaaaggtctcagctattattaacatgaatttattatctatatttaggataagcccactaaggatgatttgggatgagctgtgaatctgtggtgtatatatagatctctgcacacgcgtatagtgcatatttatgtctgcacgtactcctgggcgttgacatctgcctgtggaatgcagacatctctgtgcagggttgtggcctgtcgtctcttgattggcagttgaagtgtcccgcatccccttgttattaataacttgcttggggctacattgagttggggatgtgcagtagtgatttatcaagacattgttataaagacacaaggctggttgtaatagtctaatcagaacaagtgtattcaaagtggcgagtttcaagcatgctgtttaggagacttcacacttattttcagcgttcagaacattgttgaacctctgcttttggcatcgtggtcacagctagtctatgagccttaggagaaattatacttgccatttggtgcccactgtgagtttctgaccaagaacaaaatttccaagcttgatcacctgccttattcgtgacgcttggctccaagtggttgttagctgtttccaaaaaacaaatgtgctttagaggatgaacattatgctgttgtctctgggggccaacccgttaggggagttccagaaatattttgaatgatgacagcatcatgggaataccaagggtctccccaggggactactttgaagaggggcacatgcaggttggtcatgtctttgtgtgagttccagggttcgaaaataactgacgtatactggttgtgtatgtctgtgtgtgtgttgcccgcacagctaagtttagacaccgagctttggagacctctgagagccgactccacctttgattttcagttgtctttcattttgtacccatttggtattgtcttgcttgagcctttgtggaaatagaccttgacttcatttcttaagtcttttttactttctacgattatggaaaggaaaaatatatattttatttagaaggcaacaggtgtacttatgttcttctcctatatgatgggtagtggaaatgttttaattgccttcttttgtctactttaacctcatgatcattgcctttgtttgctagtctctcagcatgcgtggttttgaaaatgacctgcacacttagcagatgtgatacagaaaccaaacccccgaaccacactgtcaggggactctaaaaatgtgaaaacacctggttttggtttcttagtcattctgtttatttgatgaactctgtagcttcaaacgtacagctttgaccacttaatgaaagcatgtggatagtgacgtgaggatgacctgaagatatgactccctgtcctttggactaagtggcctttaaaccagtcacgtgcctggctcaactttaaaaagaagtaaagacattgtcattagatctatacaatgtcaagaatattacccggcctggatttaggtggaaatgaattaagtgcaagtactgataggtactttctggggrttaattttattattttcttctctttaattttgatgtagacatggagacagcagagggagagacaccaattcttaagcatgttgtgtgctggtgtgttgcaaaacattgctgcaagagctgtctatcacccgcaagagcccttctgacctgatctgtggtcgtactggacttgtggcaagctggaatgtccccttgtcaccagtggcgtgttaatgttactaaaaagcaaggaaaatataattgagttctccctaaatctacctgtggcatgaaaaaatctctcaggttgcatcatgtccagaaataactatggtggggcctaatgggagtaattccctggctccaggtatttggaggaggcaggcagcacttctcattggagtgatttggaaccaaggcagtacattttcctgctgttcctgaacaatctgaagttttgcagatccttggagaaataaaagccacagtcttggaacctcccaccttcttttggcctgagtccttctcatgaattcagcaaccaaaatggagtcatggggacgggtgggacctgccgtgatggtcccacctgcattacccccatggcagactagggtggtgtggcctgtctgggaatgtggtctttctctctgagaacccagctatgtggttagtaactcaggattgtggccctgtggttactgtgcactaatcagccctccaaacactggaggagcacaccctggtgtctgcaccgctggctgttttcaagagtgttgttctcttccaccaaacagcctacactcagccctgcactcagattttgctttatttgttgatgaarctggaaagagtccatktgacgtgtaacctggtctccgctaagcggttgttctctattcttgtcaaatgtgaaggcttcccaagcctggttatgcattgttggctgccaaagagggccaagtgtttgaaagtgaataccagattagagaattcataaatgaagatgcartaacccatcacacaattagagtgcaggatccctttcccacaatcagagtaacagagatgggactaaggaagttgtacaggccagagaagggagggggctgtggggagaaagaaggaatagctggttagaatgtccctgtgtttctcaaattctgcagtttcctagcgacccctccctcaggagtgtagcgaggcctggctggtgtttgacagcgtcacatattttaaattaaaggcagagtgaataaggagagatgaaaggtttactgcgtttggatcgtgagtctttcagccaagatcgtgtcttaaattttgtatcttgtaatatcgtatctgtgggatttcgtcaataatgctgacaaaatctgaagttgtacaaagggatagtgggagtttctcatcagaggtcatagattttggtgggtaagagtgctgcttgcttagaggggttttggcagctgccttcaggcagtgagaaackgttaaggtaggaaggagaacagacaacttcggcttagatgagaaattgtgagcactttccaacagtgacatcccagtactctgtttaagtgaaaagctgaactctcttaaaactctcttgccatgcctcatgtcatcatttctccaggattggaatgtgtgccactcctagaaaggattattggcagagtttcaatgtctctctcctgtctttcttttcctctcttcattccatgtgaatatacgaaggaaggtggctccccacccagtgctcagaggttgggtggaggcagcacacagacaggtagtgacccttcaagcatggggaggccagagttcagaggacggtgtgtgggctacagccaaagaggagcgaggagcagggaggccttttggaacagaaaccctgagccacacttgaagaatgatgaggttccctakatgaktgtgtgggggcaggggtgtgggggcaaccccagcagagctgtggagatggtgatgggaacttcccagagcaggagtgtggggttgctgtgctaggagagggctgtaggaacacccagagtggagacacaggcagggccagttcggcgggggcaggcacccctctgcagaatgtggaaagggcctggtgatgagtatagctgagagagggcagccatgcactttttggggcccgctggggtgctctgagagggagggatggaaggttgcaagcctggattcttgagacctggagaccagggaacagagtgacctttgtcttatatcataagggggttgcagttgaggactaacggatgccgatgcctcgagagggtttggggtgtgggaagagaggcccccgcctccatcctgcctcgcgggtagaaacatgagcgggaatgagagtggttcagaaggccatcctcccgcaggcagcctcactcacgtacctcagtctctcctcggaaaagtgtgtgcatgggattgtaatatcgcatctatgggaaatgtcaatgttgacaaaatctaaagttgtacaaagggatggtgggagtttctcattggaggtcatagattttggtgggtaagagtgttccagcccgtataaccccacgtgcacactttgctgaggagagactgaggcacgccaaggagtgactgcacccagcgcaggttcagcagtggccaggacgatagtccccttcaggatttggagtgaggagaaaaggatttatggggctgacatttgttttcagacctaaaccattcctgtaaaattgcaacctaattgctcagtctggcggtttcctcttcctggtagtgggtgaatggaggtggggggagcgtctcccctcttttttggatagatgttaatattttgcactgcttttagcacctggggaaaacccattaaacaaacgtccccccctcccattgctgcctgaggcaggggcatgtgacccacacaccctactttactcggaaacagtgactttgcagcaaccctaaatcctgctgtgagccccgcctgcgctggtgctgtgtgataaactgacacctcccccttcttctctgtggaagactctcttaatgctgtgagccccgcctgagctggtgctgtgtgataaactgacacctcccccttcatccctgtggaagactctcttaatagtgtagtttgatttcaaattcattatgaatagatttttttttttgagttggagtatcgcactctcaccaggcaggagtgcagtggcgcaatcttgcctcactgcaacctccgcctcctgggttcaagtgattctcctgcctcagcctcccaagcagctgggactacaggcatgcggcaccatgcgcagctaatttttgtatttttcgtagaggcagggtttcaccatgttagccaggatggtttcgatctcttgacctcgtgatccacccacctcagcctcccaaaatgttgggattacagatgtgagccactgtgccggccgagggttttttttttaattttaaagagctggatctatgtgagcccctcgcggtggtggttgctgtaatcctcctcagtgatacgctcccgtgctcagttcatcagaacactcctgggtgcgtgaactcttttgaggtgtgaattgttgcactgtaactcattcctcattaccacggtattgctgacgtggcatgtaagatgggatgtcttacaggccaagacggaacctcccctcagtcctccctgtgaagccagccgctgtggcccttggtgccctctgaggagccatctatcccagcggcccccaagggctgtgtgggggatgcaggcacagactgggatgatttgtcccaaatgcagcttttctttccttctctagagtttctcatcaccagctgggtggctgcaggragggtgtcygaatccttaccaatacccatgaggccagggatggtcaggcccccagaaggcctcttagtacycttctggccatctggggccatctgtcctatagcatagcctctctgtcacatcrcactcaccatgtgcaggtacttctaaatgcaagtgcgctggagaatgtgtgtgtgtgtgtgtgtggttatgaaggaaaacaggaccttcgcttgtcgtggtgtgtacaagggcaggcgtgtgttctccgatgttatatggattttgtggccctgaagccgtcagccacttggagttttggggggctctgcctcttccccgaagctctgttctgtggaggccacagagcccagcgtctgcatggctgcttattaaattcagtgggccacttgggtcttgtgcaccagggatggagccactggcttctgggttgcctctggagttgctggcttttggatagggaggtaagggagaaagtaaaacaggaatgatcttagagaagggactttcataagggtgtgtgtgtggcgggggcgggggtggttggggggaggtaggctttccttttttcccccaagctagtctctcctgagtgtcacaagagcctgagtgttggctgggaggcatctgtcttcagggccttccttgctccagtctcctcttctcttggaagttcctctttctgccagagcatcagctcaggacagccttcctaagcccccatcttcctatatgtggggtgccccgagccccatccagggcacctgcrctttctggttcagggacatctcatgcctcagcactgttgagagcagctcagcctggcactttgtggatgtttgagtcagtggagaggattttctggattatcagcaatacttccaccagctccttcttcctgaagcccccrcgacacttgtgaagcacacaccctgcttttactcagtggccaaatgccgccgctagcgacgcatcagtcattcggtgtatttcgggctctctcataattttatgatgagtttgctgttcgtttgtagtctgtttctaatctggctcattaggaattagcaaaacttgtctcttgctcaaaatagattgtgttgccaggattcaaagccaaattctgactgcagatatgctgcgaatttttctgtttctttagacttttttctttcctgtcctataacctgtttgttagtggggtagaaaatccacaaatttaactcttactattttattttttagagatgagatcttgctctgtcacccaggctagaatgcagaggcgtgatcgtagcaccctgaggcttcaaactcctgggctcaagtgatcctccctcctcagcctcctaagtagctgtgactataggtgtttgccaccatgtctggctaactttttaattttttttgtaaagatggggtcttgctgtattgcccaggctggtcttgagcttctgacctcaagtgatcttcccctctcggcctaccaaagtcctggtgttayagaagtgaaccactgcacctggctcacaaatttaactctttcaagaggaaacaatacacccaagggtccttactttttttccccccaaaattctgtcacttaaaaataaaagttcagctttcgttttagactcagggtgcatgtgcaggtttgttcatgggtattctgcatgctgctgggggttggccgagtgtccttctgctgtgactggttgacctgacactgaaaaggctgctgagttctgttagtcactcagcatcagtgcattggatctgaaaggaccacaggttgtccccaggccaagctcctggctccgcagagcaggcattgcttctgcagcttcctgtggacaggcatcacccgtctgctgaagtacgctgaacgggcacaattgcaggattactgccttgagatctgcatgacctccatgttcttacttgtagaacgtggagcccaagtctaccatccctgcagtcctctcttgtctctgaagctttgagtgagctgatgcccatcactgtggaactttgtagtcctaatacctcttgcacatgaaaatctctctgctatttgaagacctttctcatcccgccttctactaccatccatatctttcttctgtaagctaaacctctctaattgcctcacatgataagattttgagggatttcttcacctacccacagcgctgccgcagccaggcctcatgataccttagctcataatagccaccgagtggcttgggagaagcacttagcatggggtctggcacttagaaagcactcactagatgctcgtttctggacactgctgggcactggctgatgttaaggactccctgtgctcagccggttgtgaagggtttgggagcctggtgtttacccccactgttggatgaggtgcttcaaggaacaccagtttgatacagaggcagtttggggtttactagggagtcagccagcgtgagtcacgtggtatcaggaacaccgggccctggggaccgacccctgtgtctcccctaagtaggatgctcccatgcaggagcagaaggacaagcagcccggagctgctgcccggctgtgcccaaagtgggatttctgctgatcaagagtctggaatttacactccagcaggtttggaagtctcggcgacagctcctgtatgttcagtcaagcttggctgaccatggctaaaccactttaatgagtttatgggacaccagcgaagctgcaaactgggtcgggatgaaagctgagtgggcgggtgggggcttaaatgggaaagcactgggagggctggcccacacccgtgactgccctgcgtctcatgggagcagaaaggtggaggctgagcctgagacagggtaggaacccctcttaggagcctgtcaggcaccctccaacataaaaattttaaaaatttaagtattaaaaaaactaggcatctcgctagccttgagaaagaaatcaacaacctaataaacaagatagcttaaaacagtatctaaaaagctaggcacaaaacgtttgttttttttttataaaaattaaataccttaacatatgtccctgagtcgttttttagaaacctggacccccaccaaataataaatgctgtctgcagcacatagacctcgggtaacagaaaactgaggacacaactctgaccgccagttttaatttctttctgagaggcctggaggaagacacttccacaggccagatgctaacattcatttctgctgatcccaaattcctagacaaagctttgcttccttaaccaatagcaaatcaaaaaacctttgaatccacctttgacctgtgggccctgctttgagacatcccacctttctaggtcaatcccatgyagagctttcatgtattgatttatgactttgcctgtaacctctgcctccccgcctttaaaaacccttacctgtaagccatctgggagttaggtcttaagcactagccacccaattctccttgcttggcaccctgcaatttaaacctcgcactgtctcgctgctatcctgatgtcagcgtttagctccgctgcaccagccaagtagaccgaagttcggtttggtaacaagccctggagagataaggcaggggcttggctggtccaggtatggggtcctgttggaggccgaagagtgagggtcgtgatcaactcagtataccactggaggctatgtaagtaagcagcgaactgtttctcataaatgcagaatgttggcaaactgacaaactgcgtctgccacccagaagtgatgctgagggcagttatgacccagacgcaagtgtttcttatgattaggcatcattgaagcctgttagtaacaatatgaacctgtgatcaattaagcagctgaccaatcgttacctccttcctgctcttgttacccaataaataggaagggctgtagaagcttaggggggctgcctttgctcactagaagcagggtgcctttttcctcttcttcttctctcttcttccccatgctagccttcccttaaaatagttacttttgttttttgttatttctacattcatcccttcaatcagtctcgtaatgacggtctcaagtagcagtaacagtagtaactgtggcggtcagcaacagggtcctgggagtaactctcttctgatttggttttcactgccccgaaatagataggggtaggggagaccaggacgtccagcctgagaactgttaaatcacccagatttcctaagggaagaacacaccagactccttttctgtccaggggcttggtggccatctctccagctgatactgggagcgtcacagtgggatgaggctgccttccatcacagctccttgaaccctgtgaaagcccgcagaggctgagtcctgcaccccctctagttgggtctgtctcttcctttggttttcctgcagggccaggccttgctgagaatgtgagattgggagccatgaggaagggactgtactagagaggtgacatgcagactgtcttggaacttgcttgggaagaggtggaagatagtggtacataaatggaaaaggtgatctgtgcatttcttgaagcaggtacaaaccagtggttgaaagaattaaaacagccatttaaaaaaatgtgactattttgttgcaaaataaaggactgctatattagttgtttctcttctttctgaattcctgtaagaatatccgagtgtctattgtgctgtgttccttttgccctggaattgtgtttcttgagcgtgggatgagagggtaacattcttcctctgtcatcctccaccctattatagaactgatgcatattaattataaaaatacagcctagcataaggaagcaggaagaaggaacacataattcatgccgcgtaagcatccccaccacggtgccttctaggctttattctgtttggttttttaatatactcgtggtaacaatgtgttgcagtttggtttttttccctgccttgaaagttttaacactatattgtatttttacatgatctaaaaagcttttattaacattgtatggatatgtccaatctacctagctagtttggttttgtaacttatgatgaacctttttatgtaaacctttgcaatacattctttactatgtccttggaatagatttctaaaagtggaattaccgggtcagagagtttgaacatttttaaggcttttgatagatgttctcagctcttttccagaaaggttgtacaagtttacactcagaccagaagactcttttgtacctttgccacatcgttaatatttgcaaataaaatctttgtttattgcctaggtggtagttgacgtttctgtttcgatttcttttttctttttttttttttttgagacagagtctcactctgtcgaccaggctggaggctggagtgcagtggcatgatctcagctcactgcawcctccacctcccgggttcaagcaattctcctgcctcagcctccagattagctgggattataggcgcccgccaccgcgcccagctaattttttgtgtttttggtagagatgaggtttctccatgttggccaggctggtctcraactcctgacctcaggtgatccgcctgtcttggcctcctaaagtgctgggattacaggcattagcgccacacctggccttaattttgatttctttagttcccttgaactgaaaagtgtctcatgtgttacctgatcccgtagcctgcttttctcatactttgtgttagctgtttaataaatattacaaattgcaaccctttgtctatttttaggtaatattttccccacacttttccttttttttaaatagagaggagacttaactttatgtagttaaattctcatccttttgctttctggtttcctccatttcttttaagcttagaaatgcttgtctcaaccagagatcaggtaagtaatacttaattacatattactctgatacttggttggtttgcttgattttgatatttaactcttcatccacctgaatctgtttttttttttttttttggcagagtctcactctgtcaccaggctggaatgcagtggcgcaatctcagctcactgcaagctctgcctcccgggttcacgccattctcctgcctcagcctcccgaatagctgggactacaggctcatgccaccatgcccagctaatttttgtatttttagtagagacggggtttcaccacgttagccagggtggtctcaatctcctgacctcatgatccgcccgccttggcctcccaaagtgctgggattacaggtgtgagccactgcacctggcctatttggtatttttgagaagtgcagctctaagttggttttatccccttcccccaattcctaaccagttgttcaggtgagacaaccatttgttatttctttggtttcagagaagctgtatctatctatctgtggtgtatccctctcaaacctcccctcattctgggttgggcccaggaggagggtatccaacccagacctggtggagaggagcagctttttttaaggccagtagtgctcartatttataaactccttctgtatcagctcatgagacatttcacagttgtactcttcgcctgcttggctgtgtgactgagaggagctgggcgtggggtgatacagcagcgagcaggtgaggtatcggggcaagcccaccagcatctctcccgtgtcatctgcacttcagtattggattcctcccygtggacccagtgctcagaaaatccaaggccagtcttggtgctaccacttgcttagacaaatcactgagttgtctgtgtcagccagtttctccgctgtatttaagtatgatcagtgtgaactaaaaacctatttggcctgcctgttgtgaggcttaaatgagaggaagtatctgagagtgtttcaaatcatctaaagcattgccctcacataatttcaaagcaatattaatgtattaatttgagcctttaggtgctaagggttgtaagatgyaccatcattttgtcaattttaagatgcattccccatttcagagatgtcggaacaggaaaagccatgcatcctggaattggtgtttggtcctgactctcatggggggtgagaaatggtagagacagtgtcctagactcgggggtggggatgcgaggggtgtagaggaagacagtcatggatacccatattttattctctaatgatacagaatcttcattttgggccgattcctgtggctctattttctctttgtaattctactttgcgatgcatgtttcagaagagaaaccattttccagctttcttcatctcatttccgttgtgctaacagagaaactctgaattcatctgaggtgctttttacttttctttcggtgaattgtcaggcatgagccacagaagccatccgaatcaggtttctgtgtggaaatcacacggcggggaggtggaggcacaaaatgatcttaatgacatgcacatcttcctgctcccttgtggagctgagtgtggggggccctttgcagtctggcaggctcggctctggatttgaattcagtctctgccatttatcacttgagggatctcagatgaatgctctttccctttccctttccttgagacacagtctccctgtgtcacccaggctggagtgcagtggtgtggcagcctcgacctcctgggttcaagcaatcctcttgcttcaccctcctaagtagctgggactacaggtgtgcaccaccacgcctggctaactttttcattttttttytttttatagatgggggtctcactgtgttgcccaggctggtcctgaactcctggtctcaggcgagctccccatctccgcctcccaaagtgttaggattacaggcgtgagctgctgtacctggccaagtgctctctttctgatccttagttttctcttctgtaaagtgaggataaaaggatatattctggagcgttgtcaggagaattgaatgagctgcatgtgtaagccctagcagagtttcctgggtatagaggaggcacttagtcagcgtcacctccttcccatcttctcaggagttggagggtgacagagcagaggaaatttaggttttcactcttctgggggtgggtcaggtaactacgatcgaacctgcacgcattgttttagtgccacgttgattgggtcgcgcctgatcatttgcttctggtctgactgtcccagatcccygtcagcacatgtctggcaccagccatcctctgataaccctgccatagagctccaggagagagtggggcctgttcctggtggcctgagttgttgaattgtactctttagacatcgaacctaatgtttcaaaacacacattcattcgtgaggcctgtctgccgcgctttctctcccggatgtgagttccagcacatgcatgcaccccctcactgccccccatccagagccacarcctgccctgtcggaatatgtccagccctaatgagggaggcgttgtcttcagatcacacactccgcagcggctctgctctgccgcrccccttcaggagcgctgggtctgagagaggacttcagaaataacgggggcaacgttccgctttgatgctattattagaattttccaaacaccgcttgtttgtagcttcacagggacttggagagaggcgagtgggaagaggttgctgctagtgccattgtacgggaagctcaatggcatttatctggtccaaggtcattcaacaagaacaggttgaaatcaccctcagaccgaagagccggccrtctgtgcattttgcttttcccgcagttcagccgggactctgcttcacggatgctttcacctcamgsacagygaagccagacacacaggccctgcgtggttgggggcgagagcatttttccatagtcagtgggctattccgaagctaagagaccgtttccttgaaccaaaaggctgattctttcctgctggagctcctgttttcatactcatttccctggggagtggagctgaggcgtgtgsactgttcccwcccccgcctscacccaataagctttgggggagccaaatagtgcttttcaytggagcctgagtggatgcagggaggcacacatgcttcatagaagggaatcagtgatctgtcccgctgctctggggctccagcatggagcttcacgtaggctggggtggggttggttctgtgtgacagcctgcacagaggtggtggatatggccgaagccacttctgcttcatgctgtgtttgggccagatgtccttggtggctgggagggtctgctgtggaggtgcccatggtcagagagcctgcaggctgcagtggctgacctctcccctccccacctggctttgctgagagggtgcttgctgggtgttctcagctgggcagccagccgaggctgtcacagtgacaagggaggaattattttctcttcaaggggtggatgtgaattacttaattatttgcagaagtttcattgctttttacttacattctcctgattcctccccagtggaagcatcaagaccccactgcaacaggctcgtcagcatcttgtcacagctgtggatgtttgccaggctttctggacgagtccagctctagattgcaacctggtttagctacacacgttgaaaaggagaagaaaaaagtagagataagataggatttggctcaggattgatgttgtatagggtttgacttttattatctttcactcttgaaaagtgaaatatattctcctttgatttctgttgacgttgttggaaatagagatttccttcaagtctttaaacagcattattatcgtttcctaggttcttagttttgatttgttttacaagcagtagtgcttcattctaatcctcctgcatccattttacctttttctccttggaatttgttcagtgatgacttaatagaaaaaacaccttgcatgtcgttgcgtgcgtcttttccagacctctgtctgtggcctcttctcctttcatctgccattgcccaagcgttactggaaaggggtcctcatccagaccccaaaggacggttcttggatcttgcacaagaaagaattcagggtgagtccatggagtaaagtgaaagcgagtttattaagaaaataaacagggccaggcatggtggctcagagcgcctgtattcccagcaccttgggaggccaagatgggyggatcacctgaggtcaggagtaagagaccagcctggtcaacatggtgaaaccccatctctactaaaaacacaaaaattagccaggcatggtggtgcgtgcctgtaatcccagctacttgggargctgaggcaggagaatcgcttgaacccaggaggtggaggttgcagtgagctgagatcacgcctctgcaccccagcctgggcgatgcagcgagactctgtctcaaaaaaaaaaaaaaaaaaaatgaaacagaagaaagaatggccactccataggcagagcagtggcatgggcagcttgactgagtatacttatggttatttcttgatcatatgctaaataagaggtaggctttttatgagtttcstgggaaaggggcagggattttcctggaactgaaggttcctccctcttttagaccatctacggtaacttcytgacgttgccatggcatttgtaaactgtcatggcactgatgggagcgtcttttagctattgtgttataattagcatataatgagcagtgaggatgaccaggtgtggcttttgtagccatcttggttttggtgggttttggcagcttcttcactgcatcctgttttgtttatcagtgggttctttatgacctgtatctcatgctgacctcttgtcttatcctgtgactgagaacgcctaacctcctgggaatgcagccagtaggtctcagcctcattttaccctattcaagatggagtcactctggttcaaacacatctgacaygagcactcagtgtctaccctcacgggggttatggtgtgaggagaccaacaagagcttctggctttttctagctgctacttcctgttgaccattgacagccactttacccggctttggtcccctcaccttactgtttgaaaggtatctaataatccccatttcagagatttatatttaaatgaagacatttagatgagaacaatcagggtcctcttgctaaatctgaagaatcccgatgttatcgttgaagccaagtgctccttcctggccacatgtgtcccttctgatgagaagtttatccctctcggttccctgccacaacttccaagctgcatgggacacaccaagacccctcttctaggctaagacagcacagtgcagcctggagttcagggtctcagcctctgccttcagcaacgcctcactcctcctgccccatgaagggaggacggttattctgcagcagggctgctggcactgggcctggaggggagccactgtaagcctatcaggcagtccagaaccagcacctgttccactgacaacagctagaattgtaagaaaatggccaccaatggaaagagcagtagaatagtaagggattttttgttttttggtaaaattccaaggaaaatacaagcaaagcactgcgagcgtaataatttgccgttgcatggactaaggggtaaggaaggatgaactggtgtattaaaggaaatccagtttcgttcccacctatgaagattactcaggtttatggagagttgttttgctttgggctgttgcggaaataatctacttggaatgaagttctttcagctcctgggaacctttaattgtcctgtgggctggtcattcaggttgtacatccacagactcacagaattgcgtagccctgggaggaagggaccataaagatgaatcagcccagccttcctcagacatcctgcgaccaccccaggcccagagaggctgtgcctggtccaggctgccgggtccctgcgtcagctgtactggaactgtctgctgagtgcgccctcccccacggggcttctgtctgcttcttggacacccctttcttccccttgggggtcggctttttaatggccagctcacctctgcctgagaggaggaatgaatcccaaggcttgggtttaggggatggctcacctctgccagcctgtgcttcatgtttggagacaggtgatggttaaccaggcaacagtccctgccagtagtgtgtacacagacagtagtgtggctggtaggtttggccaaggcctggagttggattcctacccctgccactgcctggctccactgccctgggccaagtccctgcccttcccagtgccccagcccctggacagcagtgcctaggtgacagagagtggtccctgtcctactgaggggatgggagcacagtggagcgtgacttcccgtgaagctgctgtccgttgctatagaaatccagcctcggaaccgggagtactgtcagtggtgctcgggaaacttcccccttcctccagcctgtgcttcctggagtgacgcgctgccacagctggaggcttctctgcaaacgtgtattatggttttatcttctcccctcccacaatgagttctgtctgtgtcaagtgtttagagatcattcgaacctttctcctcacccctcccttccccttttcctcagggaaaagcttgtgcataactcagtagtaaatgaattgtctaaatcatgtagcaaaacacaaaataatgtgactcccagtagtatatgccattatacaacccagctgtacagtatttcagtgtattcagaggacctcttttccattaccaagtgatagtgtggaagggaagatacgtatcctttctagttctgaaatagctatattcttattttctctgcttttgtgtcatcattgaaaaattccagcattcgttgcaaatgtgtgtctattttgaaacaaatgacaaacgaaacaagaatgcatagatctgtaggtaaccatgcttaaagacattctgtttcttcaaggggaatgtgagtgaatgtgaattggatcaccccacaggagattagtaggaactgatttattttgttggcaacatttgttgacagtgtgtcctggagtcttaatattacagctgaaaggagagatcctgcccatcttaacactgcgcagaagggactcgtacaggctctggctccagacscgggctgggttccttactttgtttttaatccttaaaagttggtaaaatacatacatcataaaatttgctgtcttaaccatccttaaatttrcagctcagtatcctcacgcatccacagaactctttcatcttgcaaaactgaaactctgtctcattaaacactgactcccttctcccctcccctccccctggcaaccaccattctactttctgtcttcatgaatttgactcctctaggtccctcatgttagtggaatcatccagtatttatccttttgtgactggcttatttcacttagcataatgtcctcagggttcatccatgttgtagcgcgcgtcagagttttctccctatttagggctgaatattccattttatggttaggccacattttgttgatctagtcacccattgatggacacgtgggtccttatggctattgtgaatagtgctgctgtgaaatatgggtatacagatatctcttcaagaccccgctttcttttgttttccttttttttttttttttttttttgagacagggtctcgctctattgtccaggctgaagtgcgtgccacaatcatatctcactgcagcatcaaaygcctgggcttattttcccgcctctgcctcccaagtagctaggatgacaagtgcttaccaccatgccaggcaaattttttgtttgtttttttgttagagacgagagcctcactgtgttgcccaggctggtcttgaactcctggcctcaagtgatcttcctgccttggcctcccaaagtgctgggattacaggtttgagctaccacccctggccgagaccttgccaccacactgcttaataaaaggctgggctgcattttgggattaggacctcctgtggaggtggggggagggtggggaaggagaacggtggcatcccagccaggaagcatgagggatggcatccgtccaccaggccacaggaagcataagggatggcctccatccacccggccacttctttccacatcagcattcttccgcacttgggccacacagggtctgcgagaactccaggtggctcttagagtggcactgaccaagtagtctgtgtagggggactcactgtgccccccatgctcagaggctgtatggtgaagtygttaagggcccgggcttatatccagccccgccagctgatcactcttgatctggggcaagtaacttaacctctgtgtgcctctgtttcctcctttgtaaaatggggaaaaaagtagtacctacctgctagggctcttctgagggtgacctgsgttaatataattaaatatacctagtacgtgcatagtaagcaccatttaagtgtctagaacattatgggtaaaaatacgcctgtgctttggtgagtctggaagtctaaagtgtaactttcctaagctggtcgttgcctgctctgttcacctccgtaagttcgcatgctcatttgctgaatgctgtctgcatacttgctggtcagctacttcttgtcctctgtcttactgtggggcctgcgtgggaaggctgggtttttctgaacacttgcttataaattatcctccttctgttcatttaaagccagatgctctctatgtgagaattggcccgtaccctgggagaaggtttgagctctcctgggtcctgggggccagcaattccaggagagccatttccttcctgtggctgctcttcagagcagcagcctgcaggctgggcccatccctggttcaaactgtttttaggggagtgggctggagagctgcccaagtccatgtctgagcagctggtggagagaatggtgctggctcctctaggcttctggtactcctggagcctgagtccagagactgaaccttctagtccttcccttgcagtggattctgggaattggggtactgggcactgtcagccccattccctgtgagcatctgggctttgggcaaggtcctcactctctctggctttcagtttctstgtgtgaaaaatcaggggaatccgcagcctgagagcttctctggaagatgtagttattttttggtaagagatgtccagtcgtttgcagcagctgctaggaatgaaatgcagaactggagacattcgagagcagaagagcagaagcagcaacaaggtgtagtgtgtgcaggttccacagtcacacagcaccgctgcccatccttcatggggtcctgaagtcccatgcagaactgcggggtggtcctgctgaagttcttgtggatgctgctgctgacctgtaaagaggcatggcaggtgcagtaggggccraggagaaagaggtcgtctgtcggcctgaacacttccttggttttttcttggctttacgcagcatgttgcttttcacatgggaaagtgtcarycccacgctcttattaaagcattgagttcttccaggcctctgttgctgctctgataactgaaagggtattgtgcttgtctttatctgccacacgcacgtgggtgacattgatgcgccaaccagatgcccccagctgtgacaggcagaatttaactgtcgccctgctcagcgrtcaccagctcatcttgtttgtcctgatgatggtccctcctgttatttggctgtttgtcagatatcaagaattttctttgtaattaggctttaattgctaacttttaaattctaatcactttcaaaatagcactcttttaaatggaggtgacacatcttaggacattcagaacgatacctcctatatttgccagaacatattccacttacaaaagcagcacctgcgagtgcttgacagctgtgtcgtgggaggtggcttgatgcagatcctcctggccacacctggatcgggaggcagagcaggttggggtaggagacgtctccgtgctgccttctgggccacatgtcaaagagttgacactgttatttcacaaccctctccctgtatctagagtgaccatgctatttagtgtccagacctgagtgcttttgagaatgaaaggggaaatgttaataattacatggagacagtagttagtatccagaacatttgtcctgttttgtgcctgaaaccaagaaagactactacactcggcttctctataaccagaggatcacagagccagcgtcacccgcagcaccaaatgataaaagctcagagtagccggtgcctgcaygtgaagggcggtttgtgttcctcgctactggaagtaggattatggttgtaataattatgtsgacttcagtattttttccttaagaaagttttattgtgccaacatctgcaacaatagacgctgtatactcttaggtaccaagcacccaccaggatttcgccatgcttrttttgtcttttcctgtttatgcctgtgtgtgtgtggtggggagttaggggtggtagtggtgtgttttaaagcaaatctcggatgttatttttcttcttgtgatgcttacttcaaagtaagtaccactaaccttgtgccagtgttctyatgtggggcgaggattaattaaagactaagggatttgaagagcaactataaagtattaaaaagcctgggagtaggtggttgatttggggcagaggttatggtgttgctgatacagtggcttctaagcttcttgtgggaaggatgagtttatctttggcagccttcagtgatctccccgcaggccttgaggtgagatgtgtagtgatgtcaggctcctctcttgcttggtaacctacaaaccaagcaaggtgagaggcccggcggagcatcccaagggtctccygatggccactccagagctgcgtcatctgttttctgctgcagcatctgcaggctctcactcatcccgttacacttagagcgacccatgtgcctgtgggcccctcctgcctcagtaccaagactgtccttggcaccccctccccaaccccattctcagatcgccccctgtgttgcttgttagcaggcaggttccagtgcagactggccgaatctgaatttctcagtgagcgtctcagaaatctgcactgtcagctcccctgacccctaagtttrtggggtttcctggccaggcctcagactctggcagtcgggcctgggccttctgagggggtttgtcctggaaatcctgtcttcccccaarggaagctcccccaaaggaacccttttaggtgtctggtgtttgaagccagtcccccatttccctctgtttttgttgttatcacatactgtagggatggttgtaataaatacagacttttagagaatgcagccaacttggtggttctctggggattcctccrctgaggtcggggcttagacatttacacggttttcttttgccttttgagattcttatccacagctagttggttgaaagccacccaccttggcatagtgccaatgggggccttgccccgtgtggtgcctgatgcagcacagcaggacgtcaggcaagcccagacgtcaggcaggcccagaacgtcayctgtcttcttggtggcagtggttccatctggacttggaaataccatgtttgaaacaaggtccctgtaattacttaattgtaaagaaatgagaggtagcatttcggcttgcttgcctrcctgcccagcccctctgggaagtgtgcctttcaaagatgctcgccgcttgcatttttattatcctgtgattaagagagaggacgttggtccactccttgtccaggctgctttgggctgtagtggacctgcttctggtgttccttgaggttctgctttcttgtgagggttcttttttctctctgcttcttattaatctgtagctgcttatgttttttggcttggctaaaaataagcacttttccttcttcctcctgggttaggagtgaaaaagacagtctttgtatttctgctgtttggagttggatgtgagaaattgataagctaaaagactgtggttatttttcccctcccttttcatgtatctcgttagggagccctggaggaggaagctttgggaggagtcccgcgccttctctcccgcaccaggtctgagaacttgttcgcagctattcatgtcttatgtgtgcctggtcacccctcttcctctttcagttttgtttttttgttaatagctaaatcacatttctggttatttccttaatatggacagtattttcatttcctctggaggtgttgatcggaggccactgcctgcctcccttcctgacccggttggagtgaagcaggtgtgggctcagaaaagcctgcttgggaagcactcctgtgttcatttacaactcagccaccttataccaaccatacactgcacactcagtattagatgagaaaggagcaaactcggctctcagggagctggggcatttaggaaaaggaaacaaattagtatagtaagatgcattaatgaaacggcattgggactaacctggagggatggcccaggttgcagggggaggggtgggaaggagagagggcatagggtgggtgtcgtgcatgtaagtgaaatggcatgccaggggctgcacgcacctcagagcggccccacgtgttggcggggaggcgttatgctggaaacgtgacctgtgaggaggttaggtaagaaccacgcagggtcctgtatgctgcagtccagagctggctaccgcctgcactgtcagatctcggtgtctgtcccgctggccgcactgtgtgggagtcgtggcaggggacagacaggaggcaggtgggccactagagcccaggtgagaagggaagcaggccttcagctgtggcagggtgaattgggaaggaggggccagagttagagaaacaggaggcagtgtctgcatatctggctagctggtgagatgttggggatgaggggtgggcagtgccaagctgggggagatttcagaccatgattctcaaaagaatgctctctgatttgacagcatcctcaatttggaggaattacctttgtgttccttccaagatgttgtcactggactgatgaactgaaaccctttcctctggcattttctagtttccaagatcgaccgtgaattataaagacttcattttattcaacattcattgtgttcaaaccttctagctgaaagccgcctactttggggttaaggtgtgggtttgcctatattcactttgctgtccttgactcttggccaacattcctagagcccctgccacgggactgctgtgggctgagactggtgtcgcctctcccttgaaagcatggcctgctctgccgtgtgcctggcttggccactggttctcctttcctggtcccgcgggggcttttcttttcttctctgttgtaaaataatctcaggccagggccactcctggcctactcttcgattctgcgaacagtggctggctagtggtgtggccacattcccctgcagtggttgaggctaaacagtcactgttgagagaagctgccttcctcctccaagagtccctccttcctgccctgttgccctcttcccattgaaggagagcttctgtctcctgagtgagggcctcagctctgcctgtgggtcacctctggctcccagcctggaaggcattgcaggcttcatgaagagagctcgtctttagctgctatttctaagcatgattgcttgttggaggttggcagtggtagatgctcctagcacacgtccacaccttcagggcaaacgctctgtccccagacactgtccctgtttagttagtttcctaaactatgatcactcagcaacctcraggatagtcactgtattattacatacaggtgcagccctcttacatacctgtgtgtgtgtccagccccactggacacatgcctcccacttgcccacactcttccccatcccgctttaaagcttcaaatctgaaaagacagtggcgctgcgtggctgagagccacgaggtggactttaggtgaagggctgcccaccggcacaaccagatcagtggccagctcggggcgtgcacagtgcactcagagggagagccctgtggcactgcgttattttcctcctagagctgaagccagaaacctgatagggaaagggggcgttttcagggctggagtagttcagcacagtcccttcctcactgtggactccttttctaaatctgcaagtcacaggtaacctgggtgcatccaacaggtcccacagccctggaaagccctcgtttaacacaagtgctctctgtccttgctgcagaggcggctccacgccttgcttctagaggtccctcactcgccttccggagttaactccagggtgtgggtcagccttttcaaggggttttgttttctttttttttctttctttctatttttgtttttgagacaaggtttgttgcctaggctggagtgcagtggtgtgatcacagctcactgcagccttgatgtccctgggctcaggtgatcctcccacctcagccttccgagtagctgggactacaggtgtgcaccactatgcccagctaatttttgtatttttagtagagacagggtttcgctctattgcccaggctggtctcaaactcctgggcccaagagatccacccacctcaccctcccaaagtgttgggattacaggcataagccaccatacccagccccactcctccccaccttttttttaaacagggcctcgccctgtcacccaggctggagtgatcacagctcattgcagccttgacctcctgggctcaaatgattctcctgcctcagccatctgactagctgggaccacaggcacgtaccaccacgcccagctaatttttgcattttttgtagagacrgcgtttctccatattgcccaggctggtctcgaactcctgggctcaggcagtccacctgcctcagcctcccaaagtgctgagattacaggcgtgagccactgagcctrgcctacttgtttaattcttgattgcttgatttcagaaggtgctgcttctgcttttatggctcctgaagtcattttatggtcttgaccttgtctctcctggagcgggtgggaggacattgcgaggccacctarattggacttgtgtggttgagcactgggttcaggaacatccctggagggtgggtgatggttgctgcctgcttgctgttttatagggtgtttctcttacaggctgccaatagcttggtggtttgagcatcctattattgcagtgattcttaggtctggcgttgagggcagcaagatttctgcctaaacatagtccttctctgtagtagtgattctaggatgagccactgtagacaggggcatgtattgagtgcaacaagcggttgagggaccttagattttgagggtttttaaaaaccgcctgattggtttgtgtgcrtcctgccacagtgttacctaggtgggcttaatgaggtgggagtgggctttttgttttgttgttttatgcctcagccatgtaaatataaacagatacattgaatcattcaatgtccagagtgggaaattacagccaagccctcctcacttttagaatagcatggcgtgaataactgcaaaacctccctctggtctttcctgcctctttaagagttctgtctccagagactggcagagccgtctctgggcagatttgccgaattgtttcagcagggcttctccggtggccatcagatcaattgatcttgacacatggggtgcctctgagggcttctcactcttgatttaattctcagaaacgcttctcaacaccgttggtgtctttcttaattataccataatagaggttgacagccacacagtatgatggaccccagggtgaggatggctgggtgggcttgtggggctgctgaggcagagacctaggagggtgctctccattcctggatgcggagcccatgagtggcttaaaagacatgcactggctccgccctggggccaggagagccatcgcctgcttggtgactgcaaagctgcctacctccgtgtgctgccgtttttctgtaccgaagcttccctctttayctcaccataggaagcctgagatgtaacactcagaagaggcttgacaggcttggaatcaaaggcatgacttcatacatcacccaaggtgtcatatttcttctcagaaacttatatttggataaaacaaaaatcctttttcaacctttgaaacggtttccaacagctgctttaaaaagacatagtacaacaactccttccacttcctctttctgcccgctttgtttttgtccgcaacctttgcagagaagtgaatgtctctgttagagttggagttggaaattggggagggatgtgtgacttgattctgaaaggaaagtctcatctctttggtagagcatttttgttttgtttgtttgtttttagaccttaagctctacttataattctgtctaagacacctttgtggagcagttggagtgcctggctcctcattagagaatgcgctgcgacattcagcctctccttggccttctaggatggcgggaggcacagacacacactccttttcccacccagggatttggcgttcagaatgggggctttgactgcttggccctgactgtgcagttttctggatggaagcctgctgtcttctgagcacaaaggaatccatcgttttctttgcttccckaaggaatctattttcccagtggcagagcaacttagagaattcccagccagggccaccattctcaactcctcaggacgaggctggtgcacccggcatgcaggtgtctgtaactttgtgtgacttgttgaactctttcctatttaaggtgcactacctgggttgcctggagcacaatattcttcctcttgtggaaatatgttcaggatcttgtgtggtgtcctgggtttgattttatagctttgccaacataatgattacagttgacgatcaccgtggccaccgttgtcttttccctccattcccctgcagctttctggacctccgggatgtcctcctggagggaaggcccctggagaagtgtcccagtagaacgcactgttgtgtcacttgctctgaccaccgttgacatcgcagcacagcgctgcacacccgtgacagggtgatggtagaagatgagggtcggattgtccacgtagtgcckccaggaagctcaggatgatggccaagccagatatgtaaggtggctttggggcacaggatgatgccctcgaagtaatgcatggtctagttgttttgtaaacagtgctgtttcctgaagaagcaatgattttctgactacccggcctccscaagatagccctgggaggagaatttctgattctctctacagcagtgccttcttctgtaggatctccccacatgtccctgtgcccaccacgtaagctaaggaaggaaagcagagctcctcagttcattgatggcttcaactacagatgaaccagtgttacaggaaaggggtcccgatccagaccccaagagagggttcttggatctcgctcaagaaagaattcagagcaagtccgtagtgcmaagtgaaaagaagtttattacaaaagtaaaggaataaaagaatggctgttccatagacagagcagcctcgagagctgctggtcgcccatttctatggctatttcttgatgatatgctaaacaaggggtggattattcatgcctctcctttttagaccatatagggtaacttcctgacattgccatggcatttgtgaattatcatggtgctggtggaagtgtagcagtgaggacgaccagaggtcattcctgtggccatcttggttttggtgggttttggccggctcctttactgtagcctgtcttatcagcaaggtctttatgaccttattttgtgccgatctcctatctcatcctgtgacttagaatgccttaactgtctgggaatgcagcccagtaggttttagcctcattttacccaactcctattcaagatggagttgctttggctcacatgcctctgacaaaagtaaagctctcagggggctcaggctgatgggttcccttttacttctttgaatccccagtcgggcttggaaccatggcctgtaagcgcatccgacacttggctagaatctcgaacctgactctttcaaagatgagggcaaggtttttcaaattgtaagttgtgactcagtagatcatgaaactaatagaggagaataacatcagtattcatgatgaataattaamtagaaaatactggagcacatcatacatgtaagagtaggtacccttttatgacaccgtatgtggatggatgggcgtgcatgtatttatataacgtatatatttaaatacatggtttgggggatggatgtctacatcaaatttatttgttactatgggttttggcaaaaaagtttgaaagctgctaggatagtgcatagccaggagggaaataagaagaagctatgagagaactagataatccttctcctacacagactcgtgttttgtgtgagtgggacactcctcagcctgcgtccactctcaggtagcttcctctttgaaccgcttgtcattgtgaggcagtgaccatctgcgccagccctgtccttggctctaacgtgatgttcatttgctcacctttcttggacttcctttgcttcctcaggctttagcttcttgccctgctgcctgtatctatggccttctctctggctgtggtttagggaaaatcactccatctttctgtgccttcagtgtgtttgtccactgtgagtgaagcataatcaatacttggtgacttggctaaactgcgttcagtccttctgaatacttatttacattttatttattatttttatttttagagatgaggtcttaccgtgttgtccaggctggagtgcagtggcgtgatcatggctcactgtaatctcaaactcttgtgctcaagcgatcttcttatctcagtctgtggagtagctgagactataggcctgagccactgcccctggcctgaatacatttaaatgagataaaattaaatgagagaatgaaaatgaataggcccattgccatgcctgagacaaactcagatgtctgctaatgatcggttcttttctccttacatgcgggagtgtttctgtagtcagactggacacctacacacttaaacagtcattgatggggggtcagccttcaacattttaagggtctctttgcgtttttagttttatttttaatcacagtaagcacattttcatgtattagagaaaaagaaaaaacacccataatgctttctgtgtagaagcaagcattacagtggccttggtggtgttttttgaaagggctggggaattaattcatcgagaacatctgaggacgccttccagattcaccaatcatcaggcccctaagtacccttccagccccacgcccctgagttcttttcatgattccaacccagaggtctcagttgtgaaaagtttcttttgtcagacacagtgagctcagtctgtctggccgaggccactccgctcttggagatggattacagcctttgttcccactcctgggcctcctggcgtggcctcgggggcccctggttggtggcactcaccattcactctgtggaggggtctggtggaactgatatgttcataaaagctactggtaaaaacaaaacaacaacaaaaaagctactggtgcccagtgcctcttacaaactctcatgcagatttatcgtgtgggtctgtctgcgtgggtgtctaccttataaagactcagaaatggtttctcttttcacccattgtttggagaataataagtctctgtcagattagcttcttggggcctcagtgctttttgaaaagagcttgcataatcagtgtctggtgagctgtgaggccaagagcatattgccattgtgcaacggggatgtggattttgtacattttcaatatttcaccattcagtcttgtcagaagtcaagctgccgtccaccctgcacttgcagtggagacataggcccttcgtccacagtggataagtttttctccacgtgggccacattcttactagaaaagaaaccccggccctttagctcatcaycctctgctctggctttccccgagttggtacagagctgatgccgttggtgtttttaagaaataatcttgagtcagaaggaatgtgccaaaccggcacaggtgagagatctctggacccccttatatttgcctattctgccccttctgagaaatttctgggagagaaggtagtattatgggacaatraagccctaacccccaggacctcagaatgtcactttatttggagataagatctttatagatataatcaaattaaaatgtggtcgtcagcatgggctctagtatgactggtgtccttatgaaatgggggattcagacagagccagacacacgtggagggaagacagtgacaagagaatagacaacaggcaccacctctaagccaaggagagaggcctggaacagcatcttcccccatggccctcggaaggaacaaaccctgtcgccccttgagcgcagacttccagaactgtgagaaagtgtgtttctgttcctgaagcctcccagtttgtagtactttattatggcagccctggcatacttactcaggtagtctctgtcaggttatttataactcaccttatcacattggtaacttgtggttttatcatttggcatgacatccaaggccccttgcagttctaatatttacgtactagcacttaaaaagactttctctgaccacagggtctttgctggatggggtcttggtctggggctggggctttggtttccaaacatcagggtcctcccagatgaggctgccccgcgccgcatgcaccccccaccccgtttccgcgtgcagttttctgcggaagtatttcccaggtcctcggtttcccttctgtgtgagagcgtcactttctctcacatctgtggagcggaagtcctgaggcagtcaccgtttggggcctgcatggggttgtgagagcccttgtgctggctcctgcccgccctgttcttcgttggctgcctagggctccctgcaggttttcgctcggaggtgggccctgcctgcagccgctgacctccgggagagaccggcctctccctaattatagctcatctcttaatcccggtcatcatttcagctggctgtccttgaactgaaaattggaatacaattcaacctgtagctgttttaaaaactgccttattcagagagggtcaagataaagaaattttagcttctttcaggatcttccaaaacagatcaggaatgactgaatcaggacagggtstcctcctttggggctgggagggacagggcaggactctcccaggacagtcccatgggcagarctaggttttgtgaggactggagcttttgtcatttgaagaccatttctaagagaaagagtgattataamcccaaaactgggctcccaagtgcatagcacaaaggaccccacagaagatcacaaatggcccatcctgactggaagagagagattagattgagggccaggtcgtgagggcactctgagggtcgctaagacattcggcgtcaacctccagttcactcaggagttctgagtggaggacaaaagccttgctttaaaaggactaattctgtagtgattttgccacatggagaggggagggaactattgtgtcagatcaggaaaaccatgggatcagtgctaagggcctgtgtggtgggctctgtctgggtgggagagactgtgtcctggtcatggggctcagtctgtgggtgggtgatagaagagtaaagcttttgtgtttttagggtggggaagagaagagagagtcattgattttagatacaagtggaayaccacgtagacctggcctctgggtggtgatgaccttctggggttgatgtctggagacggtgcggttttgggatgggggagcagaggagggagagagagagagagagagagaaagagagagagagwgwgtgtgtgtgtgtgtgtgtgttttacagcaaagacctggatcctgaatcttggggagaaaactccttgcattgtacatattgggctggttacatggctgaagttcaccgtgtcattttaggcctgtttctggcttccacactggtttgcaatgtcatcctagggaagtcagcttgtccttggtaggatatattcattggtgagttcactcaagagactcctttttgcgtttctttaccttcaacgttcgtttcctaaaattgattattccttcataaagttgccagcattttcaacatgcttcctagatgctggatattttattatcgtttgtcacggatcaatttatttttttggcccttaaactatcacattttctgcagttaaatttgcttaactttctaatgcaggggcagaatgtaacctgcaggttgtggctttagaaagcaatgtggaactcggggccatggtaagcaagttggtggtggttttttttaatagcacayctcatcctttgatgtcagaacactgtctacacactctgattcatttcagtcagtccctaaaatgtgaagatgaaatgttggggagacagatcctctggcctgaggaagctagccgtcttgtttgggagataagaaacatcaactgttttgaaaatactttggttctatcattagagagctgatcaagtgcagtaagaggcaaggtcagactgggctgtattatgttttgatttggagaaactatcacgaaagaggtaacattgagtcagagcctgagagaattgtggagaatccctgcaggagtaaataagaccatcccaggagggctctcatttaaggcctcgtgtactgtggtcatttgaccttggttcagatgccacttcagtttagatgcatttaaaagcagagaaaacattggaacttactgtgtagtattgagtgagcattaattgagatgtgtgtgaaccattgagcatgatacctggcgtgtcgtaagcaccattatagcaaacttatagaaagctgcattatgtcactgtacacctaggggagtggctttggggggaaaaaaagcaaaaatgccaccaagtactggcaaggacatagagcagctggaactcttatcccttgccagtgggaatgcaaaatggtacaaccactttggaaaatagttgagcagtttcttataaagctaaacacatgttctcatacaacgcagtaatcccacccttagatattatccaagggaaatggaaatttatgtgctcttgggattcataatggcattattcatatttgccaaaactggaaactacgtaactgtcccacgactggggaatggatgaacaagctgtggtttgcgtacatggtggaatgcagcatgtggcgggatacctcctgcagtggaaaggagacaagcacggttcacacaatgtggatggatctctgtacattatgtgcattaagaagccaggtccaaaggctacatactgtatacttctattcatatgacattctggaaaaggcaaaaytacagagaaagcagatcaaggattgccaggggctggagaagagagttaactacaaatgtactcaggggagttttggaggatggtggcactgttctatatcttgattgtggtggtggttgcatgactatatgcagatgtcaaagctcccagatctggatactaagaagagtgaattttactgtatgtaaawtatacttttaatttaaaagcagagaaaaaaaatcataagccaagtcagggaagtgagaaggatcttgttgtatgtggagaaccgtcatggaacaggccagaactgagcacagatcaggttgaatgggtaggatgaactgtgactccagaggcattgaaagggaaatgtttgcatggggcgtggtggaacacagagagccctcgggaggcccgggtagcaggggggcaggatgaagggggcatttcgtgttgtgtgagggatgagtagcgtggggagatgaggccagaggttccagccaggaactagtgcagttctctagtctgtagataaggcctgaacacagcagttggttgtaggattctggagagactggagcttagacctgattacattatatatgcactgtcttttctcagagatggggaaactaaggcatgaaaacattaacttttattttggaaaaawgctaaacatagaagtaagagggaggcctcctgaggcactttgccaaactttatgcacagcaactatgacctgcaaaatctttttagcctgggctccctctcttgacctgagactcttccagggagcctggtatccacaagagtggaagcagctggtcagggccacggaactggagatgccccatgggacagaaggcctggggctctggcaaagtgtcttgtaagtgttcctgtcatttccctccacgtaaaccaagtcaggcttgcaaatcagcagcctttcaggtcctttctctccttctggaagctcttgcatgttgcaaccccctacccaccccgccacctcccatcacagataaagattttgtaccatcagcctgcaagtgagttggatgaatgccatctgaaaggctttgttcgtttgcacacgaggtcgtgaatagctggcaacaaagaggattgagccttggacctagtgtgtctgagcagtgccccagcccccatgccgctttggatttcagtggcctctgmagcaatttattattcttacatcagatgtttgaagtaggtgaaggggcaggtggcatgtgtctggtgaggttgctgacactgcttttggatgagagagagagtagtggttgaaacagagcattcaaaaaagcgtacactttaacctgtaatccgcaaacattcctttgagtttacccagccgtgggaaaggacgctgtacctctgccctattggctgcaccctttgctgttgatgtgaggctttatttacctgggaattgacagggttttggtcmatgattgctcctttctccgcaatcacatttaatgcccatgatatctcatctttgcacacgaaggcaaagccttctactgctttttctctgagtttattagaaggatcagaagaaagagaccctgagtgtgaggctaggtcaaccggagaaattcacccaattatttcgtttctttgtttggatccctgcttttcatttctacctattctgaaagagaggcttaaaactaaagtcctggttagttgaggatcagatgtgtcatacttttctcagaggggaggggacggtcactttgctctaagtttgggccatgaggtccacactgagcctacatggggtagggggaaaccgtgaagtgtgcagtgacctgagggtgccagatcaccccgagccgttgtggttcccactgggcaggctgtacgtggtgaaggtgatagactgcatgtctcatgcaggccaagtgcctgtcggtcagcttgagggagaagataccttgtctacctccccccacctgcaggctggctggctttgggtgcaatgaccctcctcttccttgaatcgctgtttcattgtggacctgttggaagtgccagcttggctggcctttggctggatccctgtttgctagagctttgttcctactctggaggagtcagctgctgtgccttctgggactgccaaragttgccaaggggagtggggagtcctctctgtggggtgtcgtctgaatccagcagccgcaccacccaggtgcttccctcctccccactcctaggccaatgtccttagtttctgctcactgatcagacgattatccttctccaggatgaccaccatcatctcatagtccttcctcactcccttccatgaagtgcttctccaacccattgtctctgtcatagtgaaatgattctactgttagtatcaagattttccactagtgctaataacaatccctgatgttatcaaacatgtaggatgggccaggcattgtaccaggtgtctacagaaatcctttgtgctgactgttgaccactatccccattctgtaggcgagagtgagccttaggaagggcgttggacgtggccaggatcacacaccatgccttgcactcacctctgatctctgagggccagggcctctctgtatacaatgatctctgcatctcttcttcctagcagaagactcaaaagaactttcagatgtgggaggccaaggcaggtggatcacctgaggtcaggagtttgagaccaccctggccaacatggtgaaaccccgtctctactaaaaatataaaaaaattagccggtcgtggtagtgggcgcctgtaatcccagctactcaggaagctgaggcaggagaattgcttaaacccaggagatggaggttgcggtgagccaacatggtcccactgcactccagcctgggtgactgagtgagactccatctaaaaaaaaaaaaacgaaactttcagatgaataaattggttctatcagagatggctcttaaagctcaaaagctgttttaaaaagccctgtggatgcgcaggctctcttagaccctttttctgtgttacagaaggggatataataccccaaatagggttttttttggtacaaactgtggatagtactagattttgctccatacagagtcctgttgactgaactgccctttcatgttgtgtctccagtgtttttatgggcaacagccatatacagtctacttcctatctattgtgaagttgttgttgaggatttcctgtattatttcactctgcattcatgtctcagttacctttgatccctagcaaactgtcccaagtggaatggcctaacccaggaatgatgtattatttcttacagtcctgtgactgtctgggcggtccttttgctaacttccccagggctcacgtgtgccttgtggtcaagtgatagcagcgttggctggctggtccaaggtggcctcacgtgtcctatagtatttgctagctattgtctggggctcctcaactctccacatgccccagtagcrtagaccagcttccttacaccatggtggtctcagggcagcattctaagagggcatgtccaatgtgcaggtgtgtattaagcccctccttgcctygtggttgctggcatccaattggccaaagcaaatcacatggcctagtccagaggccgactccagctgtctgtgcagacgtggcaaagaaatatggccacttccaatccactgcagtccagtccccaaaatccattcttttcatggcacattttggaatctagcagctgaatttcagtctctcttaagatactcatgactttatttggatggtgagcatatggttggttggagcacaggcttcaaagtccagcctgaattgagattctgacttgctctctgaccattgtgccttkggcgggtgactcacatccatttcttcatctgtgaaatggatatgatgatacttgccttcctgagattgttgtgaagttaattgagactatacatgaagtctctgggccataactgatctcattacaccttaattcttgtttctattacttattttacttctgtctctgggaagttcagagtttaaaaattcaacttgaccacagcatctttacttggtcatttctgcaaycaccatgttccatttcttttgtgtttctatttagatcttttgttttaagctacccaatcctttttggaataatatggggtattattaaagtaagactaaccagcaaaattctgtaaaawttaaaaaaaaaatcttggcgcttccagttcattggttttgctggtaagattcaggattatagtactgttgaacaagcttgtatagacgtgaatgagtttccacattcttatagatttgactcaagtgatctttgcagattttcacaagcactgaagactarccagccttcctttaagtctcccagcayttaattcatctggtccaacacatgccgggttcttcagggtgttaggatgaagctcctgtatctgatcacctaccatattccacacattttccatacactctttctcatcctctgagaatttagcattccgggtgatgctactaagatggatgaataatttataaagttttagaattctaaatatagttctttctagtttcccttagggttcagaaaacaatatcccaaaatgaaggcctcagaagcaaaagtttttcactttctcctgccctccagctgccagtctccttctccccaaggctgcccttagaagctagawtccctccatagaagctagaatccctcttccctaaaacaggtcctaggaaccagaacttgctttccccaaagccagccatcaaccctgaaaatgcagctctaactttccctctgccttgctatgtaaatactgtttataaaaacagtatgtgacttaactgtttgactgtaggtcataagacccacccctccactccattccagagagggtcttgccccaacccagaatgaaggaatgctgctcagagaggctgagaagaatctagatggacaggccttgctgggcttccccactcggtctgttggcattggaacctaccatttttgtccagtcacatttccacatgactgtccatactgtgttgaacttaagcatgagaatggacaatttcccctgtaactttgggtcttcattctgatggctcctgtgtgtacacattaaatcaatgtgtatgccttttctctaattaatctgactttttcgagttgagttttcagtgaaccttcagagggtgatggggaaagttctccttgacccctgcatttctaagtcagtggacacgtgaatctttggcttacagaaagataagaatcagctaaacatgttctttgaaactccgcattaaaamaacaacaacaacaacaacaaacttttgtcaaaggaattgttaaatcccccaaccttcatgtgcagtgaggtgagatccaggccccacttggaacaagttccatggagtgcgcacatcttgtgggccactggccactcctgaattccatggactccgtggggctgaggtgcagtggaaagatgagcagtgactgttcccagtgctgttgctcatcagagagcatgggatgaggtcactccggcgatctctcatgctttagcgtttccagctgtatgagggaggtgtggtgtaacttctcaggcggtygtgtggctctgggctcagtttttgttgagagccttctgtgtgtcagacactgctagcatcatcatgtatgtccttttatttaattcctccacatcacagtggatagaaaacatggttcctattgctacgagctccagagcaggaatttgaatttgccttcgaagcccgagctgctcacagcagctcactgtcttttcagctttcccatcaggatcaaatgagacgaagtgtgtggaaaggagaagcaacctttaaaagtagatcttggtaaaattactgttttctgaagttggaccagggaagctaagaggaaagagggacagtccccactgactgtcttggctgctgtgggccaggcctgtgccagtcacttggtgtcagtgagcttattggatttagctttcccaaccacatggacacggggtcagtctgtctgtcccagaactggccgggggtggtggatggagcctggactctgggccagtcacagcctgatgtgacactggatacactgcctgttagctgtgtgctcttgactttgttttttttgggagggtctcagttttgtcatcttttttttaataaaaggggtattaaataccatacctcaaagatactgtgaagaacacatacgtaactgcaatcgcacacgtgtagctcctctacaatgcctggcacttggaaaatccctggtaaatgccagttctgtgagggtggcatcactgtygctgttatttccatgttctgggttgggggcagaagggccgtcgggcccatggggaagtacccagtagaggccggtgctttgctttctctccttgtgtgtgtgattgcccgtacatgcactgtcagcacccgagttccctgtacacatttactgctaacagcggtgataagcgcacaagatcactttggtgtttgacccgtttcttggagaaagcaaagattcagtagggaaagtgatgtacatagaggagatgagcctctcagcaggcttggcggactgcatccgatcatgtgatctctttcttgcccaggacagcacggtgctctctgggccctttttcttttttttttttttagacggagtcactctgtcgcccaggctggagtccagtggtgcgatctcggctcactgtaacctctgcctcccaggttcaagcgattcttctccctcagcctcctgagtagctgggactacaggcgcccgccaccacgcctggctaattttttgtagttttagtagagaggtttcaccatgytagccaggatggtctcgatctcctgaccttgtgatccacctgcctaggcctaccaaagtgctgggattacaggtgtgagccagcacgcctggcctctcagccctytttctaattccaagggagaagggaggctacctgagattctacagtagtgcctggaccccaaaccttaaaagcagaggtcagctcacacctgtttctagaaacagcttttgtgtcccctgccccataggttcctgtagtggctttgggcagcatttggaaccactggccagataagatcccttaatgatgtgaaatactgcataaggtcgaagttccaactttaacatatctgggctaaatttttaaaactattcaacaattcatgaagataattaaagaacatgtgaaagtctgagaaggagagccaacactcatcattctccactcttaacacaatcatttttattccagtgcctttcattccaggctaatccatatggatacagatttttatatagttgtttcattgtgtacataaaactttgtctcctgctttttcatttaacgtaagcattttgcatgtggctctgtgatctttataattttaatgggcgcatagtattctttgaaggggctgttaacagaaattaacgttgtattggtgaatgttctaagtttcttctgttttttctcttataaataatgctgcagtatttgtgcataagatttattccttattttaggttagttcactgggataaatttacagaagtgagatttcttggcttaaagattttcagtcgctttctagttcttgatgttggatgccaagccaagttgctttccgataaggtttaatttacactgtgtccttttgcttttaaaataaggtagtgagacatctgcagcctggttgtgatgccaagtattgagatagtatggagaatgtcccagctgttgaaggcagagaatggacttacaaatragtggcgccagaggtaggggatctcacagcttgtccctgggtggcactggtcaacctgtcccagggcagcactcgagagggagggaggccctcggagtagccagagcccctggagagggctgrtagatgccccacagggctggaggtttctgtatggagtcctgctgtaggtcactcatattaggcatgatgtgaatgtgctccactcagctactgtgatctgattgaaataaccttttaagaaaagagcttgcaactgtggaaagaccactgttttrgatcaggttgacatggagtctgggctttgatgggactgtatgaaccrccttaacccctgtgtttacctgtctttaaagtgggctaataagccatgacagtgtcctctgcacaaatcctttgtgaaagaacaatttgtaattaataaaaaaaaaaagaccttttgaaaaaaatagattaagacaatccttatagggttttggggtaatagtcacacagctaatagctgctgaaccttgagcaaagaaaatgttaatgagaaaatgtacattttaaatgaataaaaagaaacatacagtccctatgtatttcttgtttgttaggaactttttcaggcactcctccccgcagcgtcactcatgagtttctttttcttgggtgcagatagcacacattttgcatggtgtgcctcacacggtgtttctcatctctagctactttcaccatctttctaaatatcccacgtgggtcatatcattttaccaactttgaaaggatttgtcaggcctttttcaaatgcctgctttatcagtcctgaggctgcacagccttggccttgccatggagagatggcagcaggacagtggactccggggattcagtgagcacgcggacatgtcttgtctctgccttcttgctgtgaccagtgggtgtgatgtgctggtctctgccatctgctgtctcccagggcagcttgggaaagcctctcctttcccccaacttccttgctttcttcccttttcccaaaatccagatctaattctaatggtacccaaagagaagtcaactgaagtktgaggtttctccctttgaagataaggggtaattgctgtacagagaacctcagaatgggggagaattgctgtagtgggggagtcatgaggagtaaaagagagaacatgctagtgctaggcctggggtggatgttgaataaacattagtccctctcactcacacttgggttggctgtacctgggctgtactgccaagaatttccaactctgtaatgatttgtgatgagataagtcaggggagaagcttaattacaaattttccatttcgtttgtaaccctcagccctcttggggctctttgcatatcattctgagactcttttttttttttcttggagatgctcttcaaaacagagtcaagtgttttatttttttggtggtggggggtgacagagggtctcttactctgttgcccaggctggagtgcgatgatgcgatcctggctcactgcagcctcaaactcctgggctcaggtgattctcctgcctcagcctcccaagtagctgggactacagctgtgcatccccacacctggctaatttttaaaattttttgtagaagcagggtctcaccacgttgcccaggctggtcttgagctcctgggctcaagttgtcctcccaccttggcctcccaaagtgctaggattacagtcgtgagccaccactcccagcatggagccagttctgactcagtggttacagagcaggcctaggaaggaaccagttgtatggaagttaggccctcatgggaaggatttaaccaggtggtcatgggagatggtggcacctactggtgacaaggagcattgcactttagttctgtgagacctgcttgtgggctgaggtgaagtggggaggaaagcagccttgcggggatattgacatggaggtcagggaactgccgagcgtggaggagcgccgtggtgatgggaggaaggggcggtggagcagcacgggtgtgaaatgtgcagggctgcagcctggccggctgacgaggctgcctcctgctggcctccctgcggctgctccactgtggcccttgggccccgctcatcaccaagtgctgcctgagggcttcacctctctcctcccacctttttttcttacctattggcaatgattatttttaaatttttaaaatgcaattgatttttacataaatcacatgggaaataattttctaaaataccccccccttttttttgtaaagagacattttctagtccagtgtgcagaaattcttcatttttctaaagtaaaagaacctgcttcagctgtggttgggaaacccagaacaagaagtgagctgcagttgagagagggctttgkgtgccaccccctgactggggaggcggtggactcggagcaagtgttagaaaatggagccataaaagactccttaaagtgtcgggcgctcagctaacttagggctagaattatatatcatctcttaaaggacctgctgttcttgccttcaggaatgggaagttatcaccaggagctaagagctgacctgcttcataaactcttayttagacctaggaatgaggaaaagctgcatgcgagtggcatcccttgtgctcgctttctctgggctaaaacgtttaggatggtctggcagctcttgaagagaggatggtggcgtggaatagattcctctgaggccttgcccctcctgtccccggagctgagctgattattctcattggaagattggctttcgagcatttatcaagagatttgtacctgagttttcttgaacgaagagggaggcaagagggcttaaaatttccattaaaaatgaacaggcacccaggaaatacatgattgacagatgttggcccaggagttttcagtgtagttgctttccctttaggtaaataggattatgcgcacatttttgtaattttttacaattttatttttttctagaacagttttagacttacagaaacatggggaacattgtgcagaaagttcctatatatatcataccaagtttccctgttattaaaatcttacatcagtatgattcatttattgtaaagaaccagtattgatatgttattaactaaagttctctctttattcagattttttacaacatccccttgtgttctttttctgttttaatatgttatccagaataccacattccagttagtgattatgtcttcttactgtgacatttttttagactttccttttttgttatgaccttgacggttttgaggaggcttggtcagggattttttagaatattcctcgtctggggtttgtttgatgttttttctcatgattagatgagagttatgggtttgggagaggaagaccacagaagtaaaatatgcataaatttgtaaacaagttgttgaatgagttaattatggagaggaagggaagtttagtagccctgaatagtaactggaagaggagtaaaggctggacccccagattggaagaaggcaggtttaatgttcttaatgatgggacttaatgtctaacttgtgtcatgccttatagttcaaaggggatgggatagagtggttcttacattttcatgttatatcttgggaaactgaggctcagagaagcagcctgagttgcctaaggtcatagagatagaccaggatttactggatatgccagtgcatttgcaaactattcctagttgcattttctatgcccagaggttctagactcaactggctgggtcaccgatggccatttcatctgtgcgtagctatagggatttaaataggaggatttttgttaaatgaagacaattgaccractgtgcgtggaatcaatgtgcaggatgattcaccaggctttctgcctgttagagaagttaaatggttgagaattaataattatgcgattgtagttcacgacttcagcacaagtcattgttacagttctcaaatgttgagcagccccacgttattccccaccagygtgtttttctctgaggttacacagtaaaataagtgaagtgctgacctttatcataacatattttttatttgtgagcaagtggagtatgtataaagcagtttgtgactttgaatccaaaatagaaatttgccctcctctcattttcgcagcattgagtttcataaactaagttggagcagtgaaagtgaaactggaaatgcatggatgaagccagtggttctgaacactgagaactgcctgggagcttctagaaaaacccccaaggctgggtcccattccctaaagttgtaattatattggccagggcaggaacaggccttgggaaatccaaaacttggcctttctgtcttgttcctcactctgtactctacccaggtcttcattcttaaacctttcatatcttttgattcttgcctaagtagaggttttgggagctgttgggctggagctttcaaagcttgcagtaggctgatcttacttctctacctgtattttacctgttctccctaggtgatgaaactaggagggcccatggctacttctgctacatggggcacaaaacatgcttcagaaatatttgagagactgaatgaagcctgtctctggtctctagggtatattacgttccctttctattctaatgatgagtaggaggaaagataccactctttcttgtaaaccaaactgttcttgctttcaatggggatttttattaagaagcaaaaactgatctcttttataaatgcatagataccagtgttttacacagtacaggcttctggttttaagagaacttttgccatggttcagagtgatcttactagcctagtatattggtttgttttacattgctataaaggaatacctgagactgggtaatttagaaagaaaaaaggtttatttggctcacggttctgtaggctgtacaagaaacatggcaacagaatctgcttctggtgaggacttcaggaaacttttcatcatggtagaaggtgaaggggagcaggtgtgtcacatggcaagagagtgagcaagagagagaggggaggaggtgccaggttcttttaaacaatcaaatctgtgtgaactctttcctttaccatggggagagcacaaagccatgcatgagggatccacccccatgacgcaaacacccccaccaggcctcacctccaacattggggatcacatttcaacatcagatttggaggagacagctatccagatgaaatcacctagttaactctggtgttcttttttcaggaccctttcccagtgagttaaaattaaatttgtgagtttattaataggtcacacagcctatttggaaagtaagtttttttgccttcttgtgagaagacctgaagattattcctctacactaccctggtggaacgccaaccttgaagaattagaaataagtccttctgcttctcccatgggtcactttatagggaaaatgcttgatcaggggaggtcttggtctttagcgggaaactaagtctactctgtaaaaatttgctttcgagtgaacagtattttagttagtttgtaatgtcttagctttgcagcttagcttagtcttaccttttgagaaatgggctgtgaaatataaattattacatcatttaaaaatttctggcaacctgtttttttccccaaaacttgagggttgctgtgtggattggctgtagtggtaattaccgaaaagtcatcaaataacagtgaaaactagacaactgatkagaagggaatcaagtagtcattcagatggtattttcggtaatttaatctgcctctgaccatatgttctagtcagctgaaataatttaacagtgacaacatatatttcagcaagcagagattaaaaacagcccatttattttctgttttctcccgcagtaatatttttatgtctcygttaacaaatatgatgttcgccatttaaattatatggaagcagctttggatgatttagcaatatacataacatttattctttgttattatctagttttatgtatgtaagcatgtttattttagtggtgtttcataattcaaaaatgttaccagaggtggtaattgtatttatattggacatgggtaagacatcagcgtgagatgaagccacatttttgctgcttttgtgactcaattcttgggcttccaacacctcacagcccctgccccccacccctgtcccacacaaatgactggctrggtgcagcagtctctgccactagcaagccttatggcattgataaatgtagtggttttagaatattctaaatattaaccaattttttttattatcctcctctcaaaactggaggctagtctcagctccaccaaacccgatttcacgtgagctggacatggtgacatggttcattatttcttatgaacagactgtgacagggcaacagtgagtgatttccaagactaggccataaaaggcatcaccgtgtttcccttgctcttgtatgtgccctcttcctcatattcactggggaagccagccgcctcttgggaggacacttaagcagccctactggatgggccccagtgaggaactggggcctcctggccacgtgagttacccatcttggaagcagaccccagccctaggcaaaccttcagagaacagcagccctggccgaaatctttgcagccccattagaaatcgtgggccagaaccattcagattcctgaccctcagacactgtgtgaggtaataaacatttattgttttaagctactgagttttgcagcagttgataagtcaggtagcccttctggatcctttttgccaatcctctgggaaacgaatggttggactgcacagtgccctgcacgcatagattcgatcaatagtgcctaaggggcttgctcatcttccagccactgtacctcctcatccccacggcgcctttcctcctccactcccctgaccacttgcctttggcaactgagccaagaacacttcttatttttttcttatttggatcagagacagattatactgggaatattctattaacaacgaaacctatatttacacttaattagtttccataactatttaataaactcacctattgggtttactgcttctgaaaatagtgtcatagtatttagatgtcattgctattttatgtacttagagataggatgaatttgagctgctgtgctctctgattatggcaggtaagtagacgtcgctcagccatggattcccgtctgattacactcatggccctggtttaattccatttgtgcctctgttgtgtgcatttgtaagaacaatttgggagatacatattttgaggttttaggatacataattttgaaccagattaaaatgtctaataacaataatcactaccatctggggtaagttagtaagtaggagaagacttagagttctcwttctctggcccagatgccatttacaaagggagcgaagaccacagcgctgtactttagggcatctaggtctttccagaggctgcgtgtggatgcatccaatactctagaccaaggggtgatgccaggcagggcagcagcgttctcctgtcccatgtttctcatttggttggcagggcatcctagacctctggttaaacttccctgatggaatgcagtatttggtcagagctgctgagccctcccttgtctacactttcctgaagcaccatctgtctgtggggtaatcattctgcattcactgtcaacatccctcctttgagggtggtggaaacaaagcagagatgggtctgcatcctgggaaatcaaagcgggcttacaagatcacaggctttgaattctctgcaacttttgacccagcataaaccacatcatgacttgtctaatctcagtagtttatacttgtcactaaaaagaggacctgtctgtcactgcatcagtttccccttaaaagggagaaaacacacagatctgttggtagcacagccaggataccagtggctactgggcgcaagagmcttcttcatacatttgcattcagtacatttccatttttgagcggcactgatgctagtgtaaataagtcttataatgtatgtaaatgtatgggagggggattgtaacgaaaaacttccactgcagagtaggcgaagccrgtacaatcaatctgagtaagtagggcgaggatttttttttttcagctgcatttattattgagcaactattgtaaggccaccagcgcacttggtaccataaggatacagaaggaatatgacagctttccttaccctcaaagaacctgaaatcyttttggatatcaaacatgggcgaagcaggtagcaaatgtaaaagacccccaagtgctaactgaatgtatcacctacacaagaacactgggcaggcagggacccgctgtgcaagaggcattgagcccagcctcctaatcttagagaagttagactccaacacccactgccattggcagaggcgtggctggaacccaaggctctggctccgaggccagtgctgctccccacgtgtcatgcggggtctcctcctttcctacttgtccctgcagcattggcctctcctctcccctgcactgrcacctcaccttccctgagtggtctccctcctgctcaccagtagctttaattacccggggccttttcacaaccccagatttgtgcctccatctgtttgcagatgcctcctcttggtatctcacagtagcttcatcatttccaaaccaaactcctctatatttcctagcactgcttcttaccctccccagcaactgtcttgcatttcttctcggtggacatcacacctgtgtaggaagtgctgcagtcagaaacctggggccgtctttgattcttcttccccttcgcactcctcctgctgcattgccagcccctcctagctgcacctgtctccgctctgtccctccrggacctggactgggtccagcatgccatcttcccattgctgcattactgaaatggcctcctgggctctcttgtgccctctagtctgcccccaccttatagccatagtgatatttctagaatacaggtctcagactatcctgccgcttccgtgccytcctgtttttgatctttcccttgttccatctgtctggtacacccaccaccgctagtccccattgttccttcttgcctcccttaggtctccaccgaggtaccacttccgtgtacagccttcctgggggccctgttctacgcggggcctgtgcctctgggcygttgttcmccaygcttgtctgtgggtgtctttgcacagcacaggccaagatgcctggcccctgctgtgtctctaggagctgactttcttaataccaggccaaggccttcggtaggggtggagagaagagagtgggacaagacaagcatctacagaccagtggtgggttgagtgtgggtgctccatcagccagtgaacctagtcagccatctttgtaggaatttatttctagtgaccagacataytctgagatgaatggttagtacaatgtcttaattgaactttggctatttagttgagggagggaggaagctatcttatctagaggcagtacagctaaatgactgagaccataaactccagccctgagctccccagggtgtggatccagcctcatacgaacactaaatgttcagtgccttggcttcctcacctgtaaaattggaatrgtaatagcattgcaggaagatgagcatatgtgcagtgtccagagtggggcttggcacctcgtaaatactgtgttaggcagcagtcaccatggtggttcctccttttcattgtcctcccctccccctccttcccctcctcctgtgcctcctcccctcctcgtcccctcctcgtcctcctcctccccctccctctcccctcctcctcctttccctctccccctcctcctcctcactgtcctccccctccttctccttgggggctcctcttccccttccccatttttactgtaggagcaggtatttaagatgataatctgcaggttttggcctgggagtccagaacaaaacagtcctatgtgagtgacctcctagaaatgtattcttgggtttttatgacattttgagaatcaggctcttataatttagtttaaatcgagccctagcctgtcattcccactctgacttacataaagggccagatttagctttttaccagctgcrtaacctggacaaattgcttagcctatcttatgtgtcctcattgtaagacaggaattataaaatgcaggaatgagagagggtcaatgcacaatgcttggcgcatagtaggtattcgtaaatggcagggcttgttccatctgcttggtaccttgtcatgccctaattatatgggcatgaactcaccctgcactagttttatagtaggcatcgttgattggaaggaagaagggaggttgaggartgctcaccctgcactagttttatagtaggcatcattgattggaaggaagaagggagggtgaggagtgttacctgtgggcaaatcaatcttatttgtgggcacaaaaaaaaagtttattttctgggaaaacactgatggttgacctgcaaatgtcagataatgactacagatgatgactttatttttacatgtagaaaatatgctagagtcaccagccccactggcagtgttcacttttgattttattcagctacaagtttaaatgatttgatccattagctggtgtacatagaaggccagatgctggggtgggggttgagaggtgggaattatcagccacaatgctacaatcaagcctcaaaataaaaattaatgcgtaattaaaagtctgcagagtgtgactgtggtaatttcattacttgctgatttcgtattcacatgtatctccttactttgtaaagccagttggtgggttaaattctctcaccgttgcctatctgccagggttcccgcaaaatcagtgccagtagtaaattgaaagtttctttatagccaagtaatctcaaaagccaagttataaatatatcttttcaaaacttttttgcagtaaaaattatttaaattgggatacagctgcattctaatacatttgttgcagcgtggggtaagacttgcaaaagtacatggggcacttaaaggccaggaaggtgttctgctgggtgggtggggcttggacccccggctgcagaatggtttctctcaccagcccgccaaggctacagttcytcccttcctgccattttcacggcagccctgatgtgataaacccagctgtatcgcctcattagagaagcaacggaagcaaaagctagccaagagatgggggagtcttaggcacagtttctgtctaattaccgcacctcttgagtaaaaatgcagattattggcaaagcaagttgcatttggaaaaaatgtgycatttggcccaggccctgaggtttacccttctgcagatctcactttacgttttaagtaaagaaccaaaacgtctccagtggtgaacgtgcgtgcagcacacagtccgcactggtccagaggagtgctggtggaataaacccggggagagctgggttccccgccccgcagggagggattactgttgcgtatccgcctaatcgcatctgctcaggaaaatggccagctgacaatgcttggctcacaggagtctggtgggaaaattactagccatggcttatttctgatttgggttatatacagaaacctttcttattttagtcacagaaatcagattcccagtggtggaaaatatatatttagctctgtggtcgtgcagttgttatttagtctgatttaatgttgataaattagagtaaattgtttgcccagatgagttgaataaattctgccagagcttatatcttattctgttttcacattgagtccttaatatgtatctctgtttcattggcagtcctattagagtaagtcctagaaaaagcttggtggccctaccccctgctcctgtgttagtcagtggaattaaatcatttaacactctctgaggggagctcaaaggagcccttagggagaatctggtcctaagatgtccataaaccacctaagatgtctggagagctaccttcattttaatggctttaatttaaccactctagaattatttcatttaatccactttccctatctcgcttccscaccctcacaratccccaaagccctgggagtttttggagtatttccttcccacagataagcaatacaaatataaaatgaagagagaaatgcaaacccttgggaaaggtcatgcccatacttttctccccttgcatcttgactccctaacaatttctggtgtgtggggtctttaagatgtgccctccctcctgctcatcagtgcatccccagggccaagtgttaactctcctaagactcggtatgtattgaactgatgaangaaggtgtgcttgaagaacaagtcaactcattcagtgtctttgttcccctaggaggactggaatgaaattgaccccattaaaaagaaagaccttcatcacagcaatggagaagagaaagcacaaagcatggagaccctccctccaggtactgccaggggccaggaagccatcttgctttgagcacgtgattgggagtggactgagcatggctcttggagcaggtggtctgtggggagaggctggattccataggtcagcaggagacaccgccctaaagcactgctttgccaacttccatcggacccattagtgggtggtcaagttaaaacttttataggaggtgaccaaaatgtgttgaaaagaaaataaaaatagactraagtagaaagtatatattagtatatattagttcatgaaatatttttaatagactttattttttagggcagttttagcttcagaacaaaactgaggggaaggtacagagaattcctgtatacctcctgcacccccacccccaacacacatacaacctcctccattgtcagtatcccccaacagagtggtacatttgttacaatccatgaacctgcattgacacgtcatcatcacccraagtctgtagttgacattagggttcactctcgatgttacacattctgtgggtttggacaaatgcataatggcgtttagccgccattgtagtatcatacagagtcgtttcactgccttaagagtcctccgtgctctgcccattcatcctttgctccccccagcccctggcaaccagcgatccttttgttgcctctgaagttttgcttttctagaatgtcaggcagttggaatcatagggtatgtcagcttttcagattagcttctttcactgagtaatatatatttaatatatatttattttaatatattaatatttaatatatatttaaggttcctccatgtcttttcatggctggatagctcatttcttaatgaattaacattccattgtctgggtgtattagtttgtttattcacctagtgaagracatcttggttgcttccaagttttggcaattatgattaaagctactataaatatctatgtaccagttttcgtgtagacataagttttcagctcatttgggtaaataccaaagggtatgattgctggatcatatggtaagagtatgctgagttttgtaagaaactgctaagttgttttccaaagtggctgttccattttccattcccaccacagtgagtgagggttcctrtttctctacatcctcaccagcatttggtgttgccagtgttctggatttaggccactctrataggtgtggagtagtatttcacttttgtttttatttccaattctctaatgacatatgatgttgagcatcttttcataggcttatttgccatctgtatattttcttttctgaggtgttcactccttttgcgcatttttaatccagtggttcattttcttattgttgagttttaagagtctgtatacatttaggataatcgtcctttatcagatatgggttttgtaaatgtttctcctagtctgtggcctgtcttctcattgtcttgatagtgtcctagaagattttaattgattaaaatctggcttatcaattatttccttcattgtcacgcctttggtgttttctctaaaaagtcttcaccatgacaaaaaggtcacctagattttcttctatgttatcttctatgagttttatactttggtgtatttacttatttatttgagacagagtctcactctgttgcccaagctggagtgcagtggtgaaatctcagctcattgcaacctccacctcccaggttcaagygattctcctgtttaagcctcccagtagctgggattacaggcatctgccaccaagcccagctaatttttgtatttttagtagagacagcgttttgccatgttggccaggctggtctcaaactcctgacctcaggtgatccgcccgcctcggcctcccaaagtgctggaattacagcgggagccaccacgcctggcctactttggtgttttacatttaggtctgtgattcatttggagttaattttgtgaaaagtgtaagagctgtgtctaggttcttttttttttttttttttttttttttggcatgtgagtgtccaggtcttccagaaacatttgctgaagagactctcttctctccgctttattgcctttgctcctttgtcagagatcagttggcaatattcgtatggttctatattggrgctctttatttgcttccattggtctatttttctgttattttgccactaccacactgccttgattaccatgacttcatgtaaagtcttgaagccgagtagtgttagtcacctttgttttctttcaaggtagttttagctattccagatcttttgctgttccatataaatttgtaaattttagaatcagtttgttaatatccacaaaacaacttgctgggattttggctctaattgcattgaatctatagatcaagwtgagattaactgacattttgaccatattgtcttactccccatgaatgtcaaatattttttcatttaattcttttgataccttttatcagaattttgtagttttcctcatacagaatttatacatattttgtcagatttgtacctaagtttttcattttgggagtttctaatgtaaatggtcttgtgattttcacttcacattccactcctttgttactggtatataggaaagcagttgacttttgtatattgacctcacatcttgtaaccttgctgtaattgtttattagtcctaggaaatttttgttcattgtttcaggttttctgcacagacaatcatgtgatctatgaacaaataggattttatttattttcttccaatctttatacttttttttttgtcttatttcattagctaggacttccagcacagtgttgaagaagagtggtgaggggtcatctttgccttgttcctgatcttagtgggaaagtttccagtttttcaccattaagtatgatgttagctgcaggatttttgtaggtattctatatcaagttgaggaagttctcatayattcctagtttgagaatttgtaacatgaatgggtgttggattttgtcaagtggtttttttgcatctattgatatgatcatgtgatttttcttgcttagctagtggacatgatggattacgttaatgggttttcatttgttgagccactgttgcataactggcataaatcctacttgatcatggtgtataattctctttatacattgttgaatttgatttgctttattttgttgagaattcctgcatatggtcatatgagagctattaatcagtacctttcgtttcctttttttttttttagagacagggtttcaccatgttggccaggctgatcttgaactcctgaccccaggtgatctgcctgcctcagccctcccaaagcgctgggattacaggcgtgagccagcacacccagccatacctttcttttcttaaatgtctttgtctggtttttggtattagggtaatgctggcctcatagaatgagttaggaagtatttcttctgcttctgtcttctggaagagattgtagagaattggtataatttctttctttaaatgtgggtcagaattcatcagtgaacacacctaggccaggtgctttctgtttgggaagattattaattattgattcaatttctttaatagatatgaccagttcaaattgtytatttcttcttatgtgaattttggcagagtatgtctttggaggaattggtccatttaatccagcttattgaatttatgggaatagagttgttcatactattccgtattgtccttttcatatccatgggatctrtagttatatccccactttcatttctgatattggtaaaatgtgccttttttccttttcacttagtctggttagagattcattgattttattgatattttgagagaaccagtttttgtttttgtttttttctgtattgattttctgttttcaattttattgatttctgtaataatttttagtatgtcttctacttactttggatttaactttctcctttttctagttttttcaagtagaatcttagatgattgcttttagatctttcttattttctaatgtatgcactcagtactataaatttctttggaagcactgcttttgctgcatctcacaaattttcataagttttgttttcatttttatttactttggaaatttaaaatcattttttcttgagatttcttctttgacccctgtgtcatttagaagtgcgttgtttagtctccatgtactttgggatttcccagctagctatctttctgttattgaatctagtttaattgtattgtgttctgagagcacacagtctgatttctgttcttttcaatttgttaaggtatgctttgtggcccagaatgtggyctcttttggtgaatgttccatgtgagtttgagaagaatgtgtactctgctgtttttgactgaattagtctatagatatcaattatatctagttgattgatggtgttgttgagttcaactctgtccttattgagcttcctcttgcaggatctgcccatttttgacagaggactattgaggtctcaaactataacagtgagttcatttatttctccttgcagttctatctatcatgaactgcatggacatttttatgcctcatgcatttttatgctccttttaggcacatacacattaaggattgttgtatctttttggaaaacagacttttaaaaaatcattgtgtagttctgtcttgatcccttaaaaattcctatgatctaaagtctacattgtcagaaattaatatagctattcttactttcttttgattagtgttagcatgatagatctaacttttcttggtaaaggccattctttatcattttacttttaatctatgtgtgttgttttatttatagtggatttgttgtagacaacatataattgggacttatttttcgattctcacaatcttggtattttctttggtgtatttagaccatcgatgtacacagtgattgttgatatatttaaattcatatttactatatttgttattgttttttatttattgcccttattctgtgtttgtacttttacctttcacactttttctgccttttgtcgttttaattgagctttctgtatgatcccattttctctctcttctcagcatatctattatgtgtcttaaaaaaaaattagttggtcttctttcagataacactatactttttcacaggtagtgcacgtatcttataacaacaaagtattcttgattcctccctcccatcacttatatcattgctgtcattcattttacatccacataagcatatgtatataatatataaaagaatacatgatggaatatattgttgctattattatttcaaacaacccattatatgatagttcaattaagaataagaaaaataggcgaggagcagtggctcatgcctgtaatcccagcactttgggaggccgaggcaggcagatcacctgaagtcaggagttcaagaccagcctggccaacatggtgaaaccctgtctctacaaaaaatacaaaaattagccaggtgtggtggtgcgtgcctgtaattccagccacctgggaggctgaggcagragaatcgctggaacctgggaggcggaggctgcagtgagccgagatcgtaccactattctgagcctgggtgacagagcaagactacaactcaaaaaaaaaaaaggaaaagtttttattttaccttcacttattccttctttgatgcatcctttcttcatgtagatccaggtttctgatcgatgttattttcttatgttaaaagagctgcttttaacattttttgcaaggcaggtctactggcaacaaattccctcaacttgtgtttgaggaagtctctatcccttcttcatctttgaagatcaatctttttttttttttttgcgacagagtctcgctctattacccaggctagagtgcagtggtgctatctcagctcactgcaagctctgccttctrggttcatgccattctcctgcctcagcctcccgagtagctgggactacaggcgcccaaccacacccagctaatttttttgtatttttttagtagagatggggtttcaccacattaggcaggatggtctcgatctcctgacctcgtgatccacccaccttggcctctcagagtgctgggattacaggcgtgagccaccgcgcctggcctgaagatcaatcttaaatggtacagaattctaggtggtcattttttttttctctgagccctttaaatatttccctctcctctcttctttcctgcatggtttctgagaagacattagttataatccttctctttgctcctctattgataggtaaggtgtttctttcaattttttttctttatctttgattttctrcaatttgaatatgatatgcctcagtgtagtttttggagcctttatactattctgtgtgttctctaagtttccttaatttgcgttttggtgttcaacattaatttggggaaattcttagtcattattgcttccagtatttctcctgttcctttctctctttcttctccttccratattcccatcatgcatatttacaccactgtaattgttccacagttcttggatattatttcaatttttttcatcttttttgtctttgcatttgagttttagaagtttctaatgtcatgtcctaaagtttagagatttttttcctcagcatgtcatgtctgctaatgagcccattaaagacattcctcattctctacagtgtttttgatctctagcatttccttttgattctttctcataatttccatttckctgcttacattatctgtctgttcttgtgtgttacctactttttccattagagtccctagcatattaattatagttgttttaaattcctgatctgatcattccaacattgttctatatctgagtctggttctgatacttgctgtgtctctttaaactgtgcgtgcgtgygtgygtgtgtgtgtgtgtgtgtgtgtgtgygygcgtgtgtgtgtgtgtttaacctcttagtgtgccttgtaattttatgttgaaagctggatgtgatggacttggtgcacggaaccctggtaaacaggcctttagttgtgtggtgttaaggtgtagtgggaggggaagcttgctatagtcctatgatttggtctcattcttttagggaacctttgtgtctgggctgtgagcctcacatttgcttctcagcttccccctctccacatccttaggtgatactaaagtctagcagaggctggttatttcctgttcctcagattggacaggctctgataaatgctagcagtttagtccctgtttaaatagtttctcccgatggcaggccttattaataagaacacagtgccctggcttctttcaaaatggttattttcccctctcactgttgtaagcatgaggggatatttcttcaatattcactgtgaggatctggtagagctccaggaggtaaaactcacacaaatatagctgccacacccccatgactgggtccccctggagtttttaatctcttaggcttgtccacagtgagcctccaggaattttccactacagtttaggttttcctacccccgtagtggatcttcaggggtttctacttacaggcttctgctccagtgaattgtgattccttgtattcacctgtccaatttggggggctgtggcttgtgacatttctccaacagatccaaggcagatctctaagaagtgctgatttttcattttattcagctttttactgttaggacggaataacgactttcaagctccttacatgcctattgggaactggacgtccgtttatgaagtgtttgctttgctggcaagagtgtttgctggtgagagtgtttgctggtgagagtgtttgcacgttgtgttcttgactgtggttggacaagcgtcaccccagggagtccaagcccctcctttgtgccctccccatgcgttgtcccacctacaccagatgcaggtatgtcactgtctcctccaggaactctgactggacgcatgcatgcagtcaatttgtgtgttaagtcggcctscctgtcatctttccagctcctggatgagtcatgaagccctgagccacagttctttcatatgtaaagtaaacattacccacacaatggggagcatctgaatagaatagttaatattcctttattataataataggaagctaggatacacacttctgttgtgtggattaatgagagacttcctatggattatcttctattaaaaacatacaagtgttctgatggttttcaggcaaatagagagagggagggaaaagccatcttcaggtcataggctggatttgaccattgagagtcataccttacttaaaatcatttgagtgctcacattgactctgcctttcatatccttaactattgcatacagttggttttcttatcttcaaagagatcagaatgtactgatttgcctctcttttgagttattagtagtaatttttgataaatgcacaatgtctttttattttgccaaagggctttctttcctttttatgttgaaaccatttttcttactaaaccaacatacacataatttttttgttgttagaaattattttcttgtgattgaaaaatacattttccctaagcrtgaggaacacagctaaagttttatggtttgcaagaaacygctggccatggcacttcccagtgtgtcagtggtgtgttcaggaagctcagtggcttcctgtgttctgtgtgttgggcatgtagcagttgtagacagatgggcgggaagacatgacaccaagctggatgcttttatggccacagaacccactgacagatgaaggagccagatctaacagggcagagcagtgatgttccaggccaacagtctccaattttctgatcgcacactctatgaacagacgtatatttagaccacctcccacacacatatgtattaaaatgcttacttaggaattacatgcatattgccgtacagatttattgatacattctaaatgaaatgggatagttcccttgaccccttcacaggactcagcccacagctctcagcccctcatgggaggagcagcatgcaggtgagtgggtgcaggggctggggtgagtgcttttgggcatcggcaggagtagaactctgtgcagccccccggcagcatctgggtggggctacctgtgacccctggagccctagagggcatatgttacagtgtgctcttagatttgctgtccacagatgacttaagtgttagctcagtgcaaggtcagtgtgacagccttttgcatccaccctcttggtacctgaattctcgtccggtgtccaggaagaatcaagttgtgcaaacaaattgaaggatggtgaatgtggaggactttattgagcactggaagtggctctcagtgggatgggaagctagaaagggggttaagtgggaagatggtcttcccctggagtcctgctgtccccagccaaactcttctccaaagtcctgctgtcaagctgtccctctgaaatcaagctgattctctccaacatccggctgtttcttctctccttctctattgctttgctggtagggcctgkggtttttatgggtacaagatggagggtggggcgggccggggtggttttggaaaaggcaacattcgggcaggaaaacagaaatgcatgttctcactttgggccctacggttccaggcttgagggtgtggcgtttgctagggaccactctctcctacccagtatttccctgcctcctgtttgtatcataaagtgtatttaaaataagctattataaaggatgaggaaaatacttgacaatgtctgtcattttctttctttgccccagaagattgtcttatgtggccccactttggagactaccactcttggggctgccgtggtcacaaaaacccagattattgttttaactctatttcttgccttggttcatcgtactttggggaagaatctggaatttgkataaagtataccacccaagtggcagtcccagctggaagtcatggaatggggrcaagaacaataacctgggagcacggkatctgggttcggaacaaggatgatggcygggagctctaggctcagctgtgccaccagtcctgtggccttagacaagttaaggagtatttgggttttgttttccttgtctgtaaaatttagatacattcttgctctaaaactctttgattctgttaactgtgtcttaccatttccctttaatctctattctcagattggaatcaccaattttattttctyttacatgctgtaaaaatatatctctgtagttccccccaccctcataccacatttcaggtctactgtggatgagtttttgcccataaactctgtgacccttgcttctatttcagcatcatgctttctacttggaaccactgaattttttttttcagtgttggtttttaaaatattgtcttcaaatagagtatgtatattagtcaatattttgtattttggaaatctatctgatagagaagaatgtcattttttccccttggtgtggaaaaacttctggattgaaaaataagtttctccctgtaattgtctctgaatctgaccagccagccagctggcagaaggactggcaaaggagcgggggccggaagaggagcaggggccagtagaggagtggggccggaagaggagcaggggcagctgtaggggctagaaggccraggtctgcctctgaggacagctgttgatgaggttcttgttggagatctctcaccctttggtcaacgtggccttttggagcagattttctctttgcctttatgagaccttagtgtcattcttgtattccttagtaaccttgtgtaaagggctgaggcttaggagagacgagggtagggagagagttcagaaaggagagtcctaaggccgtctggattctccttgagscccctccccatcctggtcctgggctgtgtcttcatcacagccacccctccccgatgtgctgttggttcagttaccccagacagtggatttctcagaacagaaattgctaatgttcacgtaaagatgaatgaaatgggaatgatgaaatgtgttaagagaacttaaatccagggtgtgaattgccactgatcctaacagagacgttttagcttttctacttcccacctgccggaagaaagatgagataaaccacttgtgttatttgttcagcattgctgcagcatcagagaggagtgttccccgaccctttgtttttctaggtgacttaatgggttctggcattgtgcatttatctttttaattgtggtaaaagatgcgtaacactaaagttgccattttaagcgttgttaagcatacaggtccgtggcattaagcgcattcacagtgttgtgcagtcatcaccaccatcaattagagctgttttcatcttgcaaaatggaaactgtacccatgtagtaccaatgtcccattcctccctctcccaggccctggtattcctgtttctatgaatttggttcctctgggtccctcatatgagtgcagccttacagtacttgtcctttatttctggcttgttcacttagcataactcctccaggttcacccatgttgtgggtcagaattcccttcctgtgtctctgtgaaccatgtgccctgtgatacatgtcgtgtgaggtggaaccgtgtgacacttgtggggagcgaagtctacgtagttcttcatgagccaggcctgaggccagtgatctgcacagtgttgtcataaggaaaataagtggctgtcagtgtctttagggaagcatcttttaaaaagcaagcaatgtgtgtattgtacgttttagaaattcagataagcaaaaataagaaaattatattcatacataattctaccatccagaaacaaccaccattcctctcccactgcgtgttcctccatacttgccctgggcgtatacccaggtgggtgtgctgcccccatagctgagacgaaggggtctcctctgcatgggatgcgccaagacccacgcacttgaagcctcaggccttgcacagtttcttagagttggctcctgggaccaaatgctcctgaagcatctggcctctctgacaacaggtcctgagttttatcccacattcaaagttcaatcttttcgtgaatttctatgaaaattcaggtcatccacaaggtgactagcatttcagtagatttgggggatttgctgagacgtctctccacacacgcccatctctctttcagagccccctctgggctctgactccctgatcgggggccaccctcctctctcttctctcctgaaacgggrcctttttctatgggcagttccctaccatctgcttacagctagatttttacaaatacagcactgtggtgtaccatctctgcttgggcgatatatcgggaactccttttcacatccataaacatctcctatagcattttaatggcagcaacatctcgaccgccatcggctcattgaacttattttttgttgtgggacataaagaggggttccagccagtatcctgagaggtaaatctttgtttaagtccatgattattttcttgaaatgaattcctaaaagtgaaattgcagggtcaatggcaatgcatgcattttttaatattagttgccattttatcttccacagggggcctattttcttactctagccaacattaaaaaatcttcattgtccttctcctgttccarcaagcaagaaagtggagaccaagggctgagatcagtagccagaaatgtaatggagctgtttaaaaatagttatcttaagctttattagtcgaaatacagtgtctagaagcagtcacgtgacatccagtgttctctgggctcccaccccatagctgaagtgtttagttctcttcagagcacagagtgttcagggatgctgataaactagagttagtccggctgacagtgactcagattttgaggaagcggaagcagtgtccgatgaggaacatgtgcagtaactgtggatgtttttacagaagggcttccaaggggaagtgggatcatgatgtctgaatatttgaaaggctaccatataaaagaggctgaagactttttttctctttttatttgagacttctgtttcttttatttgagcagaaattagagggaagcatttttttgtttctgttgttgttttgagacagggtctcaccaacccaggytggagtgcagtagtgcaatcatagctcactgcagcctcaaagtcctgggcttaagcagtcctcctgcttcagcctcccacacagctaggactacgggtatgtgccactgtgccagacacatttttaaaattttttgcagagacagcatctcgctatgttccccaggctgatctcaaactcctgagcccaagtgatccctattccttggcctcccaaagtgctgggatcataggcgtgagccaccgtgcccattcaggaagcagcgtttgtttttatctgaggaagcccccaccaacagttctcrctgtccagtgaaacagctgccttttgaaacggggggctccccatgctcagcacctcttcagctgtggctggacattagggactgtaatggaaagattttcacacctggagagatgatgtccacagttccttctgagtccaacaacaggtgatgccagygtttcagagacaggaacacctgctctcaaagtcagagactcagtcactccagggtggagacaggactggcactgccacctgaaagggggctgggcagctgagaactgcacaggcatgcagggttgctttttggtgtttcgcttcaattttccccacttaaaagtgagttgtcgggtgcagtggagggaacacagactgggcataattaggacctgggtttgagttgtggttccatcgtcttacagctgtgatatgttggataagtttaacttctgtgccttagtttcctaacttgtaaagcagaaaccctcatatttgacatggttatggtatggtgtggacaaggtcttgtatgaagtagcagaccaagtagtcactggttaacagatgctgtctttctctccttctgtctttttcatctgttggctgggattctgggcagtagattcactttgatattattactgatatttaggatgaaaaagaagattggtcaagaccatgtacaataggctaaatttattatggttaggtagtacaacatataacgaaaaatgaagaattttcatttcaaatttgaagaagagatataggatgattcatacatgaagatttattgcactttatcaatttgatactgttttgtggtatatttttagttgttttgatagcacagataattttaaacaaatgaaaactatttcctctataacatctgatattttcttaggttttcttttaaatagctttttatcacttctttggatttcctggtttttttgtccttaatcatggatgtgtgggattccctatttcaagagacggtttctcacaggtgaagaaaatttcctgtgataccacatatccagtgacaaataataaaacataatttatgggcctttgtaattgaaatggatctatttgtttgtaatcctggccttgtcctcgtcttttctttcatggtgtagcattatgaccttctagaggaagaatattaggattttttttcttttaagcacagtaaaattacattcaatttgagatcaaccaaataaatctgagagccttgtcctttgatattaaatacattctgtttcccttccttggctgctttcccagcggttgctctgttttacgtggggtagctttagatttgtttaagctgtctttcctggggaggatttgaatgaagagttgcagtacagcagtgaatacctgtatagaatcctgaagcctcctgcagcctgaatccactgagactctcagtttcctgcacaacgggacctgcatccaggaagatacctcccctccccttgtacacctgcgggtggtagatgacagctctttgcccaagagcatatgtcctgatctgctgctgaaggacagtcgcaactgagagtcctctaaagaccgcatttgtgcatgtgcctgtgcgtgagcctctgtgtgctggggtttgcatgcgcctctctgtgctggggtgtgcrtgcgcctctgtgtgctggggtcttcatgtgctttgtgatgttaattctttgaagggtcagttttataggtttctgtcatcttttttttttcaaatataaggtttagtaaaaacaaaaattttaagaaagaagtggcattgtttrgaaaggtagcattattttaaaccaacatttatttgaacaagtcatccaaatgcaagtagtcccctgatgacaaaagcgtctttttcaaaaagttcacttgaagattggttattaggatcccagaatgaactgtcccatggaaatggtgtcctgagtggcacttakgagcgctgtctggctgtgtctctggctgcagccaggtcctagagtgtcagccacagagctgatgctggcggggccccgagcagccttcccggggcctcagtgcctatgctcagcctccactcccaggcaccatggaccgttacagtcgccagccactctctgctcaagggacactgtcctgctctccagcctcgataagatggggagaaaagttcccaaaactaaaccaggaaaaaacagattctgaaaaggtagctataactcagagcctggtggatgggttacgggagggagaagaaattctgtacccaaggaagtagcaaagcacaaaaccttgtgccctgaatgatagcgggtgtgatgaagagtatcagtggggaggcatgccgactaagtcaaagatggggaagagaaaaaagaaaaagttgctgggcctgaagtctgtgtaacccagggagcagtggccgggtagtggctagtcaggacagtgggcagggatgcgtcctgcagaatggaccggcagacagaagtggtgggaagttcacctcccacaccagccttagggcccccttctcctgcaggggtccagagccaggacttgtcaggccaccgtaggtctgctctktctctccaggtcctggcccttctctcccagaggcagaagaattaacctgggcccatcccctctctgactgtacacattgtttttcatggctacagggataagaagggaaggccttagggccatcagtccaaaggtaatggacaaggaatctcccttcctcttgcggttagcccagcccttcaaatggactggcctccatttgccatcagacatcagatgcagctgcgaggtggccaggaggggagggacactctccccacagtgccacaggcctctgggaacagtgtcagaacaagttgcaggaacgcctgtagggcttagcaggatgttcattttcattactgaagtgcactgcttagcagcttccgggctgggcccccatccaccatagaggggagcagagagagctgtggcagcctattccagtgcgtgcggaggggtcagtgctgaagatgacaagcataggtctgtggacacgaggggaggagagagagcaagaagagcatcccagctctgcggggagaagaagtggagcctgcccgttcccattgggcctccatcttctctgtccagacttgatctccaaactgaaaagggtacagcaaacaaggttagaagggtattgaagtctgagtcaggtggagagagacaggactcattttaaacggctttcagtgaatgtgtctccaagtccggaccaaggtcaagacagggagggcacagccagaacccgagaggtggctataatttctggggagtgacttgggagtcactgaggtgccggcagagcaggaacaaacaccattgtctctgtgtttgttgctgtgttcagtggcagttagatgtggttaaacttgagctctagccttggtggaatttcaagttattagacagaagagtggaagcacttataaggccccctggcaagagggttttagaaaagctgtggttgggrtagagctctgcgtgagggggcaggaagaggcttgcagagagaggagaaagaaaagagagagggtgcagagaggcagcagctagggaccccagggagggctcctggaggaggtagccacattgagaggcagctcagctggcaggaggggtagacacatacatcgcagtggccctgccttatctgtaagtatgcacagcatcagcggtgcgggcatggctaggaagaccagctttagtaagagttcccaggtacaccttytggggttgcsgatgggactgacaaaacagtaatgaagtattagccaggttagtggaagcatggcagccttcctgagaggtgctgtgcccgcaccgccacagattccaccgtggctcctcctggaggaggagggagcgctggggaggcaccactggccacacaagccggaggtgagcagagacctggacgtgagtttggggcttgcaggggctgggctggcttggaggtgacatggcatttggctggggacaatcctcagataggggcagggccttcctgagcagggggcagatgtgcactaggctgtacacacttgcaccagggtcgtcagcctcctcactttcgtctcctgtctgagcatccttcgttccacagccagaggcacattcctggagtgcaaagtggatcagcactcatttactccaaatatcctgtgcactctagaatgtggggagtaaggttcaagtacttcagcccaggctagaggatttgcagccactgggcacagggccccctcacctcctgcctgccgtccctccctactgggtctcttctgtctctgggtgtcttctgttacatgcctcctgcatctggcaggctcctgctcacgcttcaagacccagcccaagtgccctttctccggggctttcttggaaccttggcttggttatggagctatcccatctcctcctcacttttggatggcgggtctttccagtgaggtgtttgttaatttccgtacatttgcttgggcttggcattttcactgtactgggctgttctgatcaacttggggaaaatagagggtggtggactgtttttctccaaaattaagacccaaaataaaatgtctgtcttatgaggtcacccatacattcctcaggacggcaagtgcgagacgtccctttagtattcttccaaccctaggattgagagagggtgggtgtgggtctygacaggagatgggaaggtacagctccacctggggacacaggcttctgcattcttgccccgtccagcacacaagctgctgtcagcaggcaggccccgcttctcctcatcccatccccactgagcaggagaagttccgcatctgagtgggagcccccagaggctttgtggccctcaatagccctctgggtgatgcagagagcaggagaaaatggtaaaggaaggtgcccatggcatgcacaggtgaggggcagagggctggtgcttcccgtctctgcacagtcctgagaactgggtttctcagacccagtaccgccaaggaatgtgaaaaacagcttaagtggaaaacctagggacctaactgatcatgatatggctgatagtaaaactaattttctcttagagtaggcccctggcacttccattttgtagtgggctgtgtctggactattcctctttcaagcactaacacccctggcttcagagcaagcctctcttcctccacactccacctgacatgggacctgtctcgcatctccccctgcctgaaacaagcagagaatgacattgagttgttatttccaggtgtttcttgggagcagcagatggaaatgaaaggatacaagtgtagacgtaggtgaaatcatccactggccccgccttctcacttctcacagcgctatggggagggcgggaggtactcgtgggtaacagcagggcatgaattcagtgcatccgcaggtctgtacccctgctcgcctgggcagtgcccacagsaaccccataaagaaagcagggattccctctatgcttcctgctcgcccccccggggtcagttgcagagtgggacacccctcatgggtgtcacagagggcctggtggctgggtggttcccagcagccctttctgggtgagggcatagggggttacatcagagaggcagggacattctgtttgtgttcggtcatttctgcctgtaaatatcagttaattttatagttagtagtgtaggacttttgctgtgatcatctcatttagttgttataacaaccccagaagtggaatattatttccattttatacaaaccagagtgtcagagggagtcagtgagccaggctcaccctcatgcttggattttgtgctctgtgtgtgtgtgtgcatgcgtgcgtacatgcgtgcgtgtgtgtgttctgctgctcctctgctcaagtccttgaatccttatcagtgacacagcattggcctggacccctgttggccagctctgcaccctctgttcccccgtgctccagccagcgatctgactgatggggcaggcaggctcgggagggctgacaggctttgcggtggaacacatttaaaaaatgcctgcaaacgagcgaaagaggcgtaggagtaagcgtccggcgcaagaccacagcacgtctcatatgcggctgtatcggcacgcagcgatgagatgtgtaagaactaacacgaagctgcgttcctcccagtcacgcgcaggattggattccttttcacrgtcagcctccggtaccttcgacccaggacgagaccctcagtagtaaagcccttaacaggtgcttgtggactgcgcatgtgggatgctgaggtgctgcgggcgaggctgagtctgtgaggtgaggagctccatcttcacctgggtaggaaagggagcctggagcaatacgaggagtggcgcgggcaggacagcagcccaggagagtacgaggagtggcaggggcaggaccagcagcccaggagcgtacgaggagtggcaggggcaggacagcagcccaggagagtacgaggagtggcaggggcaggacagcagcccaggagcgtacgaggagtggcaggggcaggacagcagcccaggagcgtacgaggagtggcaggggcaggacagcagcccaggagagtgagacccttgtgggcccagtgcttctcagaggacatggccatgcatgtgtggagcagggcagtctgtggggccacctgagggtttgactgggactagcgcagacctcattccagcccaggtaggtcggcatggggtcgcagacaggtgacttgttctgtctgcggaataatcagctgtaagcttctcatttttactgaatcaggggtttcaaggctggtaaggtcaaacaattccttctttggtttcaaagaccacatctaagagaagtctatcttctggaaagaaatttcctcaaaaatattttcataaccttatttaataagcaaacttttcgcagccctttttaggataatgctctctttcttttctcatgttatttaaatacctttctcatgttatttaaatgtatgttttattttcctgtcatctttggtgatgaagctagtttctgcctcctcatgtaaaatgttatatctttgaagtattttccgtcagctgcttctgcttagccaagtccactttcccgagattctcatatatttttattttctaaagctgtttaatttccagaactatttttaaagatttttaaaaagatgataaaagcacaagatgatgtatggatgacatgtcatatttttaggaaggcaatatattcagacgttttgttggttgttttgtggctgtttctctctaacctctgactcataccctactctgtgtacctctcgccatgtccctgtttgcgtggggttgggctgggacgcgtgtgccctctgcaaaccttgttctccatggattttcctgcctttgcctctgggggtagcttcaaacctagcaattctatatagtacagaaataaccaattttagtaatggttctttagcttagcgttttccaaattatgggttgtgacccatcattaggtggtgaagccagtttcgagagatacctaaaacaaaaatagaatagatctgttcctcgcatatagtgagggtaagtttggtattgtgagacttttgtatcagttgggtgtgtatgtttgcattgtgacacctgggtcacagtgttaaaagtgtgtcattgtcaagcaaacttgaaagcccctgtagtattccagtactgctaagcttttatgaaagaaatactgttgatagtctgtctctagtaaaacagctgtgtgtctcagggagattgccacaagacaaggcagggcccacaccagggtcctgttgaagacgctcctgtgtcaaaggaggcggcagggcagggtaccgctcagtaggctcatgtagtctttgggtgctgaagaaagatgatatttttgtgaagtttcaagggcttctccaagttcatttttactcatgattcaaatctcagttcagatattctttctgcagggaagccgcccctggtttcccagtctagataagattgctccattagatgcttcattyttcaccctcagagcacttagctcagtttttattgatacatttattagtatggtcatttaattcttttttttcttttttttttttttttttgagatggagtcttgcactgttgcccaggctggagtgcagtggtgcaatctcggctcactgcaacctccgcctcccaggttcaaacgattctcctgcctcagcctcctgagtagctgggattacaggcgcctgccaccacgtctggctaattttttgtatttttagtagagatggggtttcaccatgttggccaggctggtctcgaacgcctggcctcgtgatccacctgcctcggcctccccaaagtgctgggattacaggcgtgagccagtgcgcccggcctagtacagtcatttgattcttgtctgtctccctctacctcctagaacatgaagtccacagcatgggtcacgggcctgtgtgtgcttattctccctgcaggatctagcatgacacctcatgtggagtcacctagtatgcaccgcaggccagggtctgagctgccctgtgaatgactggcrttagacatcttgcaaaccctgtgctgtgatggtcttattccagaagggctgtgggggtgtgagagcacaaagagatgtatgggtggaaatgggattgaagcttctagagctgtgcagaggccttatcccatggccactgctctccttgcacacaggcccacaccaaccagagtcctcagactttgctgtccccagcacgccggtgagaagcaagtaggctgtaagcagagttacatggtaggatgaaacctctctcgggtggtggtctcttctctggctgcgcatgggactccgtcatggttctttattccatagttcaaagttccgtggtgcagggtattcaggacattaaatacgtttgttagaaccagctcattggaattctgccgtaggtgctgctggtttagattttaacaaaagcttcaaagcctcttttgtattagtccgtgaaaggataaactcactggtgaggagtagaagctgctcgctcttgagcgcaggtaggtgttatttttcttctcatccttgaaaatatatgagggtgaaggcaggaagatgaggagagagtggaggatcagtaagtatttttaggatggtctttgcacggaaaacatgtttccagtaacatgttttggaaacattttatttgcggcataagaagatgctgacaccttggcyggctcccacaggcagctgtttattggggccgtggtatcatcgctgtagccaggctcgtgggttttggaactgattttcgatttgagaggccagacttctgtgacaccccccaagcatcatttccacggcaaccagctgtgatgagatgggggttctgacctcgcaggaccattgcaacaagaagcagatgagcttttagatagaaaatttactcttctgtcttgaacaaattacatgtaactgattctcagtttcctcatctctgaaatagagaaaggaacacaatggcccttcaattgtgtaatgagggatttctgttgggaaagtagatatggaggtacacatgctattatcataccgtgttttcaaggtcaactgcacgacccaagggttgacacgctgcaaaagagctgtctcccccttgctgccctgtttcgtgtagctgccggcagccctgccttcccctctccaaccttggctctgacggccaggctcttgcttgctccttagtcacactggcctcctggctggttcctgaatgggcatgctcatgtcgacactaggacctttgcactgcggtgccctattctcccggagagttgcatgcccacaccctgcctttgttcagttatctgctcaaaatcatcttgctaggccttaccagaccaccccataaagaacaggaaccctgtactccctgcccccataacagccttatgtttcttcatggcagttccaaccactggaaattgtatgagtttcatgtgagcagggttgttggtggtgtttattattattttttagtttgtcatatctatgaagtggaacattgtaggccattaagtcctcgtgaagaaccttttgttattctatttacttattttgtaggaaacttaatttcaaacaatgaatagcgtatccgagatcatataggtggcaaatggcgaatggtgcttgattgaaacccaggttgacacagaatcataaatgttctccttgcttcaagtctgcctctccttccacctgtcttctgctgtttgagcatcctgcctttgtgcatttctctggctctgcctttattacacctgggctcatcctgacttcactcgcctagcagtgctctcctctcaatgctccttggtcgccaacactgcctctgccctagggtagagctcctcagtgcagtggtgtgttcttggagaaccttgtgcctggcattctagggttcaggccaatgccaggggacaggcaggctgccttggcttcctttcttccaggaagagaacaggtatgatgtgtgtgttaggaatggccaggcccctgctgtgcatatgaggacacctctgagagccacatccttcactttctccccgtggggtcaggcatactaacagctgcaaaaaggaccccttgacaaggtctcaccaaagggtattttgatatcctgttctttaggggttattttttgtataaacatttatttttgtgttacctgatgttacatgatggaataccttatgtgcagtttatacatgatcttcttcaccctacctgagataatgtcaacattataatccctggaaaggtgggacaagmtgagaacatctccttttatagaaaacatgaatgatgccacagttacaggtactttgatcttactttgttcactggacagatgcctgtacaccaggcctttaactttcatgctgtaaatggcaaacctgcagtttcctattctctgggttgtagacaggatgatgcttgcttgtgctgttttcagctagtttgttgtttaaaatggccactatataaagaagccatggatgtgatttctggagttaacacttactgcagtctctgtgatgagcacttggtcacattttccctcatccctaccctctgctctgctctttttagggaaagtacggtggccagactttaaccaggaagcttatgttggagggacgatggtccgctccgggcaggacccttacgcccgcaacaagttcaaccaggtggagagtgataagcttcgaatggacagagccatccctgacacccggcatgaccagtaagtaccccactaagcacctgctgcagcttcatttgctttcacacaaaccagtacgtcgctttcacctgtgacactagaacttctccattactctgggaaattgaatgtgtgttgtaaaactaggaaaaatcctgaggtatatggcaatggaacttcatccataggcagtggaaggatggttctagattcagctctagtctttaggtgccctgtggcagtgtgcagaggctgtgggtttctggccagagcgtggaagtcagaaagagagttgtgtgactggctttatatttagtgatcacttgttatttttatgatccattcacaaaaatgcaaaatttgtcattgttcccaaccttggaggaagaaaatctaaattcctgcttattgtgacagcttatattggaaatgttctaaagattagaaaggagaaatgaactacccagcacaatagatgttaaattgagcagaaacacaggagggacaggtgccacatctccacaccctgtactaaaggaagggctcttgtccacatctttctttctatttttagagatagggtctccctctatcacccaggttggaatgcagtggtgcgatcatagctcactgtaacctcaaactcttgggctcaagcaatcctcccatctcagcctcctgagtagctaggactacaggcattcaccactacatccagataatatttatttaaaattttttatttttattttttggtagaggtgaagtctctccatttgctcaggctggttttgaactcctggccttaagtgatcctcccgccttagcctcccaaagtgctggaatcacaaayatgaaccactgctctcctgacctccttctttttctttttctttttctttttttttttggagactgagtcttgctctgttgcctaggctggaatatagtgatgtgatcttggctcactgcaacctctactcctctacttcccaggttcaagcaatttgtggctcagcctcccgagtatctggaattacagctgcctgccaccacacctgactaatttttgtatttttagtagagatgggatttcaccatgttggccaggctggtctcaaactccagacctcaagtgatccgcccgcctcggcctcccaaagtgctgggattacaggcatgctccaccttgcccacccctttttattcttcaaagatcttgagagtggagggtactttggggtctatgaagctcagctcaggaggttggtaggcattttaaaaagagtatttgtcaccacttatcaggaaagtgatatgcataaccctcattgttatcccatacctgtaagtttgctgataagaaccttgattgggaggtctttcacattggaattctcagtgaattagtcttgtttcagattattaaaaaataaggagctgcattttgaaggcagctgttttcctgggtgcttggtatatcttcctgctaagttagagtcattcattcatcagtgaatggaatatagattacacatctaccatatgtcagactctgtgctcggatcctagcatttcacccagaaaaatctggtcccattccagctgctaggggtggcaggtgcaccaggaagtgaggtcgtgtagctccatgggttgggcagtctactttgcatgaatacttttgaggcactcaggagggtgggagggtcaggacaggtcccaagagcggtgaattgggtggggacacccaggaagaaggaagtgcagaagccctgccaggaaagcatggggctcccagagagccagcaagtgtctaatttcacgggctggagtttcagggattgatgggggagggagagctggagagagacaaatggccagtgaaactacattcacacacactgcatacagtgaaagaagatttttctctcttactctcaaggactttatggacagtgtaggtgccagttaactgccaggagcttcctttcttaacagctttctttgggttctagtcagctctgttcacctattccagctcatatttaagaaatatgtagctttacagtttttttagggccatggaaaagtgtgtgtgtgtgtttgtgtgttaatatctgatacatatgagtatatgtaaacatacatatcttatataatagtaagaatctcatcattttcctaactccactccaaaagattgtctttgattaatgtttcctgtcatccattaatttcttttctaaagccagctctactcagtccttatgctgtcctggttaaagtcagcttgactaactgtttagtactgtatctaaaataaggggtgacaacctggggtccaaggacctccagggagccatgcatgggctttgggatgttgtgaaagtgttgaggccgaagctgtgtgcaagatcgcaagtgtatatgtaggtgcgtttctggggacagggtccttcactttttccagagggtcccaggtgtgtacttccccaccaccagcccatccccaggctaaccaggccaagcagcccatgccaggtgcttctccggcccccacccacgtaatccacacaaccctttaagataggcttgaagcttatcttcatacacagagaggaaacggaggtgcccggaatgttgataacttgcccagtgattaagagctactgactgaagaccagaaagcgtccgtgtagcttttaagaagggcttggcctaaactcaggggaataaagtctagcagaatctagtgcagaaatcttccctgatgacttcagtcgactgcttggcatgacatctccatgagatggtctgaatttcttttcaccatgtgggttaagagctagttttcccacaagattttatctttacatacttaacttatcctgtgagctgagagaagaatggtgttctttctcatggctcatcagcatgtgggctggctttctcatctgcctcccttgcaagtccctacaaagtccccaaaactatatgtacgtatattttttttcaaagtttttgaaatatgagtttgtccaaacagatgtttgaatattcatcccacagtgtgggatgcattttaggtgggtttaattttagttccagccagtgtgtcatgttcatttgcatgtgttaaaggggcagctgggatgccttccacatttgttggatttgggctaaattaaagtctatccatagtcaattggatgcctagagctgagccgatttaatgtctcaaagtgtaagctctagaattaccattcttgttgaatgtcaggttaagaagattgggttacctctttgaatttctctcccaatatatctaatggggagctatttcagaatttgacctttctgtataaaatgttttttgtctctgcagtatctaccttcgtgttgatcaatagaaattcttgcacagtagaattcagtctttagttttgataaatctgaaagcagtacaggtggagggtaattaagaatgaggtgtttggagtcctacagacctgggttgaaaatctcagaccctccagttcttaattctgtgacctttatcatctataagatgatagaacattactccatctgtaacctatgaagattaagcaacatgtttacatgggctggttgcccctcccctgagccacctcagtgaggtatcccttgaccatcttccctaggagttcaaccccctgacccccactccaaaacttcccrtccccctttcctgcttgatttttctccacagttcctctcaccacccacacactgtgtattttacttatttttttcttccgaatagtgagttattgtatccagggttgttattcagacacctccgggcactcagtaaattcaataagtatttgctgagtgagtgaattgtttagcagagtgcctggcatatattgagtgcccaataaatcatgcaagatatgaagaatcataaaagaatacaggagaaggaaagggggatatttaagtataaaggtcctgtgaactcaagatgggccacacacaaataacctcattgtgtttgtgttctcccaggactggaaaactgcgattataatccaccccttattaccctgaaggatagatacaaggaataaggcttcagagcctcccaaacaaacagacaaacaaaaaactctgggctatgctttatttacctttctagatgtatatattgtaccaagaagaaatatttacatggaatcaggaagcacacaaaagccagctgtgagtgaaatactaaatactatgtataagatatattaggtcctcttagatattagaaagatgatagcccatcttattttttttttcttttctttctgcaaggtctcactctgtcacccaggctgcagtggtacaatttcggctcactgtagcctttccctcttgggctcaagtgattctcctgccccagcctcctgagtagctgggaccgtgggtgcgcatcatgacgctaggctaagtttttgtagagatggggtcttactgtgttgcccaggctggtctcaaactcctggcctcaagcaattctcccgccttggcctcccaaaatgctgagatagtaagtgtgagccacggcattcagccccatcctagttttgaaagcaccatttcttttctttttatttttaaattgatatatcatagttgttatctatcttggsggtacatgtgagattttgatacctgtctacaatgtgtaatgatcaagtcagggtaattgggatatccctcacctctaacagtgatctctgcatggtttctcaatttaaaaaaataatcttcttgcttggaaatttcaaataaattatcaagacttaaaagcaaattaaaccaatgggaattctgaagtttcttttttgtagtaagtgtttgttttttctctctctctctgcgttgggaagctgttcttactgtccaggcagaaggtaatggaaagtagcattggtggtggtgagaagtggtctggtgggctatattctgaaggtggggccaacaggatgtgctaatggactggaggggggtatggcttggaagagggtgccaaggattgtggctggcacaagggaagacctgcagtctcctcagctgagatatagggaggctgtgagtggagcaggtgtagggaaatgtggacatgttaatgctgctcagtgtaggtggacctgttttgtaggtggtgggatatgtgtctggtgttcaggaggaaggtcttagcgggaatgtaaatttggaaatgttcagcgtatggatggtatttaaaaccgtgaggctgggtgttaagcccaagggaatggatgcagacagaagaggcccaaggcctgagccctggacgattccaacattgagatctttagctgtgaatctggagccaacggctgacacttgaggacagtctaacactgtagattgcgtactattttaggctgtgttcccgtgatcaggagatataattttatgaagctatgcgactgtgaagctaaaaggagcctcaggggagtgtctaattcagtggttctcagccttgagctgtgccacccacccagagcgaagatggaaatgtgggggtggaggatcgggggttgttagaatacccgtggggtgctcctggcatttaccaccagggcccaatgaagccacatatttcgtatagcccaggttggtctggcacattgaagagactgtcctacccaaatggccacagggcttcctgtcaagccctcatttacttatttccccccattagttaaaaaaaaaaaagcatgttgaagttgtttttttgttttttctgttattgctctgagtcatacctgccttctccatcagccagccctcaaaagcaggttgaaagccatcacctcctgagccttgtagcccatacaggccccacaggaagtctctgtccctctgactagcagccgcatggaagtatgagtgtgttgtggactgaattgtgccccctcaagtttcttacgttgaagtcccaaaccccagagtgactgtatttggagacaggtcctttgtggaggtgattaaggttagaggaggtcctaaagggtggcgccctgatccacctgtcctacaggacaggtgtccttataggaggaggaagatggaaagagagatttttttccctaccatgtgagcacacagcagaacagggccacctgcaagccaggaagaggcctcaccaggaaccagatctgctggtaccttgagctgagcttccagcctccagagctgtgagaaatacaaatstattgttgggccaggtgcagtggctcaygcctgtaatcccagcactttgggaggccaaggcgggtgaatcgcttgagtccaggagtttgagaccagcctgggcaacatagcgaaaccccatctctacaagaaaatacaaaaattagctgggcatagtggctcacacttgtggtcccagctacwagggaggctgaagtgggaggatggcttgagcctaggaggctgagcctgcactgcacttcagcctgggtggcagagcaagaccttgtctcaaaaaaaaaaaaaaagtctattgtttaaggtcccgtctgtggtattgtcagcccaggctgactaatacagagtggaaacgatacagcatgaccggcaggccagtgggaggaccggccagccagatcctgaaatgacttgggtaacacttgccttcattttctcttaagctcttctgaagcctctccccagtgttgtctggttcagaggttcctggggtaacatccccttgatgccttctttagagtgtgctgcgcttaggaagtgagtgtcgtcaggctggagcgtttccgggatccaaactcctttccaggagggttttgattgtttttgcctggaaatgcatctgataagaaaataaagtagaggaacccaggaagtttatgaaatctctttctctctactagggaaaacttgggacagtttacattgaaattatttacagatgtaaaatgaaatcaacctttaggggggaaaccattttctttgttttcttctttcccctgtcaactagacaccgttccttttgacttgtttcattaaatcctttaaaaacaagaactgcttgktaaagaaacaggtttcctttgggtttcaaacgtttagttattagaaagcttttctctgccttgccaccactacatttaaaatgtggggttttgaaacatttttgtgtctcacgctgaaataccactgcctgaaccatttccctacaaaggaaccttctttgagaggagtgtgtccaagttgtacatctaatcggtttatctttaagtcaagaatatgttgtttttactctagttacagattatagtggctcaccctttgtttagaagaattactaaagaactctattttgaccacttttgaaatgtctgcctttaacacagccaaaacataggtcaaagctcttaagggtgtattctttwatttattttttaggggcatttaaagagggcagacattgaaggcctgggttgtgctgtttactctcactggaatgtcagtattgatatcagttgttttaagagtggctaatcaggattaaggattgtggggaaagataaaatccaaacttcccattcttattctggaagaacaaacattgctgaagccaagtgaaggttttcagcattaagtcagccagcttggagggaggctttggctaaggcaactattaggggactcagagttttctttttaggggggcagaagatctagggaaatccacacagctccccagtgggagtgtgattggagayccaggcagggctggagctttgtccttatgttgtacttctcggcagctcgcggcgtctcataaacatgcgccgctggcctcctgagattcttgtgacggaaccgctgctccatggtagagctggcccgagcacccactcctcccgcatcaatttgctgcccaactccaactctgtatgccgcaccacagggtcctggtggaggagatgggaggccacacggggtgtcacaggtggggacaggcgcttctctaggcttagctgttctggctttgttggcatttgtggccgtggggcaggtggagtttgggtgtggtgtaacagtgaatgtttaaaagcttgttcaataatcacagtaacaaagcagttcattgaacattttttggtatcaaggcccatgctcagccttttgtgtgcattaattttatttaaggctgggcacagtggctcacacctgtaatttcagctctttgagaggctgaagcaggaggatagcttgagaccaacctgggcaatatagtgagaccccatcttaaaaaamaattactctagtgtggtggtgtgcacctgtactcccagccgcttgggaggctgaaaggggagggtcactcgagcccagaagtttgtggttgcagtgagctatgatcatgctattgcactctagcctgggcaacagagtgagactctatctctaaaaataaaaaattttatttactcygcatcacactcctgtaaagtgggtagggatgctatacttctgatgatgtcgtataccagttcccagaaggctcggaactcagaccccacttccagaaagtagaagagttgcacacaggagtcaggttcggcaggatgtgagctcagtttgcagagcagaggttgtttttctcatttttcacattgtcrgttggaacatgtttggggagaggcaggcagctaggatatcccggggcctcataaggcaccaccttgtatctagagagccttagtccccagggattttacagttactaagccatgaagttttatcacttgtctatgaggcagacgagaaaggtgagccacttrcctgagttctaacagggctcactggtggaggaattggagcactctgtatcctgggctyagggttctgtctaacagttgtggctcccttactgtccgctcttcagagggtctttcatactcccggcttttaggcatgagtcttggcatgaggcctgaatgcacctaaaaaatggaagagatgggtgttggtaacttgcagccaaacaacctcctaagggaagctggccacacgttgatgggatgctgagaaatggagaagaaatggggttgtttttctttttccagcttcagattctcgaagaaaatgtattggaagagtgcactctatttctgttcccttggaacattgctgatgccgttcaggaagtgagactgcttgtgtgttcagtcagtgtgacatctctgcctgtcagtgtgacatctctgcctgctgttggaagggtgctggcaggctcagcgagatatacgagatgtggggagtgggaagtggccagcaataatggctccttgcttaacgggtcccccaccaactcatcccaggttgtaacttgcatctgatatgcacagttcacaccaaagccatgtcattattcatcagcgtgcttgtttatgttttgtttttattttttgtgtctttataaaaccaacttctggtttcaaccacagacygttctttttcttcccttgatatgtttcctctttttttttggtctatttcaggccttctctctgtctgaattaaagaatgcattgagactggtataagtagactgtattgatttgactgtagagatttcgtttgtgtcgatgttggcatctctgaagggcccgtttcaagtctccttttcaaagatcattagcaaacgtattctcaaagcttaacccctgagtggctgcccacatgtgtggctcagtttccccatctgtaactctgggttatggtttgggcaaaagcacaatgatgctaaatgagttgtgtgatttgctttctttactctttagtcttttctttctgccatcatcctgggaatgcagtgatgaccatgaggatcgtctttgttgtcaagaaactgtagtcttcccggagaggcagacaaggaaacaggcaattacgtagcctagtaaggataacctaaccacctctagaccatttacaacagagctctattctttctattttagacctgtttgtgagtttctgttattttcttagtagactggcccttttatcattatgaaatgcacttcttgtcagtggtaatgcttcttgttttacaatatcagtagagctgcaccatctttctttggtttcatgtttttgcatggtatacattttcccatgctttcactttcaaactttttatgtccttatatttaaagtgtatcttctgtaagtagcctatagttggattttggactttcatctgctgtgacaatctttatcttttatatggtgtatttagttcttttacatttaatgtaagtactagtttattggggtttaacaccaacatctcactggttgtgttctmttagttccacctgctttgtgtttctttttcccttgcatcctcctacgttttttcttctctgttggtttgctaaattcttgactagtaagtccacatgtagagcctaatgtaaatgaataattttattacttcttagacaatgcacagaccttctaataatttaccttccacttaccttcagccctttgtgctcttgttgtcatttagcttaattctttctttataaactctataggatatcttttattgttttatgcagtaaatatccttttgatttattcacatatttatattcccattgctcctcatttcttatatttctatttttctacctaagaccatattccttctgtatttcattagtatttctattagtcccagtatgttggcaatgaattgtatccttttgtttgtctgaaaacatcttaactttacttttttttttttttgagacggagtctcgctcatgttgcccaggctggagtgcagtggtgtgatctaagctcactgcaacctccgcctccccagttcaagtgattctcctgcctcagcttcccaagtaactgggattacaggcacccaccaccatacctggccaattttgtatttttagtagagactaggcttcaccatgttggccaggccggtcttgaactcctgacctcaagccatctgcccaccccagcctcccaaagtgctgggattacaggtgtgagccaccacgcccggcttacttttgtttttgaagagtcttttcactgactgtgaaattctgggttgacagtgactgtcagcacctttacgttgtctttcagttgtcttctgttttttgttgtttctggcgaaatgtctaccgttagtcttgttctttttgaagacatttgacttttccttccagctgccttttcagatatttctttttttcagcaattttgccataatatgcctagcagttgttttccttgtgctgaacctgtttgggatttgtggaatttcctgactcttgagcttcatgccttgtcagttttgccatgctgcagttctgtctcctcttcctctgagaccctaatttcatctttgttagataattctgcgtttcctctgtccctcataagctcttttctgtactttttattctttttgattccctgtgtctcagtctggatatatttctgttggcctgcttcctgttcattgatcctttcctctgctctgtctagtctgcttttaaatccactgctgaattcttcatttcagtgattgtgttttgttgtgtatgaataaataccgagatatttcagggctctcactgactttttcctccaaagaggatttagttttgttctctggcaggcagttaaaatagggcaggtcaccttaatcaagtctggaattgagctggtataaagctgggtttcggtcttttgtgagagagctggtgagtttccagttctcttttgccactaggaagtagccctgtgggattcgacctggaagtctgggatatgtatcagagcccagtttcctcagcaagccctgaagtccatttctggcctccacagctccacagcacctccagaagctttcacttggctctgcacctacaagaccatcgcttctgctcggctcagtcggccgtttggctctatgccgtttgaggggaagaggatcagagaatgttggccttcctctctaggtgcttctcctttctggaaacctgacctcacacctggctgctttgctagctctctagtgccttcaaatagattcttcagtgtatttcatcccgaatttctggttgcttttagtgagtaggttggtctacagcaaggaactttactgtcactggaagcaggaaaaacacctgagtgttttatttggaattcaaatccactctgaatttggcagtttataaattttgccctgagcartaatgtctatctcgaaggagagtaaatggaaatacaggcttgaagttgggatgtgttgcttttattaatagctcaaccagctgttagctcccagactgaggttaaaataatctctgtaaaccctgggtttcttatctgtaaaacaataatcatgcttgcctggcctgtcttacagcatttttattaggctcagatgtacacataaactacatacattaattacacaaattcaggacattaatatagtgactagtggcttgtatatatatcagctttaagtaaagaatgaactgttattttgttacactttgctctcaaaatgtgtgtgacatggctggcagactttcagcttccagtatgtgaatgcctctgtcacactgagatggtattggattgttttatcatagaaccaaaaacagttgtggaaatagctgtgaagcagtgatcctacctatttcagaaagaaattagaccaggaaaaatggagtcaacagagttttgcttgataaatgagatcaatcttcgagtcctaacaaactgtcctacttcaactatccatttaaaacccatcactttgccccccgtcgtggaaccatgaaactgaaagaacaactttctttttcagtggaagggttttgtatattttaggaaacagtcaaaatactgkaaaatttattttaactttttttgtcatttaggctacgtatttcacttgaatatggtttcggagattacttgtgatgtttctaatgaacttaaaagaagcagcattgtcagtttatggtacattcattattaagtcaaaacaccgatctgttcactggtgtaactgacaattcacatatactttggagttgtctcaccccgttgcccaagctggagtacagagatgtgatcatagctcaccgtaacaaactcctgggctcaagccatccccctgagtagctaagactacaggtgtgcgccactgtactcagctgatttaaaaaattgtttagtagagatggggtgttgctatgttgcccacactggcctcaaacccctgacctcaagtgatcctcttgcctttacctcccaaagtgctgggtttacaggcatgagccaccatgcctggcctgtactctggagttgttaaatgttaatggtagaacctatgagggcccataatctccactgccatctgtaaaatttaaagttcagacttttatagtaacgactatcttaactatattgaataagccatgattttcttcatctgacaataatgtgagaaaatccacacctctttggaaattcaagttatttaaaaaaggaaatatcccartaggaatattgtacttggatttaaagttttatattcactgaagatttatttttattcttggatttatgcatttatttagcaaagatttgagtgctaactacatgacaggwgtttttctggtcactggggaaacagctgtgaacaaaacattaaaaaaaaactctgccgtcatagagctcacattaagaggatgggggagaaaacaataaaataaatcattaattatgtggtttttaaaaagcatgttaaatacagaagagaaaaaaaaagcggtggaggttaggagtgtgaaagagtcaagggttttagtactaaacaggtgatcagggaagatctcactgacaggaaggtgtttaggcaaagacctgagggaagggacgagggagtgtgcgtttgaataactgggaagagagttctcatcaggggaggtggcaagggcaaaggccccaaagaggtagtgtgccaggcctatctaaaggacagcaggaagccagagtcgctaggcaggtggccatgaggaagagtagaaagaggtgaggtctgagaggagtcaaggcaccaagccctaggagcctggaggckcatggtaagggcattggctttgtctctgtcatagtccgttttgtgctgctataacaaaatacctgagactgggtaacttacaaagaacagaagtttacttcttatagtatggaggttgggaagtccaagatctttaagctggcagggctcacattgtctggtgagaatctggtttctgctttcaagatggcgccaagaacagtggatcttccagaggggacaaatgctgtatcctcacatggcagaaggcagaaaggcaaaaaagggacaaactcccttcattaagcccttttaaagggtcttcattcctttcacaaaggaaaagccctcattatctaatcacctcttaaaggttctgtcaccactacattggctgttaagttgcaacacctgaattttggaagagactcattcaaactgtagcagccattgagtgagatggaagccattgtaggtttgggagcagaggaacagcatgacctgaattaggcctctaaagggtcagttttttaaaaggttgctgtgataagaccaggtttactgggggtggggtgggaaatacaaggccagaagcagagaaacctgttgccgtgatccagccaagatgacagtggctaagaacaggggactaacaatggaggtggtgagaggtggttggattctggatgcctttggaaggtagagatgacaagatatgctgaatcggatgtggaatgtgaagaagagagggctgaaggatgccactgagtttcttaaccaagcaacttgaagaatggacttgtcctttgctgagcagggagcagtacaacctcctggttaaggtgtggatgctggcaccaggtctcccatgttggaatcccagttatccctttagcagctgcacgatcttggcgtgtcagttagctccttcgtgatataagttaagggtgatgataatactcatcttatgggctgccgtgtgaggactaaatgggttaacacctgtaagtgacttagcacagtggctggcacatagtcagtactaaacgaatactagctgctattcaggaagcattgctggaaagattaggagggaagttttcatccaagtggaactgtccagtaggtggatgaagatatacaaaaatctggaattcaggaggcaagcctggggagaagttacacagttgagattgtcaatgtttatggatggttttaaaatcactttgttatctatccctgaatgtgtatttttaaatgtggaggtatttctggttaccaaaataggcttaaagcaggagtccccaacccctaagccgtggaccagtggtgacacatggcctgttaggaaccaggccacgcagcaggacgtgagcagtggatgagcaaacattaccgcctgagctccgcctcctgtcagatcagcatgggcattagattctcataggagcacgaaccctaytgtgaactgcacatgcaagggatctgggttgtgtgctccttattagaatctaatgcctgatgatctgaggtggaacagtttcatcccaaaccatctcccctctccaccatctgtagaaaaattgtcttccatgaaactgttccttggtgccaaaaaggttggggaccgctggcttaagggacactgggtttgttatctgttgcctcttctttatgatgatgattgaatttcctctggcatctttgccatggccctttaaaccaaatcttttttattcttggtaattctttaagtgcaaaggccaaggtacttgttcttgatattcacatataagtgtcacctgttgaagttggaaaattccccgtatgttgctctgggctagaataaagcaatgccctggttgcctaattctgcttggccaacgtgtactggcgcgtgggaccatgagctgcccaagtggccttggtggctttctgttctggcatccctctcaaattaaccccttcctctcattgccactcttggtccagtcccttgtcctccsttctgagtcactggacctgcctactcagatctctcagtacctctcccaggcttgtattctgcatgcccctcccacacaagaactaacctatggtgaggacacctggatccccctcctgggccctgcatagatggcctgcagtagccggtcctgcctccgccacccacttacctttcttgagacttctgaygtggatgcattccagatgtgggggcattctttgcaaagtgcttgtggctgtcttcattcatggtattctccactgcccttctaaacctttctaaatgggtgtgtcccttaaaacacaatttgcctagattcttccaaagaactgcttctgactggccccctgccatgggattgctgcccttgcttgagaccttgccacccccaaccagagcctctgtgcctgggctttcttgttttgtagctgtgcatgatttctccaggtatttcgtaagttgctttgggacagagactatctgtaattagacagttctctaattcctcacttaaattcttagggaattcagattgttaaaaaaatatctagagagctattaatgacatatacacaatttgtgaaataatgtttttaatcttgagacagtaccttgtactcaaacacactaatgtttttgcagcagaacatgaatatgcataccaagtgggataaatcaggagaacagtcatcaggtcaggttttactgccacataattcagatcatggcaggctttgccaccaaatatgatacagatttttttccaaggtgtttttgtttttttttttaatgttggaatcaaagattaggaattatggaccctcgctaggtaaataaagaagaataccattgattctgctgccacatgataaacagcccactccggaggcaccagagcctacttttgggttgctatgctgtagatgaggggarcagggcataaagggagttgaaactcccgggatggtcttcagcttgatatcctgcagggcctctggtgcacaggttgcccttgagattggttagcacccagcgtagctcctggtaggctttgccactccctcactgtcaccacgtgctgggtgggctgaactagatctctctcggtagctgcttttatggaatcactcagttaacccagttgactgtagaatcctgtctgcaaagaggcatcccctggaggccagcgcatggtggtgccatcaaacgaaggtacttttgttagggttggtccattcttgggcttaatcagacccrccctaaggaaatcatggtatgatgtgacggtgatgctaatgatctgccttctattgttggcaaaccttatcttggccaaatattagctaaaatctctgaattggtctgtgtttcacctagatactaatggtctacgcagtgggctgttagcaagcttgtatcatgaactccccaagttctcctttctttaaatacaccgaattactcaaaactggttttttctttaaagaaaaagctttttaaaagtagatacgtgtttgttgcacacaggaagaaaagtctgaaagcttcacattgtctctggtgaacrtccttcctaatttgtctcataccctctgatgttcgatgtatgtcattttctataaatacaatgacagtaaaatgacactgtatttgctgtttgcctgcctacttttttttcattcagtaatacataggaaatattttctaggactgttaaatatataactttcccttataaaagctgtatatatcccattttatgtttatttagctagctctctggtaatggactgctagattcttttcctttttaatgctaacgttgggatgaatattttcgaataacctccttgcttactcatttaaaaggagatgctatttgagatgacagtgtgttatttggttctgaaaatgtaccagaatttactcaatatattgctgagtttggctactgctttattttaggttttgaatgaagattcatagctgaaagtgtctgtggccagccagcctgcctgccttcttttcctcctctctcccgtcttccttccttcatctagctttggcttcaagattatgttaactttgtaaaatgaatttagaacaaattcctaaatttctttagatgcttcagaaaaactgatttgtaaaggagttatttgtttcttggagctcacctttcaaagtcatctaaacttagagctatttttattttcattacagtaatcctttgataaccttttaaaattcttccatgaatattgacatgtgttcagtttttctatgctttacttgaattaatttgatttatatcttcccagaagaataaatttcccttggattttcaaatttattggcatagtgttatatgtatatgcacttaaatctttattaattataaacttttcatttttttcttctttaaaaatgccagtgatgtgtctctggtttctcctccttacttctgtcttcttttcatccttgacatcaagtgctgggattttatatacatttcactgcttttctctttttttttttttgagacagagtcttgctctgtcacccaggctggagtgcagtggtgcgatctcagctcactgcaagctctgcctgccgggttcacgccattctcctgtctcagcctcctgagtagctgggactacaggcgtccaccaccacgcccggctaattttttgtatttttagtagagacggggtttcaccatgttagccagaatggtctcgatctcctgacctcgtgatccgcccgcctcggcctccctgcttttctctttaatgcattcatgtctgcctgttscctctgctttcctctgcactccccctgccccatgagagttgaatgttgaatgtttactttatgtctacttaattggtttctgagtgcagctttggctgagtctcataatacgaaatatagtgtgataattttggttatttttaaacctacttgtaaatgaccgctattattatttctcaccactctggaattctgtttttggtttcttttttggtacgttgcttatttaggaaagagtttcaaaatcgtaagaaactgatttttttttctttttatctttttaaacttaggtcattggagatttttttctcctgactttattgctgtggagtcagacattacaactttataattttactattttgcatatatggagggttttactttgggcatgagatgtagctacctttaattgagattttcgttccaggtgctatgctaagcaatttacacacattactcatttaattctcacagcaaccctatgaggcataggtactgttgttattgttactaagatttgatagttagagaaacagaacttgccccattaaccaggctgtggtgaggtctaaacaacagcctgcccccagaggctgcaatctttacttctcatttctatgaatatttgatgggtattttttaaaagctagtaacatctatactcatttccaaattcaaatatacatgttcaaccaacctgatcgattacattcaaaacctttgttattgataaaagcatttgaaactcaacattacagtgctaggagtttctgcttatttctaagcatgaggggcttagaagatatatattcatggattatacccttattgacataaaattaccccactttatttgtttttcttttctttttttttttttttaatagagatgggctctcactgtgttgcccaggctgtccttgaacaagttttccttttttgccatacattttgctttgcataaatgttaatctcctactttatttcacttactcttgatacatttttgtatcttactgatttttttttcttttttggatgccattttgtcttaggtttatcttttgtaacacatatattttgatttttaagccaacctgatggtctaaagtttaatagactcttagccattttttttttaattttattcatttactttttttgagatggagtcttactctgtcacccaggctggagtacagtggtgtgatctcggcttactgcagcctccgcctcccaggttcaagcgattctctcctgcctcagcctcccgagtagctgggactacaggcacccgccatcacaccgggtaaatttttgtatttttagtagagacagggtttcgccatattggccaggctggtcttgaactcctgacctcaggtgatcctcctgcctcggcctcccaaagtgctgggattgtaggcgtgagccactgtgcctagccgaaaagttcgtctttttaaccacaggccaaaacagagcaattcagtgtatctgaaaagagtggtgtcctaaaatgtcaccctccacagaacttaagcttttctcctgtccacttgggacaatcagaactgctcaggggtcccacagactccattatctggcccagcttttgtggggagaactgcaagagtagggtaggaaagaaaaccaactgcctgaataacctctaagaagggtgctctaaaggattcaccactttgagacaggcagagcagataaaaatgaaagcacatctcttcatggaacaatggaagtaaaaactaaaccctcagcttggaaaccagaactcacgtatccaagaggacgatggtgggcaccaggaggcagagggagttactggagttactctagcaggaccaagggtgccacttgtcccaggggagtagcaagagggaagaaatggaatgtgcagtgttcacattgtctgatgagcagtgtgagcttccatccagaaaaggcagcttgtcccctggcatcgggaggaatgaaagtttaaaggacaataataatttagtctctctgaaatgactctagccttaaatggtgagtgggacctggcagctgaagtgcagccctcggagggcatgacgagagagttcagacggcttcatccagggctgttattttctcaactttcaatagctcttgactcttgaaaagttttcagctaaaatgtagtgtctgtaaaactggaggcactaaagggcaaatggtgctctttgaatgaaaaaacatttttattccatcaaacagtggcttgctgaaagcttcaaggggaaacctaatgtttttccccttctgttggagaatactcacgtattctgggcagcattttctgtggccggtgccgaagcgtggagtgtttggtgagcgaagagtgtgtttttggattctccgcttggcctgagtgtgtgtgcatgttttttgcctctggaacccttggcttttcaatgagattagaggacttcaaagggagtacagtaaatacgataggcttgagtttcctgtgtcacagggaggataaacattttgttttagaacatgcttccgactcctatrcgttgcagaatgcagaagcctgcggtattcaagaaagctattttagacgaataatttcgaagtgagacaaacctaaagttattaattgagctaattcaratctcctgttgaccagatttttaagaagcttgatttcacagaggtcctgcagaggttttttaatgtcttargatttggttctgtttagttttgaaagacctctatagaaataaactctgtagctattaggactaatcagaaattagtggatttggtggaatattatgccattatgactgtttggaggattattaagggtatgttttaattaaatgaacattatacaacagctaatgaacttttttccattttcctttttttggcttccatttccagtttacattctatccagtagcctgcctagactttctgtagacaccatagcaacacatcttgaaaatgtgaagctgaacatcttgtttgggatgggccctagtggaagtgccctgaggttgagagatgcatccgcagcccagtttggggttggactgaggagggcctgtttcccgtggccccttctgccttgtggtggatccagtctccagcttgggctagatcttttcagcctggtcatgttgggccttattcccagtggcttaggcttgactctctctgtgttaggcttcatagtcatggtagactttgaggaacacagcgtgggctgggccacttcatgtatggtgaccacagggggtcagattgtggtagagaggaggaatgggaaatcaaaatctggaggaggcagagtttttttktttttttttttttaacctctgtgctatatggtccataccagagttccaggtctaaattcaagttatccagatgagtctaattatggctccacattagagaactgtttcactaataacacctctcacttttctgtgtgtttcttaaaatgaagtctaagagcaacctgtataagccttgccttcaggggccttttcgaattcagattcccaggtatcacccagacctacttattcagaatgggatgggagaagcagtcagggcctaggcatgttcattttcataagctccatgaatgagtcttatgctcactaaactgtcagagctttgtgataatcagaagtctgtggccttaaagcaactgcccttaccgcagaagcaaatcagagtcctgaatgaggagcatgcgcccagcctgcggttggctctagcctggctggagccccaccttcacagcagaggcatatatggacattctgtgtccattctgtgtccatgggcagctgcatcaggctgccaggatggtcagtgaaacaacagaccttcctgcccttttctttcccttgaaatgggaatggcgtaagcattttctgtggatgagggcaaggaaacagaaggcattcaccgcctctattgcatcaccagctgtgtccagagccttgattccagcatcctgaggtgctaacaccctccccctgccaccgaatatctgtatatgaatggagaaatgggctagcaagcaacagactgtattttaatatgttcctttgatttttcaaacttctgkccctgctggctaatttaacgcccccacaggctctctcggctcatctcacctggctgatgggtgcacatggagactcgcagactttcaggtgctgtgttggctggagaaggaaaggtccacgtggctgcagggctccctgggctgctccatctttccgaacacatgcggaggcaggtgccttgacctggctcagaggcaggggcctcgccactctctcccaaagttaggggagccagtcatcgcacccgcggacatttctccccctccccatttcactcacccatctcatggttgagaaaactgcctgtgtttctccagctgtagaatttgcttggatttttaaccatttttccttatgtagggtagctgaaatcaatcactctgtgactgaagaaggtggaaaaaactgcagggtgtaaacctaaagaaagcagaaggaaggaaataaggaaggtaaaagaagaaattaatgaactaaaaatccagtggagagtatatataaagcttcatctttaaaaaatataaatctctaaaaatgctgattaacaaaaatagagaagaaacattaatattaggtgtaaaaaagcagatataactaagatcataagaaaattaaaagtatacttttrtgtaaataaatttgaaacttacatgaaattgataattttctagggatatttaagttaccaaagtctcttaagaaataaaaaaatgaataagtgcaaaccatcaaaagaaattttcagcaataaaaaatttgccttcccaaaatttcacaaagctcaaatgggtttgcgtaaaacccagactgtttcagagaatagaaaaggaggaaagctaccctatttccttcagtagtatctagctatgaaaccagaaaaagaaagtataagaacagcaaattgttcaatttatggttatagactcagaaaatcctaaaccaaatactagcaaatctaatacagctatatatatatatgctatataatacagctatatatatatatgctatataatatagctatatatgctatataatacagctatatatgctatataatacagctatatatatatatgctatataatacagccatatatatatatatacaagaagagtttrttttaggaatgtaaaaatgattgaatatcagaaaataatgtaatatatcttctcagtgaattaaaggagaatagctgtaggtcatattaatggatgcaggagggaaagcagtgaaattcagcacttgtgagggagtttccttcacctgatgaaaggcatctgtaaaacatctatggcaaacacaaagcttaatgataaaaatctgcttgtgttcaatttaaagataggatcaaggcaaggttgttttttaccacttttaaaaattgtatattgtgttgcaggccataatcactgccatcttaagaattgcaagatgtgtaasgaatggaaagacagggacagaatgtagatgtattgatttgtggaaaatctaagagaacctgcaaactgactatcagaacaaataagagagcacagtgaggtgttgaatacagagtccacatacaaaaaccggtatcagtaayggccaattcaaaaatgtaataggaaaagagactcctttcactgtagcaagcagaactgtcagatatggaggaataaatgcaaccaaagatgtgcaagactttcatggagaaaattgtaaaacataactgaaggatattttaaaatatccrgtattgtagaaatrttaatttccttcaaattaactcataaattcagtgcagtgtcatgcagggttttttcatggaacttgaagagctgattcttaaattcatcaggaaaagcaaatggtcacaaatatccactggcatcttgaagatcttcgcctagtaggggccatgaagagttactgctgagccacattcattaaggcagcatggtacaggtgcggggttacacacatagatgaccagaacagaaacggatgtagacataaataagtgtttggcgtgacagcagtggcgttactcatcagtgatgaaataatgaactattaaatcatgctggggacaatggattatctacacagaaaaaaaaagagattatggatctccttcatctatatatgaaggatagcatggaacttgtctacatccatttctgttctggtcatctgtgtgtgtaaccctgcacccataccacgctgctttaatcactgtgactctgcagtaacgcttcatggctcctcgggcatgttgccctactatgtgttgttcttcaagaytccagtggatatttgtgaccatttgattttcctgatgaatttaagaataagctcttcaagttccatgaaaaaaccctgcgtgacacttcactgaatttatggattagtttgaagaaaactaatatttctataatactgggcactttttaatgtccttcacttatgttttgtaattttctccatgatatacatggatatacataatccttcaatatttatgaaggatatataacctgttataacctgttaaaagcatttgtaaaagtttaaacatttgaaataaaattcacaatatattaatgaccttcggttaagaaagcttttcctgaacattgttaccccagggtcacagtttgaaaactcaaaattaaaamgtaggtttgacaaaaagcatcataaacaaaattaaagcatctgccacagagatttttgcaatgcttctggctgacaaaggataatgtccagagcatataaattcctacagccaaatagtaggtaaaacctaatcaaaaaatggacaaagaacatgaataaacagttaacagcagaaaccatccagtcagctcctaagcatataagatgatatgtggcctctctagtaatcaggtacatgaaagttaaaatgatgactacttcataccaatctggttggcaaaattttaaaacatggtgatacctagggatggtgagaatacagagcaggatgatctcatgcaggtccgggcaggagtgacactaggtccagccacttgagattaagttggctatgtcaggtcaagttgaagaggttcataatgtatgaccagtagtcctacttgtgggtaaataatgcagagaaactttctctgctgtgtaaaaagacagtgtccactgcagcgttgtttctaatggagagaattgataatcagcagaaaagggatgacgtgtggtgtgttcctccctacaatggaaagcagtgtagcagtgagggtgaatgaaacagagctgtgtgtgtcagaacagatgcacctcccaaaaagtgaaaacaccaagtcacagcacagtgccatccctgcaaacttcgaataggtgcagaaaaatgcttggtataatttatgaatacatacatgggtagtttatttaaaatacacatagtaacagtgaagcaccaaattcaagatagtgattgcccctggggaagatgaggattgaggtaagggctgtaattattccctgtcatcctgtcatgtgtcattttatttaaaatttttttaatcaaaggccagtattgcaagatattaagacttggcaagcagagtggtacatggatgcttctataatatctctaaactttatgcgtgaaatatttcactcacataaacacacagtgatgtcagttgctgccaagaggccacaggaggctcattgccttggtaaatttgttgcagtctaagacttgcccctcagctttgcaaacccagaaactttttttttttcttagttttttgcctgcagatgaaaactaggtttgtatctcaggggcagactcaaactcaatttacaaatcgaatgtatccagactgccagtatgataatttgtaaatacatagcacagtaatcaggaccttggaaataccacgaccttgcatgatcctcgtgttgtttgtcctggagtttttccacgggaacctgagccacagcccaaatgcctgctcatagacacgcagttagacgtagctgctgtggagaccagcatttcggagccccattgccagcagatttgctcctacacaggactccagtcctaatcagaacacacaactcccttagagggactccactggaagtgcctgcctccttcagggaggaactgagcatgccccttagcactggatacccagaaagtgcctgtggaggcttggcattgtttataactttccttttttatttttgacagtatctattccccatctcttccgtgatagaatcctgtctttgtgtaggcataaactaatgcttacttaataatcagttaagttgtgtagtattttccttacaaaatccgaattacaagggcagttcagggagatggtgcatattcatctaggagtttttccttcccatgaccctctgtttggtcttcgtggctatctcataagaagtgtggtcttactgttggccacatcccctctctgggccttgtagaggttcttgaactctccttcttaaagagagtttatttaaatatgtttcctcatcttctcccacctttgcatctcctgagcccttcttgcaggcctgggaacccttgtccctttaactgacagtgtattctctacttggagccgctgctgcatgtggacttggaagatgtctcagagcctgtctcatcggctgcctctccaagttgctagagaaagctccactctgacctcccagtcaccattgacacacagctgccaaatgcaaattataagcctgcattcattaaagtgaccttgacagttttcagagtcctttttcacacgtttttatttggtgttcccaataatcaggcaagatcgtcagggccattttcacagatgaggagtgatgttagttgtcacacattacacagtaaccaaggttaccaagggccctttgcaaaaacactaggtcacctggggtgagggtggggcatggcctgcccagggtagagaaggaaacctatttctttgttcctcccaacaccgtgaaacagccttctgtgttattggacagaagctggagcttcccagtccaaagagcttgcgtttggttatttcatcaatgtcttgatcaagcccaggtataacgtctgccctaaagacagagtcattcttctaccctgagagactctctatacaatgtggttgtttagattcaccagttttttccatttccagctaaccaagagttcaggtactgaaagccatctaatctcagagaaatttaaagctaaataaaggattcttaaaacagatctttacatgtccagtttttaaagcctccattttaccgaacaggaagtttgcagaatgatcacattagcaccagagccttggacactcaagtgaacttgagcccacaaagtcagcccgaaaccccgcccactcttctcagagtcactgcttctagcctgcgtcgtctggtagaacaaaccttactgcacactgttcctgccgctgacttcaaataaactgcagtttctactcgattcccaaagaaagctcaagtatgaaagtgcccctggcagccagctcccctgttgagttactatattgggtgttctttcactagttctggagtagtgaagactggttggcagggatatggctctttaaatacaaaatttattctttttctttttaaagacatgtttcaagccgaccccaccttcttggctcaatgtgaggacttattatctaaattcatgtacatacacacactcactctaactctgggatgtaaaatatttcttagtttttactttttatctctctttgccttaaaaaatgggatccctcttaagtttcctgaatgccagttctcagcaaaaatggatgccttatgaatatgtagatgaattttaataaaatgatacgaatgcagcagctctgcgtgttctgaaaaacgtttccagagccccgtgagactttcaaatgctcctgggagatgaggcttcctgcagagaaaaggaaaccgagagaataggacatgattggatcggttccgtttactatgatgtagcatgaaaaaatgctgccttatgtctctttttaaattctcctatagctgcataagctcatgttcagtaagtcattcaacctaggtctgctcgtctcagcaattcccgctgtgttaagtgggacctaattgcagaggatagctgcctcctaacgcggagtccttatttcattagcattacagattgggttcttgggaaggacattctttggtaatttgtttacagatgaagtcttgcagattctcacttccttaatctaacaatctgctaattcttaaaattggaaaaaagaaagaaaaaccagcctgtcagtctacttgtcaggaaagacttagatgtcaggagctctaatgaggtgcgatattaattcctgcctgcttttttcccccagacaaccgtgaacagtttccccccaaaaactagtatattatgcaatttctcatgattaattaaaacaataactataataaaagaagcccattttgtgattctgacctaattgctttttaattgcactgcttttcatgtttattttcaaaattcacttctctgaagtagtcacgagggaaaacgagtgtctgttgagcactttctctgaaggtgcggccattgctgtgaaattgctggtcattgtttggcagctgctagaccatccactttagttcttaactccttaaatgtttttagcgatggctgagttccawatatatatatttttaatctatctccttcgtccactgatttcccatctgagatattatctctaattttgggggcagataattcatggctctggcaaacaatattaagagctacagtgggcttatattagggccaggcacagtggctcacgcctgtaatcccaacactttgggaggccaaggcaggcagatcacgaggtcaggagttcgagaccagcctggccaacatggtgaaaccacgtctctactaaaaatacaaaaattagccagrcatggtgatgggcacctgtagtcccagctactcgggaggctgaggcaggagaatcgcttgaacccgggaggcggaggttgcaatgatccgagattgtgcctctgcactccagcctgggtgacaagagcaagactccgtctcaaaagaaaaaaaaacctacagaataatttttttttaatgtattggtcccctggaaggcataagagtgaagggaatgtttccctccccatctgaaggtttgaatctttatgtcagctgaaataaactgacaatagattaataaatttgttattaatgtgcaaatgtgcacaggagccacacaaaatatgagactcaaagaagggccagatggttgaagcttaaatactctctgcataggggagaggcaagtgagggatgtaggcaattttagaagagtaaatgatgtttaggggagatgattaggatggaaatgcagacaatagccgggaacaaatttcctccacagggtctcggggaggtggcaacaagttatgggaaggcgaggggcagaactctattgtgaacagaggttattttatcatgcagataaatctctcaggtgacagcctttagaagaataattgaaagaatacgtgaaaaggctctccaagagtggggtcttggtgtgggcttttagtttcttctgctatatgagttaatctctggttaatgtagattccagagagggggtccaagacaattgcacatcttctggatgaacttccctcagtcagataagagaacttgagacaaagtccctccctgtgcttctgaagggaagttggagggggtggggaggagaaggtcagagagagaccttggttctgaggcttatttctgaggtctgtgaatctccttctttcaaagcactcagcatgccaaagcaatataatttggggtatcattttckgagccscagcaaagattttctgctgcttcaattccggtgccagtgtgtttaactgctagagttgcaggaacattgtgcagataataaatgccagcatggaggaaaccttggcatgggacagacaaacaggcccctcttgccgcctcacaggcaagactgttcatcctcaagaccacggggcatcaacatcaccatttaagaaccatttttctgaaaccaaagcctcttttccaagctggtatcagtagtattaccaatttagtaactctgaatggagtcaaaccagaaattaagtgtttctagaagtcctcgtgggctgtcagtcctgcccaggtgtgttgttctctcaggattctctgggaacattgctctgtactaggatgctcttaggtctgtagaccctgctttgaagggttcctcctgatgggttctgctgagcccggtaaacctttactgcttatttctagtatatgatactttagcatcttccacctatagctatcagctattttttaaaacagctattctgactgagcacagtggctcatgccggtaatcctagcacttcagaaagctgaggtgggaggattgcttgaagccaggatttcgagaccagcctgagcaacagagtgagacccccatctctacaaaaaataaaaaaaaatagctggatgtggtggcacacctgtaatcccagctacttgggaggctgaggtaggagcatcacttgagcccaggagttcaaggctgcagggagctatgaacatgccactgcactctaggatgggtgacagagttggaccctgtctcaaaaaaaaaaaaaaaaaaaaaaaagctacttactgttcttctagtcttgtgtctgtctgtagagcccaaatttgagaggtgccatgttgaaatctgcacctgctttgtaggtctggcctctgaatcagcttctgtgcagaggtgatcccagggttcttccctactgctggaagaggagagctcaggcaggctcagggtcccattgactgtaccctcactccatctccccatcttcatctcaccactgccctttggggtatttggggatggccttccagggcaagggacatgcatccctgctgtcccaggaagggaaaacctccagtgggtctgctgttcgtggtgagaaccaagttccaaatatcaccggagtaccacatgcttgttgtaggcaatgtagaaaacaagaaaagagcagtggcgcacagttggttctgcccttcggaaattacgactgcaaattgtgaaaagcgcatctctagaggtgtatctgcttgagagtagaaatgggatttcactgttttaaaacacttttttttaacgtgttagaaagatgttctcaawatgttactttttgccgaaatcgttcatctctcagaacgtaactccggttgtgtttttctgtttccttatgtccckttggcagttcatctcagaacaggccaggaacttctgcagataacaagttaatcatagcatgtccatcccagttggtcagtctgcctgttctctsaagggctaaacaagctgtggctgctctgggggtcattgttcagaggaccatctttctcttcctgcaggtgtcagcggaagcagtggygggtggatctgccggccaccagcgtggtgatcacgtttcacaatgaagccaggtcggccctactcaggaccgtggtcaggtgaggccaggagatgcattacctntcaggggtgttaagacattagctgtgtcccaggcacagtcagaccagggctgtcagtgggggctgcagacagggtctcctgactgctcagcacagggtgcagtgtgtagctcctccaaccaagggttaggaccaacatatgngaattttctaccccaggctaaaagtttatacccctnaaagacctataaactttatcttcttgtcttttcttagcgtgcttaagaaaagcccrccccatctcataaaagaaatcatcttggtggatgactacagcaatgatcgtgagtactgacactgattttatccctgtgtctggctcttctctgggcaccagtcttcctgtagtgggggtgctaatgaggcgtgaacaagccagaaatcagatccacagaaagaagaggtgcctctgtgatgccccaaggagataatcggcccttagatgattgagaatactatggttgaatgcaaagccctttatgaactccaggttcaaaatgctctgcttcttttcttttcctagctgaggacggggctctcttggggaaaattgagaaagtgcgagttcttagaaatgatcgacgagaaggtaagattcttcttaattcagcgccaagacagttgaattctgacttttcctgtaataacataaagaagtgctttagctcaaagagcaattaattgtctagcttttttctgtctccctctaccagagccgcttgggagacttctcccagcaaacacaggaaagacattaaaagcttgactaattgaaattattagtatattagagcaggatcaaattacattttcatttatgtatttagaaaattggcttctttctttcacaacctaggaagtcttatcagtcccttgaatacaaaagtttagaagaaaaacaaagatttagcaataagaagttgaatgactccatgctccaggcatctgataaaataaccgggattcaagtttgacagcctgctgaaggtgaaccatccaaaatggggagacagtactgcaattatatgctcatgcgattttgcaaatgccaacctcggaaccttctgtcagtcttatctgtgctggagctgagctcatgaggactcttttattggcagttagaagagaggctgtaaaggaggaaagtagtacactggagtgtctgggaaggaagctccaatcacaatgtaattaacatccagtgtgtcagtgctgttagagaccctgaagactgaattgttaggctcctccatggttgggagaaatctttcagtataggaaaatcacagagctttggaacccatgccacatttgctatttaagtctgactgttgatccaggggtggtgattgtattccttcatcagtgtaaaactctttcttctcattacatatgcactccagctggagtcaaggagtgaagtttttcttaccaggaatcttattggccaacacagtgattgagcctgttagaacagcatcatattttaaccaactagggtcatcaacctagacattcaagatacataaacagtgggataagccttgccttctaaacaagctgtttgccagactcacatcagtccaccaagcctggaataaaccaaaaagggggcaatttgctgccccctaaacaccttcaaaataactttatgaatttaaacccaaagtatctgccatcctaccccatcacctggcacaggctttaaaaaaaaaaaaaaagagaagtggggaaggaggaaagagagatagtgttggcactgtaaatcacttatgagccttatctaacagtgtctttgtctttaaactgcttagaaatcagaacaatgcttctcagtattaactttccgctagaatgttcatttcggttgaacccgtgctgatacgttgtttcggggaaggcatgagaagggtgggttgggagaagccagattatggaaagcctatatggaacagctgaagtctgtaacaattgaatgagaaaatatgtgcacacttgcacacacactcatgtatatatgtacccatgtgtgtgtataagatcccatctatgtaagcatacacacaaagtgcttgtagtgatgctactagatgacaaagtaaattaattgcctaaaatattatggtagtgaaagcagtcttaggatcattcttctgtggattttattgtgcattgattcttaacctagcaatttattagaagcacctagggaatttaggaccatgtcttgccctcattcacaattaaatagaaatttctggatttctctgggtggggtgtgggcagctgcatttttaaaagctgctaaaatgatgccgatgtacagtggaagttgagagcctagtactttcattttacagatggaaatactaaatctaaagaggctaggtggcyttctcaaggcccttacagctatttaatgacaatagtaggaccaaaaccatgttaataatgagataaatctttttctctgcatttgtggagatagtcaagtggtatttctttttttaatctgttaatatggtgaaatacattggttgattttcagatgttaaaccagctttgcattcctagcataagccccagttggtcatgatacagtatccttttaatatatttttgttaaggatttttatacctgtgttcatgggaaacattggtctgtaattttcttaaaatgtatttttccagttttggcattatggtttactagccttataaaacaagatggaaagtgtgcccttctattttattttctaaaagagtttgtataatattttaattatttcttttttaaatgtttaatagaattagccagtctggaccaagaattttctttatggaaagatttttgataactaattcaatctctttaatggatataggcgtattcagatctgctgtttctttttgtgtctgtttcaagaaattttgtattttatcaacgtttttatatttattggctcaaagttgcttatgatattgtctctttttttactgtttgtcggattagtattactattttattgattttggtaatttatatcttcttattttctttatctgtctgctgttcatcgacgctgttcattttttaaaagaaccaatatttggcttttgtattaggattctccaaaaggacagaactaataggatagatgtatatataaacaggagtttattaaggaatattgactcacacaatcacaaggtgaagccccacaataggccatctgcagccgaggagcagggaagccagtccaagtcccaaaacctcaaaagtggggaagctgacasttcagccttcagtcagtggttgaatgtccaatagtcccaaagctgaagaacttggagtccaatgttcaagggcaggaagcatccagcgtggaagaaagatgtaggccgggggagaccaagccagtccagtctctctacatccttctgtctgcttttattctggccgtgctggcagctgattagattgtgcccacccagattgagggtagttcatttacatgtggcgtaatcattggtgtgactaggtttgggtctgctcttcggctgtttcttctctatttgtaccatgtgcattttgctttttgtaactgtgttcctgctttcttgccttcttttggattcartgatttttttagtattccatttgaattattcttgtagcttttcagcaatacttttcatgtatgcacagttgccctgagaattacaacatacagctctaacttacaacagtctgcttaagagtcaacatcataccactttaaatttaagaattttacaatagttaaattgcatttccatttcccttcctatgtactatcgttatcatgcttttcttctacatacatcttaaaccccacaatacactgttacatttttacttcaaatagtcagtatctattaaataaagagaagaatatgtggatatgttaagcttatcctcatattttccatttgtagtatctttgtttctttccatagattggagtttttatttagcccgaataattttctttagaattttttctcataggcagcacaatctcaggttttatctgaagaatttttttctcctttgttattggaggctattttctttcagtggaatctgagttgacaattaatttttctttcagcactttaaaggtttcactccaggcagggcacagtggctcacgcctgtaatcccagcactttgggaggccgaggtgggcggatcacgaggtcaggagtttgagaccagcctggccaacatggtgaaaccccgtctttactaaaaatacgaaaattagccgggcatggtggcatgcgcctgtagtcccagctactcgggagactgaggcagaagactcgcttgaacatgggaggcggaggttgcagtgagccaatattgtgccactgcactccagcttgagtgacagggtgagactctgtctcagaaaattcatactgttgttcctttgtatgttatgggtcatttcctctggctgctttttgtctctatatctgtttttttttttttaacaatttgattatgatgtgcctagatttagttttctttatatttatcctgcttcaagtttgctgatgtaaattgaatatgtaagatgatgttttccaccaagtttgggaaatgactggccttttatttcttcatgtatttttttctgactcattcttgaacttcagttgcacatatgttataccacttgttattgtcctatagatgactagacttttcccccttaattttttctctgtccaccagatggatctatttctgttgttccatcttcaagttcactagtcattctgccatctccattttgctactaagaccagtcagtggatttttcatttcagataatttcatttttaagttctggaatacccatttgattcttttttatagtttttatttctctgctcagattccccacccattcactcattaaaattgttgcctttgagttattaaacatatttataatagctgcttttaaatcctcccctgctaattccaacctctgggtcatctcagggtgaacttctgatgactttttttctctttgatgtggtctccattttcctgtttcttctcatgtgtagtggttttttattttataattgacattgtggatgatatgttgtagaaacactggattatgttatctttctctaaagagtattcatctttgttatattgggcagttaaattaccagatgatgatgctgaacttctgtaggctctttttgtactttgctaggatgagtatggtttttttttttcgtttgtttgtttgtttgtttgtgacagcgtttctctcttgttgctcaggctggagtgcagtggtgtgatctcagcccactgcaacctctgcctcctgggttcaagcaattctcctacctcagcctgccgagtagctgggattacaggcgcacgccaccacgcctggctaattttttgtatttttaatagaaacgggtttcaccatgttagctaggctggtcttgaactcctgacctcaggtgatctgcccacctcagcctcccaaagtgctgggattacaggcgtgagccaccacgcccggccatgagtttgtttttatgagtcccttattcttgatacatagtctatattcctatgtgtggtctttctgaagttcctgtagaagaactgagatctttaccaagcatgtcacacttggcagaactcaaattccaaactttgttttctctgcagtagatagcagctgaaactcagttttttctgccttcttaactgttgcttttcatgttggacttggttcctgtgtggttcagaagtcagccaaagatttaacaggaggttattgccagatttgggtcctacctcctttccaggatctccttcagtttccagataccagaagctctgaactctctatcctctaacaactcaagccaaaaaaggctacattgcagtggattggagcgcatcctcgtggaaaacgccgtataaacacggagcttactcagtgttattttcttattttaaggggttggatcctatctagtttctgtctgcttctggctttcaaattgctgctttttatattttgctcagagtttataattgttactggagcaaaggtttgccccatacaagttgttttgcaattatcacaacttaaaatctttagtctttttccctgttctagcatacagccacataggaatcactgaaaacccattttgactgtggaaaaaagtacttagcagacttgtcctcaccggttatgaatagttgcatcatcttcacatagaaagcccagcatatatagcaaaagccatttatgaccacaacatccagggataaatatactattatttattttattttattttttatttattttgagacagggactcactcttatcacccaggctggagtgcagtggcgcaatcatggctcacttcccaggctccagtgatcctcccacctcagcctcccgagcagctagaaccacaggcgcacgcacaggccaccacccacggctgatttttgaaatacactatttgtattttgtgtcataatgaacgtgcacattattaacacatcacaagtatataaattgtagaatttgaccaatagtataactaattttgtgtaaaaggcagacagcagggctttgcaacttatgttatttagctcctgataagtcttagaagacagagatagtcacaacactgttgcaaatattatcaccactaaaatcaacaccattagcactggaagtctytgggtgacaccttccttagcccagttagttagaaaactgctgctgtgtcagaggaatgtagttataaaagttccacattttggttagttgataaaggagacttcagtaatgtaaagggcctttctcagaagacggtagttctaagaacgttgtcctcccagtcatccaatataactattaaaattaaaagttctgacaatagtctgtctcatggagcagttttgatctcatccagcaagtttacagtaatgtccgtgcccagaaagcaggctgcagagctgcgggcagggaggcgtcgccggttggcatggggttgtgctggccctgtggcttctctctcctgacgtgctttccaactcgcctctgcaggcctcatgcgctcacgggttcggggggccgatgctgcccaagccaaggtcctgaccttcctggacagtcactgcgagtgtaatgagcactggctggagcccctcctggaaagggtggcggaggtgagatgacgggggctgggaggggtgtcaggtcrtgggtggttggtagaggggacagaagggagcatggtccaggggaggtgtaacgcagggagtagggcgtcagggctggtaggggctgagctcgccgtctgcagttttccttgatagaaggaaaatgcctttggggcattgtagaaagactgttttactggctgtaggaatccatcagtaggaggaaccatccgttgacaggtaggaggcgaggatcagcagaggctggtgagagcctgattagttgaaggcagcccttttcatgggagcagtttccttccccgcctacagcttcgcagagtgcttagaacattgcccggcacctagcaagtgccatctcttgcagctcgcagagcggggcgtgctggggaagctgtccctggggccacctctctgctcttagtgagtagggcaggttagcccagcaggcttccaggctcctgtgggagagggttgtggctaggaagcatacagggaccggtggggttgtcagagggtgatccgcggctccacttctgcaccttctgctttctagaaacatcattgctaatattacatttggccttttttcacttctctcgccttctgcttgttttattgacttttctttccttcctactaagaaagcacttccttgggggcgataaagcaaacttaatgaaaggaaatagaaaatgaacaagtagttctgcctaagcatagcaaggatagctgatgggctgtgagtcatggaatactaagtaaccacaagctactaggaattatgaagatcatattcattaccctttatcaagttggggctaggccttttttatatgttacctgtaatgcacttgttatctccgtttgacaggtaaacaggctggggttcagggaactttaataatgcacgcaaaatcatacaggtagcagagccaggcttgcaaagccagtttcattaaatccctatctgagcccctctcttaacacatgtgcatacagctatatccaagaagaacccaccctggaatccccacccaccccaaccccacaacttcttgctctccctggctacgctccgccaggctgtctctcagggaagcgcagtcaaaaccaaaactgccatggcagtgtttgggtgtgcgaaggtcaccgagctcagtggtcagattgtcagaactgcttcgaacgcctgctcctaaattaaggagagaaagtgccaagcctattaactttcactaaattgagccttatgaaacaaaatgtaaagtagattatatcctttaactcatacacctagaaccagactgagccaggcaaggaaagttgtgttcttctctgccctcaatgcaccacacagcctacttttccctgtagatttgcacctgggtgttacagagctttgcagtgtttgcgtgttcctaattagcatgttccttcacctgttcctctgatgtagtatgttcttagctctgctggttctgttactaagttgtatttctaaatctttcttctggctaataagggttctctaagtggctcagggaaaacacttgctctttggttaactgtcagcatggggcacagtccagggtctctcaccagcatccgtcatttgagcttaaagaggttagagatgttaaaaggccttatgttcacaaactcttaccagaatgatggcaatgtggcataaagacatggctcaatctagggggattttttttttttaatagaatcacaggggctggacgcagtggctcacgcctgtaatcccagcactttgggaggccgaggcaggcagatcacctgaggtcagaagttcaagaatagcctgaccaacatggagaaatcccatctctactaaaaatacaaaaattagctgggcgtggtggtgcatatctgtaatcccagctgcttgggaggctgaggcagtagaatcacttgaacccgcgaggcggcggttgtggtgagccaagatcacgccattgcactccagcctgggcaacaagagtgaaactccgtctcaaaaaaaaaacaaaacaaaaaaacaaaaaagatagaattacagatgaggcaaacgtagaatctggaaatctctggttgatttggttaaccttctgctgtgataatattgatacttaccacatctctctcacacacacacactcccacatagaaatatattcctaattttgatgtatgagcattttagcagtgactccattcctgaagtttactgcagctcacaaatcactaatggtatttgggcaaacagaaaaggacccttgggacacagcaacacagtttttgcctttagctgggtgaactgatggctrcctgtcccataaccatgggtgtctccactcctagagtgactcctgctacgcacccactcctgacctccctccctgcctcccagcaggccacagcacatctgtggatggccaagagcaagaccttctgggtctgggtggggaggctgggttcttgagggcctagggtagtaggtagtaagggccagttgggtttgccctgtgcctgcctaatactaatgccttctgtggttgggcaggttttttgttttgctgggattttgataactactcctctctttgtattttaggacaggactcgggttgtgtcacccatcatcgatgtcattaatatggacaactttcagtatgtgggggcatctgctgacttgaagggcggtaggtgtctgtcatggtgcccctgcctagctcgtcccgtctacaccagcatctgatcaccactccctctcattgtcaggagtgacagtgacaacagtgttcacgccgtagtgtgtgttctgagtaaaaaccacctgtgtgcttaacgagtaggacttcataaagagaaaaaaaaataggcttgctcccttaaagarcttcctgggtttccctttctcctcttccttgaccttctgtcacttttgcgagccatgtggttccatgaacagatatggcgtcctttatgaccagagatgatgaagccctccttgcaggaatctggggtgagaagcttcacggagctgaggctttgtgggattcaaggggctggagcctgtctttgccttctctgctcaccctggctatttctctgacagcctggtctctttctggttgctcagatggagacctgtgtcatcctcaaccccctcgccctcaccaagcccacgtgtgaccctgttctgctgatacagccccttgcatgtatcatggtttcttgtacccctctttcccagcccaacacctgtgcctacatcaccctggtccccttccgttggaatgaccacaccagtttcctgtatgtcctcaccgcacccaccctggagccccaagagcactttgtctgtttaccctcttaaaaattatcaaagacctcaaagagctttcatctgtgtgaagatgaactattctagatagacactgggcagagggttaactgatggtctaacatcaaaaaagaagacagtaaaactataaaatagggccttgaccaggtgcagtggctcacgcttataatcccagcactttggggaggctaaggtgggaggattgcttgagcccaggagttcaagaccagcctgggcaacataacaagactcttgtctctattaaaaaaaaaaraaaaaattagctgcgtgtgatggcatgccagctactcggggctaaggtgggaggatcacttgagcctgggaggtcaaggctgcagtgagccacgatcaaccctgggagacagagtgagaccctgcttattcatacacacacacatatgtgtgcaagcaagccttaaccccagaaaacagaatacttggactttttagggagactcagccacggtcctagacattgtgggctttggccccacctgcctcttgcaggccccgtcatcatgggcaggccattttgcctctgcttctcagcttccccctctgggaaatgggatgataattgtgctggccacacagggcataatggaattagacatcagcgggagggcgggcatgcttggaggactgtacctagggtgggaaacataacattcrggaacgattcccagcaaatggtgagaagtaaaatgtttggggacattaaagaggagggatccttagatagctagaaagcctggctttcagaatgttgtatttccccaagtattcgaagagctgagatctaccaggctctatttctcccaaagcagctgcgtatgtcagagcaggggcaagaacagccaggtgttccgtgtgggggtgcaggtcttctgggtcagaggaacggggccacgttcaccctaagagcattttatgaaattcctttagaaaaaaaatcaaggatgccattcttaacagatctttaatctgctatagcctctctctttggaccaaattaataaaataaataataagataatagtaaacatcaaaaaaacaaaggaaaggttatgtcagctaatccttaaccttctctgttagtgaaacagccaggacattgtttttctggttttccttcgtggcctttgaggcaccatgataagagccagctcaggggcccgcaggggtctcctctctgtgcatttctgtccccactgcctgggcccctgtccatttccctctctctttgcctgaggccactctatcctgcagtgagggagctgggaggcctctttgtccagagccataaattcttggccagcccaggacactcagaaaccctcacccgccatccttcagtcactggggctgtcagggcggacagactatgaattcaaagcatgcagacaaatccaaacttaggcattgcaaaagccctgttgacaaaaagcctgatggcagagagcttaagaggattgaaagatgcatgccctagagtcattaggttttgctgtcagacccttggaattggaaatgcagcaccatgagccatgtgtttgccaagaagtggcctcctgatgcaccaggacagcttccgcaggtggrgcctgctggcctccaagaggcactatgtgtgtgaccctgggagcaagagcgagacctgaggccctgcagatgcccacaaccaagtcygggtacagggtctaggctcttctatcctcaggggtctgtggattccaaaaatgaaatgcaacaggtgccaaatatatctgaaattgaagcttatttgcccagcttggcaacttccgctggctcattttcccttaaagttttcatattcccagcatgttcccactccattcttgctgcaaatacagtctgaagtttgctggcccagggaactgacaaagcctcgttccctccccagcattgccttcccctggggcagtgttggaggtaccacggcttgattttcatgttggatgctctttttcctcacatccttacagcccttggacatgccctggttatcaccacacagaccccagttctctccccatatttcattttttcctatgcatttcaatattagaaaagcctgactcacattttctttagggaggggcagggagaagatttcaacattcaccctcactgccggtctctctcttcagctacacccacgcccccagtccccttctctctcctccacaccttcttttttggctttgtttwggttttcattgagttctgtccaaacatcgaatatttttaagctgtgaggaatgggggtgtcgggaggaagtggccagtctcttgtcaacaccctgtttcttttcctggctggcaggttttgaytggaacttggtattcaagtgggattacatgacrcctgagcagagaaggtcccggcaggggaacccagtcgcccctataaagtaagtgccagcatccttcagggtgcccctcccakatgagaccccaggttccagcttctttgctgggcccgcaccgcctggagacccagtgggggctgttcaccttctgccctccggtttcccctcgtctyagctcaaagatgagcaccttccaccaggtcatagaataaaatccttggagatttcttttccacagttgaagtctcacataggtttataaggcctatctgctaggtctgtgcattcctgtatgttgataatgtrgagcgtttctgtagcagagcaggatctccgagctgaccccaggcccaggaaaaggggcttggtgggcagcaggaggcttactgctgctactgcccagcaggcctttgctctcctgcagaggaaggagcccatgctcatgaagcccatgctttaagattcccaggccgggcggtgggctttctggttgagagtcaggatgccttctctagctggggagagaagggggccacctcttccaagttggcacacggttaagtgagatagcattcacagagtacttagcgctgaaatatatttgctgacatttagccaacatctgcagtgtgccatagaccttcccagcactttacactgaattcgcacagcatcgcttctgggaacaaagtagggagctcagtgtacatctgttgtcaaccccttcctgggatgatgaagtgaggagcatggtgggttcccttgtaggaggtggagtctcatctatgatagtgataatgagagctggtgctgtggagcatttcctaagcgtgctcagggctttatgcccatgattttttgcaatcctcgtagctaccctataaggaaactgacacacagaaaggccgagttctttgcctatggcagcatgtcagtgagtagtgatccagccccagcagtcgctcccacataggggaggctcagtccagcccctggcactgtgggaacatccaggcagggacagtgggggaggcatttgaaggcagcagtggtgaagcagagagagtggcatgctgggcactgagcagaaaacagtggcagtgtggctgttctgaagatcagcttattgttagggaatcaaggcttggccttggcgcaagggtgctggcaatctaaccttgactttgccctctcctcnctcccccctcttctttctgcctctttagaacccccatgattgctggtgggctgtttgtgatggataagttctattttgaagaactggggaagtacgacatgatgatggatgtgtggggaggagagaacctaggtatgtacaagcctcaaatctcaggacagagaagwgcctcagctctgcaaaaggcagggtgccaattggaaaaaaaatttaaaaggcttcagagtgaccattcactgggcttaatcgatccttgcaaacacatatgtaacaccccttttgctcttgaaagtctcatgagttgggcattaaaatgtgcctccctaggttagagtggaggatgccagaatacggataaagtctttgaagggaaatgcaaactctttcaaggcgtctgaacccaagtgtttggaatgttgcaggcttgcaaaaacagagggaaacagtscaggagctcagattcatgctgagtggtggagagtggaaaatgaaccccggcgaggctggtgggattgattgaattgaaatcatgaaaatccgatggggcagggaggccttggcacttaatcccttctcgactacctttgcgaatggttctcatttgtttttctgtttgtttgtttttttgtttttaaataccccatgcaaattatttttacccaggtttaggcacagcaaaattttgcacattgtggtctatattggtagccttatatttactgcataaaagatgaaaagatgtgttttgtttgtttagggtttggagtgggggagatcttttttgcttgtttcaattaaagccttttgtttcaaatgcttgacattctgagcgaattctcctgggctgctgagtgttgttaacttacattcgtccttgggtgagtgtaccctggaggacaggggagaaggaaaggggaaaatgaggccactcatttttaatagttttgagactttgaaagtttttgttactttaaaagaaaagactagcctagcctattatttttccattgttttatgatgttgaagtcagtgataccatctcatctttgaggatttctctgccttggtttgatgttgaaagcttctttaggctcgattactatactgcrcgggtggagagaccgtgagtcaaactccttttgggttgttttaaaaaaatgatacattaacctctagggaaagcttggattgaagtcacttgagtacaaaaggcttcagaattgttaaccctctaaagagagttctgtcaccctgttccatgggtatcccctaatggtttagtggaaatccagcaggccagggtcgcccagtagggcagcgtatygtgtaggtggccatttctcaaaaacagtgtggttttcagaagtttgcatactattagctgaaatgagacatcagccagcattttgtgtcatcgtgtaggaagagtgttgatttacatatctaaggaggcattcacccagagactggggggtagatttgttgtaaggagctgctttmttgtggtttggtgtttgtatttattatgtagctgtgcctagaaggttctagggtctgagcggttcaggttggggtgaagatgaaccctgcaagcaggagcacatctctgcccaggaaggctggggcatctgtccctccgtgaggggctctcctgggttatgccaaggacttggactcccagtgaggtttggagggctcaagagcttcacgtgagaaggccatgccgtgagcctttctccttagcactgctctagcttctgcttctgggggccgtgcacactactagccattgccaacctgaggggcctctgtgggtgtgcattgggagaggtgtatggtgcagagaggcccgagtaagatccaaaaccacctcctcaacgtgtgccccgctggaatgaccagagcttcccattttcctaatcatgtaagtcyttatgtcatttaagcaattaaaatggaggaccaagaacctaacccttaactctaacaatgggggtaaggctccttgggggcatcatctgtgtttctctacatccctgtcrtgcaaggatgatgctaagtacttccagggratcatctgtttgtgctttcttaacggagtgtggtctgcagaggtcatgacaccttgcccagggtctcagaaccaagatgtaaacactaactgcctaattaaaaagccattgagttttactgagtaattatcctcaaagttatagggttcaaatgaaatcaacgctgaagatactgtagttatacttagccttgaaaatctcccacaaaagccctggaaggatcccttgttggcttaacagattccccatagagaagccaaggggatttcctagcccctaattctaaatcttgtggtgaggcaaatggatatttaaattttattttctgaaatagagacaacttcttttttttttttttttttttttgagatggagtctcgctctgtcaccaggctggagtccagtggcacattcttggctcaccgcarcgttcgcctcccgggttcaagtgattctcctgcctcagcctcccaagtaactgggattacaggcatgtgccaccgtgcccggctaattttttgtatttttagtagagacagggtttctccatgttggtcaggctggtctcaaactcccaacctcaggtgatccgcctgcctcggcctcccaaagtgttgggattayaggcatgagccactgcgcccagccgacaacttcttaggttgtgttgggaactgtaaaaagtaaagtcggaaactttcactgcttatgcttatgtgattgtaaccatacattttctattastacaagagagttgcttattaaagccccgtaacagctgcatggatcacccattcctagtgagtgaggcattagtttgctggacccaagtagaaactcatggtgttctgacccctgtgttgtatttcctgccatgtgcctggcattctgggcacctgttgccataactaggttgactgcctgcaggatttgccatcaactcactgtatggtctgtgatggacccaccctatttctgatcaatctgcattggtgacagtgactgcacactctgtagatactatatgtgtatatttttacttcttttaatttgttaattgacagataataattgtgcatattcatgggatacatagtgatgtttttaatacatataatgtatggtgatcagatcaaggaaattascatatccatcatctcaaacatgtagcatgtttttgtgttgggaacattcagtatcctcctcctggttrtttgaaactctgtatatattatgggtccctagagtcaccctaccgggctgtagaacacaagcaagatccctcttctctagctataattttgtatccttgaaaaaatccctactccttccttcccagcctttactatcctccgttatactttttacttctatgagatcagtgttttttagcttccatgtatgggtgaaaacatggtattcaactttctgttcttacttcacttaatttcctgggaatactatccagccagaaaaaaaaaatgaagtcctgtcattcacagtaactgttgatttttgtcctgcctccctaacatgttcttagggatcttagataatacagaggaaaattcccttttgtattatacaaacctkgtaaagaaaaactgttttttgcctttcagaaaattcttagtttttttgttgaatctgtttcttgcattcagtcggacccctgactcagactccagtcactcacctagtcagtggtgataagggcaggtacctggttggaaggtacctgtgtgtcacaaaaggcrcaccagtcagtctaagcttcgactragttccaatgctcagggcagtctgtgtgtttaagtaggtgtgggtagtgcctagacctacacatctcattcctcctgccggtcagttctgtgttgaagcaagtcaacagcagccttccccagggagcattcctacctgggccagctggttactgactggtccaagcctgtgagcagcgtgcagatatcaatcagttacttgactgtccttggtcactaccatagtccataaggcagtccctaagtccatagtccrtaagtccaaactctgcctggagacttgagcctgctaatacacagggacttgtatttaataaacttttccatttgagggaagggattatttttccctggatgagaaaagccaagatgcatcctggggttcagtctgttaaaaataagttttagagaaagatggcatatatggttgtctagaatatgtaacaataaagcttaattgtacatatttatataccttcagtgttsccttttcccacggtgttgatacgaagcaagtgcaaatgatcgtgagccagctagtgaagaattcagcacaagtgttttgtcactcagtagttacgatgatactggggtatacatgatcttatgccaagaggcctttatatttacagtagaccaagaagcattcttgtctcaaggtgtctactccacatctgaaaaatatttccccgtgaacattttttcttgattgtattgtggtccagagatccaagtgtgtcaaatgtctctcctttagagagttctgcatcaggttctggaaggaggaaggtccttatcagatctccttcagcagcagagggcatgggagccccatgatgggatggtcagggggcctctgtacctgcttggtgtgtctgctgttgcagaggtgcgtcccaggctctgtcagtcacctgtgtcttgttcatygtctcagagatctcgttccgcgtgtggcagtgtggtggcagcctggagatcatcccgtgcagccgtgtgggacacgtgttccggaagcagcacccctacacgttcccgggtggcagtggcactgtctttgcccggtaagtagtgaaaggctgagcggggtccaaaacattgatgactaccctgaaagcaggacctgaccttgggctgtttgaggacagatgtccttcagtgggtgtggtgcatttatacaatggaataccacttagcaattgaaaggcgcattccacggatgcaggatacaacctgggcgcctttccagggcatgatgctgagtgagagaagcagttacatacatgattccactcatgtcacagcctcataaaaacacagctttagggatggggccagaccagtggtggccaggagctgtgatggcaggaaagcggggagtgtgactgcagaggggcagcaccagggatgtttggaggagggacggagctgttctgtctcctggttgtggtggtagttggacaaatcttcatgagtgtgaaggctcttagaactgtacaccaccccccaaaatgttatgggaaaattttttaaagaagaaagttcattttataaccattcaaggtgcaattaaaagcaacattgtcttagtccattttatgcgtctctaaccaaataccacagactgggtaatttaaaatgaacagaaatttatctactcatagttctggaggctgagaagtccaagatcaaggtgctggtgtctggcgagggtcttcttgatgtgtcatcacatggtgggagggcaaagagagggcaggaaagagcaagagggggccaaattctcccttttataatagcatcaatcccccccatgagagtggagccctcatggcatagtcacttcttaaaggtcacctcttaaaggcctcacctcggctgggcatggtggctcatgtctgtaatcccagcrttgcgggaggccgagatgggcagatcacctgagtttgggcagatcaggagtttgagaccagcctggccaacatggaaaccgcatctctactaaaaatacaaaaattaaccgggcatagtggcaggcgcctataatcccagctactcgggaggctgaggcaggaaaatcgcttgaactcgggaggtggagtttgcagtgggccaagatcgtgcctctgcactccaacctgggcaacagagcgagactctgtctcaaaaaaaaaaaaaaagcctcacctcttaatactgttataatggcaattaaagtttaacatgagttttggagggaacaaacattcaaaccatagcaaatattaaagtcaagctgtactaattgtgtataccacaagacatcgtgacacagagtcacgattcttgatggagagtagatatattttagtaaacatgaagatgccaacggaagggctttccgaaagtaaaatagcaaatagccgttctatcaagccaagtgtccttctagggaattctcttacatgctaaagatagaacagcgtacaagccagatctcagggagattgccttctcttgagtgtagacagcaaaacacacagctaaataaggtattttcaaatagtaatcaatgctgtgaagaaggtaagatgcagtcatgtggtcgggcatgattaggacaagcagtaggagaggttttcatggtcaagagaacctttgaggaggtgttatgtgagttcagacttgaaaggtgggaggaggtccctctgggaccccgaggaatcagactacctgcaggaggagcagatccaggctgctgaggtgcgtttggcatatcagccaaatggaagccaagggtagctggaacctagagagtaaggggacagtgcacaggggcagaagagctagacaggcccgggccatgcacctttgcaggtcatgggaaacgttggatgttatttgattctgaaggaaaacactggggcttttcagcagtgcctgatgtctgttttatgctttggaaaggtccgtatggttgctgggcagagggtggccaggtggtgaccctatggtgaaacaatggtacgagtgccccctccactcttggagccagaagcaagggtcctgtgagcactgttgcagtagcccaggccagagatgtgatacagtcatgcacctgtaacagcgtttcggtcggtgacagtagtcccataagattataataccgtgtgtttactctaccttttctttgtttagatacacaaatacttaccattgtgttacagtttcctccagtgttcaggacagtcatgtgctctacacgtttgtagcctagaagcaataggctgtaccatgtagcctaggtgtatattaaggatacaccatctaggtttgtgtaaatatactctatgatgttcacacaacgacaacatcgcctaaggatgcatttttcaggttgtatccctctcattaagcagcacctggctgtacctggagcaggtgtgtagcagtggagatggggtgagatccagctccatggtgaagcaggcagctgtttgctaatagggcggcagagagaagggaggtagagcgggaaattaatttagggtgatgcccaggagctttgttacacaactgcgctggcgtgctgcccctacagaaatagggaaagccttggggtgggtgtgggtgtggggattgctagcttatcttttgtctagtttttttcttgagacagagtcttgctctgttgcccaggctggagtgcaaaggtgcgatctcggctcactgcaacctccacttcccagattcaagagattctcctgtctcagcctcccaagtacctgggcttacaggcatgtgccaccatgcccggctaatttttgtatttttagtagagacagggtttcaccatgttggccaggctggtctcaaactcctgacctcaggtgatctgcccacctcggcctcccaaagtgctgggattacaggcgtgagcyaccgtgcccagccatttttaaactttttggttttttttcttttttgagacggagtttcgatctcgttgcccacactggagtgcaatggcgtgatctcagctcaccacaacctccacctcccggattcaagcgactcccctgcctcagcctcctgagtagcagggattacaggcatgcgccaccacacccagctgattttgtatttttagtagtacrtttctccatgttggccaaactggtcttgaactcctgacctcaagtgatccacccgcctcagcctcccaaagtgctgggattatagacgtgagccaccgtgcctggccatttttaaacttcttaaaagtacagatyatacaatacacctattatacagaagtcagatttttcacatagggaatctgatttctgagaaaactttaatagaaggcaaaataacaagtaatgcttctgaccaaattatcttctctcaaaaactatgtttcttcacaaatgttgaaacttcatttttgttctttattaaaacaaaaatgtgatcttgtacaataagctttacaaaatcaaacaaaaatatggatatatgtgctttttcctggggcagcatgagattctttatatagacatatcagacgccccacaccaaagccattgatacctaccagcaaacagtgagatttcagaaaacagtatgttaaagtactcaagacattgcactctttgttagaagagaaacattttcaaattgtatttcacagcccaggagcctgtattctcaagatttggaaaagaagctgatccagggtttcattattttggggcagcatggatctgattaaaaagccctgctgttgaccttcagccaggttgctctttacctcagttgactcatctgaaagataaagaagtggaattatatcactgtatttctgaggtctctttccagctgcagtttctcttaatctcctatacaggttgaatatcttttatccaaaatgcttgagacaagaaatattttggatttttgactttttcaggatatggaatatttatatgtactacctaatgagatatcttggggctgggacctaagtcaaagtacaaaatttgtttgttttatatagaccttatacacatagcctgaagttaatttaatacaatacttttcataattttstgcatgaaacaaagtttgtgtacattaaaccatcagaaagcaaaggcgtcactgtgaccgcccactggattcaccttgcccgctgcccagatggagctgacttaccaagatgggaattgcaatagagaaagagtttagttcacacagagctggctaagtgggagactggaattttattacttaagtcaatctcccccaaaattcagaggctagggtttttcaaggataatctggagggagctggggactagggagtgggtgctgctgattggatgaggtgcaatcataggggtgtggaaaatggtccttgtgcctgccgagtctgcttctgcatggatgggtccacaggacaagctggagatctggatggagtcatcagaagtgcagaagcctgaaaagacattacaaaaggccaatcttacgttctgcaatggtgatgttatctgcaggagtaattggggaagttgcaaatctgtggctgatttgttagtccaacaaaggcagtctggtacccagacaaaaagagggtttgtttggggaaagggctgttaccatctttgttttaaagttaaactataaactaagtttctcccaaagttagttctgcctatgcccaggagtgaacaagggcagtttagacgttagaagttagatggagtcagtcaggtcagatgccttaaactgtcaattttgtcattgttaaattttttgcaaaggcagtttcgtcactatctcatgttggtgctcaaaaagttttggatgttaggrcattttggattagggatgcccaacttgtaatagatgacatttaatatttatttaatacttatttaatactacctaaatacttgcaaatacctgcaaaaacaaggagggcctggacaaaagtgagtctccctcggtgccactgtatctgcagcactgagactgtttggtgtagataccaaataaatacctgagtgaaccaataaataaatgaataaaaggagctagcactgagtagcacatggagatcattccttggggctgcctagttatccttttctattacaaagacagaaaagagttgctttgcgtttaggaatttttaagtgatttagtcacttaaaaacttgagtgatttgaaaacagtatgactggagttgataaaacctttaaatcattaaggctgaaaggaacctaggacattctggaatcaaatcctttcatgtccctgttggggaaatccaggtgccagatgttacaagtatttaagttaataactggttaaaaactgactaggcataggttaaggcataggtcacttagcaaaaccccactaacaatgtttagtggctcttctgagaaatgatatgtatgatccagtatcccccagcactttaagtactcattgttgtatctgtatattttttaatagagagaaagtaaaaattcatcagtctcatcaccaaaccagttgtgccataacactctcataatttgatgaattcgtctgtcagtatctatttctgtctctctctcttgtttgctcactggctctccttctgcctctacacacatatccactatatgcaattctgcaaactattttattttcccacaagtccaggacatcatttctgtcaacatgtaagatgcacactcatgtttttagtggtcacagaatatttcatttgattccttcctcatatttagtcataaagtttctcttttttttttttttttttgctattataaacaaagcagaagtgagcatattttcacatgtatatttcattcctaattgattgctgccttgagataaatttctagaagtagagctgctgggtcagagaataggtgcattcatatgttcttatctgtgttgaatggcattatggataatagtccatattctacttactaaaatgaaaaagtatatatatcaccttatatgaaagatataggccccatacagaaattattttaataatggtatctcagatcagttgaaagtttcgccattttaaggaattattttaaaaggcgagcattacctccttactgtatttattttggaagaacacagtgccttcctatggggttcttaaggagggctagctatagcctgaagtgggagtccaccttatagccgagaccagaatatgggagcaaagaggttagctgtgtgcttgctacttcatggatgctttaagataattcttggcagaatacactgctgatacctatgcagatgatagcttttaatgcatgtcagacattcaagagtagcttgtcccaggggctttatttatggcaaatcatggttctctctatgagatttaagtacatggttttctttccttctagaaaagccggctgggcgcggtggctcacgcctgtaatcccagcactttgggaagctgaggcgagtggatcacaaggtcaagagatcgagaccatcctggctaatgtggtgaaaccgtctctactaaaattacacaaaaattttagctgggtgtggtggtacatgcctatagtcccagctgctcaggaagctcaggcaggagaatcgcttgaacccgggaggcggaggtttcagtgagccgagatctcgccactgcactccagcttggcagcagagcgagactccatcaaaaaaaaaaaaagctagtgcaaacatggcagtctttcagcttagccccgcagaaaagaaagtgattttcccaggaactcttatcttatgtagtctgaactttaatgcagagctgtctgatagtgtcgtagccgtgacggagaaggccgtggggcctggaatctccttgctgtgctctgtggccccggccctctgtggacgcgtaatgtgagagtttttaaagagtaactttcttttgtccttctttaagatatagaccccagtccctcctttaaaatattggctcgtgctgtaatttccactttgccttttgccctttgaccatctgtgtgacaagaaagccattccratggttcagtaagcacccgctgaggctggctccccacaggtccagctcgaggtgctggtggggayagcccaccctctgctgtgtgccgtgatcccagctggagctgctgcacacccagagggagccgcctcagtcacaygccagcagacaggtgcaaatggagtgatgcagacagaaagaaaggaaatcacacctcaagatttattttctttctagaaacacccgccgggcagcagaggtctggatggatgaatacaaaaatttctattatgcagcagtgccttctgctagaaacgttccttatggaaagtaagtggcagttctgccttctcacaattactgnggattcttggggtgtgggggtgggaggtaaggggctgcccccagcgttgaattcagctacccaggtgccaaggcgggaaggggttgtgggcacaggagcatgggcagtccacaccacaccacctgccccaaccctgttctcctcagcagattttcaagkttgatgtagaaagcccatctattcttaaaatttataaaggaatcttatttccctcttctccagtattcagagcagattggagcttaggaagaaactcagctgcaagcctttcaaatggtaccttgaaaatgtctatccagagttaaggtaagtccccagggatctggggtttcactttgtaagggcttagaagccagtaaggccatagaagcagcagaggggaaatggaggtggggctgcaggcatgagattgggcacctgggccccagtgagagcctgtggtctcactccatggtgtggagctgagaatctgctcccaagttggcctgctgctstctctgtcctgcagagctgccctcccatgcttcggagtcccagaggcagtcccccgggcctcaccttgtttttggcttgttctccattggcaaggtgatgggctgggtgacctgaaggactggtgtctgacaggctcttcgagtgaccaggagcagtccccagcctccgcaagcatgcagtgtctgcagccagccctcgatccccccgccaggcgcctttgcatgcctccgatctgctgcgctcacccttgctgctcctgtgggccagcagataacagcccccacgaggctccctcctcccagctaggttaatcacatgtgaaacggaagtaataatgctgctgccccacgtccctccggaggattcatggcagaaacacctttctgagcattatttccacacccagcctcttgttttaagcgaatacgagctccccatctggagggacctgctgataacctcgtgagaagacctatagrtccgctggggtggaggagccatctgcacttcatcttcttaaagggactgtcaggcaggtcgtgccttaatgcggcacattccttattctaaatattcccagagcattttacagcggctcacatatctccagcacagtgcctgcgaacgcaagacttgccaccattatctttccgctaacagctccttcagagcccttgtcacggagatttgttggacagttaggtaatgcggcctctctctgttgctcctgttcgctcacttggctctttggaaccgtttcctctgcttttcaagtaacatgccaggcgccaggtggcccatgccccctaggaggagaacaggagagaacacagcgtccttctccctcggatccctgccgtgcaggacagcttttgctggggattgagagcaccagatggtcaccagcgatggtcacctgcagcggcaagggtgcactggtcacagttgctggttgcagggccctggtcttcttcctgccagctctgtcctctcggccatgtgcactcaacccaaaagaacccattctgcctctgtgtctggccccagaatatgatgtctacacctcctgcctggtgtccctatacaacagattcttgactgtgggcactaaggcggctgctcatcaactctccgtcagccaaagaggggcttcaattcagtggattttaacccaaccatgccactcactttgctttttcagtcacagttgactgccatttctcacagaggtcacccatggtttgtagtgacactgggccccgcacccactgaagaccacatctgaggcactgagcaccatcctggctggcaaatctgcttcccctgtctgtggggggtgagggagacatcagcctcgtgttttgtgtctgtaatatcaccgccgtttactgagtgcctcctacgagccaggcacygggccgtgtgctttacacgaaatgttctatgtaacacttgcagcagatctgggtagcccatagcctaccaaagggcaaatcgagcttcagagaaagtgagtcttgcctgaaagccagcacctggcagaggtgggctgaggtttggatctggttctgaagcacgttgttcttccccgtggctgtggctttgttcacattagaccacctgacaagtctgcccacctttcccgtctttactggataaaggtcagatcctaagtgtattggaaagttcaaggcaacaggatctgaccacattgattttctaaatgacttccaataagactaacattgaagagtatcaggagcttttccttcctttccaaaaaaaaaaaaaaaaaaaaatgacctgatatagaatataaagaatacttctgcaacatacagtcttaaagtgttggaagtccagagcctgggagaaatgccgtgtccctgacacacactacctgtggtaggaagaggcacgatgcctagtcactgggtctttctctcgttcctgtcacctgtcatgaggccactgagcaaaggggctggtggacgggagctggtggtcatgkgcagtgaagcaggtgattctcacgttgtttttcagggttccagaccatcaggatatagcttttggggccttgcagcagggaactaactgcctcgacactttgggacactttgctgatggtgtggttggagtttatgaatgtcacaatgctgggggaaaccaggtatgtgcatggggaagccaggtcacctgcaggcccagagagagcaggagttgggggggtcctgatgttagaagtcccagctgccacctttctcctgggrtgggtgatgtctrtgaggaagcacctgkctcctgctggccacagcctctttggcagccagcaccagggccagatagaatgtcacacactttggtgcatcagctctgtcatcagcttcggaccaggctctgctgcagcggcaagggtgcactggtcacagttgctggttgcagggcyctggtcttcctgccagctctgtcctctcggccatgtgcactcaaccgcaaagcacccattctgcctctgcgtctggccccagaatatgatgtctacacctcctgcctggtatgcctatacaacagattcttaactgtgggcactaaggcggctgctagttatagcccctgcctgttagataatagcttaagatagaagatactcagtattaattgcttccattgcacacatacacaccttttctgagaggcataaaaatgcacaaccgccaggcgccgtggcgcacgcctgtaatcccaacactttgggaggctgtggtgggtggatcacctaaggtcaggagttcaagaccagcctggccgacatggtgaaacccatctctgctaaaaataaaaaaaaaattagccaagcgtggtggcgggcacctgtaatcccagctacccgagaggctgaggcaggagaattgcctgaacccgggaggcagaggttgctgtgagctgagatcacaccattgcattccagcccaggctacaagagcaaagctctgtctcaaaaaacaaacaaacaaacaaacagaaaaacccactaccttctcttctcccatcattgcaaaggagagacaaaatgaaggcttgatgggcccagctgagacttcggattctaaaaacdgttttcccatgagataataataggaattgggtgaaatgtgagcttcatgcaccaaagggtaatcctgtgtgctcttacccccttcctgaaaacttgcctggcactgggagagcctgcagttttaaaaaaggcaggttaactccgtgtgtgtatcctgaatgtattgatttcttaactttctttaactggaagtatttttgaaagggggcatgtgcttttgtgtaaagctgggtcctcctcccaagtgagtgtccaggcagactgcaatccacaaataccttgactcctttcttcacttggtgatgtggttttagcagttacttgcaatggcctggacatcctaaattagaagagagagaggaacctgcctgcctggggcttgactgggccagtccccatccagcatgggcatggggcaggtagccagggcctggccctggttcccctaaatctccagcccttaaatagaagatacttggckttgatgagttagaaaatgagagagagcctcattttctcgtgtggttttggtagagttgatcctggattctccgtatcagcgtcarcagtctcgatggttcagaatagctaaatgtgatgctatgtttgggtaagagccaatgggtcaggtttgccgacagatatgagtgtgcttccagtgcctgtgcacgtgtgtgacacacacacacacacacacacacacacacacaatagcacatatgctcatcacgttctcacacaacagctctcttctcctgattcccgggctcagtccccctctcttccttgtgcacatgcacctagactcatgtgctgcttctttcttctttttctgttactcagatgcagagcttgttttgctctctgtttcatgtacatgacttcatatcattgatctctgtccttttgataaatattgttggagggttttytacttggcrgtactattttgctagagaaagggattagaaggcaaacaaagcaatcccttgccttccagaactcacagttgagcagaggagccactgtgggttatgaaacagaggaggcacctgctcacctctgtgctgtccaggtggctgcgcctcctgttattccggctgccctcacctccatgtttaatcactgggcttccctctgctgtgtggcaggactgcatgccattcccaggctcccagggcctggcgtctgtgtgtagcctctgggctgtgaggacactccccagggagcaggcttcaggtgtgggtgcacacacaagccagccttcagctatagcctgagggaccagttttaggtatttcacactgtagcaggtcagcccccctgggtactcgtcacaggccccacccgtgtcaggagtcacctggagggaggaacccatacagggggagggaagaacaaacagagtggaagacgaagcgggtgaaaggaggaggagccagctggtattggtggggtgggcagaggcggaggggaaggtgccatccccaccgtgtccatgcttctgtgtccttgtagctcctccatccaagaccctgctgttaactgtgttctcagtcactgctgggaagcggggggcccaggggactcactcagaggtgatggagggcgccgtgcggtgctgctgtgggtcccgctgtggtccaggtgtgactggaggaggcgtctccgctggctgtgttccttctacactgataacagcgtgtttatttccatggtttgggctttgttcttgagatctggaaagcagtgagcttggggagagatgttttatgtgtttccatctagaaccatagtgaaaatccaccgaaatgccctcagaaaagtggagctctgtgagggagggggaaatgatgggtctcattctcagcaagctgggtttcatctaaaccggacagacggtgctgcaaggcttggtcgatcacacagcattaatgcagatttcaccaaatgcagacatgtggataattcgtgtagggttgggtgaagcttacctctggtctgtggatgacaaaacggacgaggtgcccacccaggttccgtactgtctgggtgttgggcctcttgtgatccctggccagcctcacctccgtgtttaatctctggagttcccactgtcactctgcagtgttctgatgatttatggaaggttggagaggtcactcctttctgtgtcagcgcctctgctggaaagcgacacaccttacgctacagcacattaaacagaagcgtgtgctcaggccccggccgagagagttcgtcatcagagtctcgggccccagcttcatcccctgtgcgtcaggctctgtgactggctcaccccccgccagcattgcaccttaattaccgcacagctagtaacacgagacagagtctgggccctgtggaggtggcaggtctacgggaaccaaagactttgtctgtgtagctgctgcctgtgaccctcctcacctgccctcaggaggacagcctgtgtcccgccttcagggctgtggccctcaccccccggtcctgcccagtagagagtctccaggattcctctctgcacagtgctgagggcagccacagcacagacctttgacacagagcgcccattccttgcctctgcaccaacttcaggggtcagcaaagggctgtgccaaggagtgaacaagatcgggtctgcagggtgtgtctcccactctgcttttgcttttccttcttgctgttgtgcagccattactgttctcacatgtgggctttcccttcctttccagcagtaagtgctgactccctgctcactctctgtccccctccaatggccacatcctgggattgctcagagaaattttttttttctttttttttttttgagacggagtttggctgtgttgcccaggctttttttttttttttgagacggagtttggctgtgttgcccaggctggagtgcagtggtgcaatctcggctcactgccacctccgcctcccaggttcaagccattctcctgcctcagcctctcaagtagcagggattacaggcacgtgccaccacacccggctaatttttgtatgtttagtagagacgggattccactatgttggccaggctggtctcgaactcgtgacctcaagtgatccacatgcctcagcctcccaaagtgctggggttacaggcgtgagccaccacaaccagcctgcccagagaacttttacaaaatgctgatgccaggtgctatgcccagagagcctgatctaatttgtctagggtcagagggcaccaccagatctctaagagmtaacaagtgattctaaatgaggatttggcctgctgtagtggtacacacctgtaatttcagcactttaggaagccaaggcaggaggattgcttgaggccaggagttcaagaccaggctggacaacatagggaagctccgtctttacaaaaaaaaaaaaaagattagccagttgtgatgacctgtgcctgtagtccaagctactcaggaggctgagatgggaggattgctaaagcccaagaggtcgaggctgtagtgagctgtgattgcaccactacactccagcctgaacaacagagtgagaccatgttyctaaaataatgtaaaataaattagggccgggcacggtggctcacgcctgtaatcccagcactttgggaggctgaggtgggtgaatcacgaggtctggagttcgagaccagcctggccaacatggtgaaaccccgtctctactaaaaatacaaaagattagctgggcatggtagtgggcacctgtaatcccagctactcggggagctgaggcagaagaatcacttgaacccgggaggtggaggttgcagtgagccgagatcgcaccactatactccagcctgggtgacagtgtgagattctgtctcaaaaaaataaataaaaatttttaaaaaataggagttgaggagcaagcgttttctagtggaaagatgaacacatcagcacatacaatgtgatgtgagatggcaggatgacatgatgtatgttacaccctcagcttgggagcaccttactgcctgggccagtctggggccagtgggctactatcagtactttccaatagaaccatgtgctatgatggggatgctctacatctgccattcagtatatcagccacattgtggcaactgggcacttgaaatatgactagtgtgaattacaagtttaatttcatttcattctggtgaatttaaatgcaaatggccctgggtgccctgtagctagcacattagacagtacggctcagatattccagctcacaaacccactgtgcgtgagtcctctctgaaccgatagaaagtgatgcttttttgcatagcgtgtgacacggatgagaaacgagagggtaagtaatatttcccaactgaaaatagggcctgktgctttggaagagtgaggtttgttatctggtttccggctgagccttggcagacacacaggaaatgagaaaattaatggccatgccttttaagagtggcagctcaaaaaagcatttcttaaatatttatgaactttattttacaaattcagataattgaaatgcaacagaagaacaaaacggcaactagctctgttgtttgcccagctgaattagtttttctggaatcctgtgtaaagtctgctttacagtaattaagcacacaatagcaaggaggttgtaaaaacattcagacatgatctttaactgggtgtcagcagaccatccagcatccgccaacacctgctgccagggacagtctggaacccttctccataccagcgttgtccctcttactcaggactctcctcttcactgtgagtgggcgtctctgtgtaccacagtttcacacatcctggtggtgtccccagcccctgtgagtgcagggacggaacaatgtgcttcttcctggccctctccatcctgaacgccatctgcctatgggaaacacacacggcttcctctctacactccacaccttccatactctgtgacccagtgaataggaaaaaagctgcttttcctcctttatactctcacaaaacttctcacctctgacaccagccctgtgggcttttccccccacaccaagcaattctccaattctccaattctctgcggacactgagtgtcatgcctgtcaactcagttctgacactgcctacccagagttagcacagaccccacgggttatgggcttcctcccacaagatgcttctactccagatgccagtcacaagtccaagttgtcacctgctgtctgactgtaaatcagggctcccgcgacctcgccttgaattcattcatttgcaagaatagttcatagaactcaggaaaacggtttacttcgtggcttacctgttcattaggaaagactgaaacccaggagcagctggacgggagagatgcatagcacgcggtgtggaggtggggtgttggagcttccacgccctctccaggtgtgccgctctcccagcgcctccgcatgtccggcagccacatcccggagtgcaaggactttgacggaggcctcatcacatgggcatgatctccagctcctcttcccttcccagaggatggggtggcgggggactgacggtttcaagcttctcagcataacctggtctttctggtgaccagccccgtccaggagcccattagagttgcttcattagaacaagacactcccatcacccaataaattccaagggagtaggagctgtttgttgggaaccggggtcaaagaccaaacactagaatgaaagatgctcctaaaacccctgtggctcaggaaatgacaagggttttaggagccttgtgattgtgccagagaccaaataattatttttatgatgtcacactgtcctagagtatgggtgacgtgagtgcctgtgggtgcttggaagagctggctggaactcacccatgttgaatgacagcatcatagaatgttgggattcgactcagggtcgggtggccttccccagagaaggtggccggcagggstgggtgggtcagggctgcctccatgccgtgtttggaatgctacagtgcacaggccaagcaggtgcttctactctaggactcttcagagcctttaatagactgaatttccgagagataaacacagcacaaagtctgtttcccaaattcatttgacctagaatccgtctttcctagrattcctcacagagtagaatgtgaggaacactaattaaaaggtgagaaaatggaagacccgggaagtgagcaggcttgcccaagcctccctccctgttaggggaggaggaagtcttcagacaggtgaaggtgtcttcactgattcctagacgggtgtccgtgcctctgcatcccctctgctgatgctgagagctggagatggtgcatcccgccagtggttgtataaggtctgaatgctagaatctttagggtttggtttggtttggtttggttcggttcggttcagttcggtttggagacagggtctcggtctgtcacccaggctagaatgcagtggcacaatcacagttcactgcagcctcggcctcccaggttgaagcaatccttccacctcagcctcccaagtagctgggaccacaggcatgcactgccacacccggtcaacttattttttatttttagtacaaacaaggtctcgctatgttgcctaggctgatcttgaactcctggcattaagcagttctcccgccttggcccccaaagtgctgggattatagataggcctgagccaccacaccgggctgcatcttcaccttttaatgtttttctaatgacggactrtttgttccaacatgatacagatactagacagtgaggcttctttaaacactatttgttcctttccttacctctgtttccaagaaccaagaaaaaaacagtgtcttcatagcacataatagtgcctgaagttgcagaatacatttatttgtgtgtctttcatgttccccactagaaagggagcctggctctgtgacagcgcyggtgtcatacaggtgtgcagcaggtggtcatgggacagaccgatagaaagacagacagacagacggaggggagggccactgcagcgtgctggggcttagagaggaaggggatggaagtggatagtgagtccctgtggggttttaaactggaaagggccttgctgcccctcgatattaaggggtgttcatccctttgagtgggacaaatggagagtgatggtcagaagcctcaccttccagtccctgctgtggccctgcctggaacaggctccggcctcctctgccacctgggaccatgtctcatttagtatccaaaatggttgtcctctcaccctgtcacagcctttaacttgtgtgtgtttgtacatatatgtgtgtgtttgtttgttaacatcatggtgtgttatttaaacactctctagctcagttttctcatctataaaatgagaataataatagccctcatggagctgttgtataaagggcttaaaataatgcttggcacatagcaccccattaaatttagctgtaatgtattcaaagaaattcatagatctattcctccagktttcagagggcttcatgagcacccatagatcaattagcattcacttaggaggctatacacgatatattttgcttacatatgcaatgtgttatttactacagttcacattcatcaatgctgtttgcaggccatacctgcatgagggcagagtcattccaaaatagcatgggtggaccagttgccaactgtctacctggtgtataaccaagcttgtgccacagtttttacagctcacattgaattatagaaaaatgaacaaggcagtctaacttgtatttggggctaaaatagttaatagttttattttagttactgaggtcctcaaagcacttctgcacatcactcagccaacttactgctcagttgtgaggttctcccacatctctgatgttataaatttgcccttaggcaaaaagtaattgtttcgttctcagttggctcaggggttctgaatctaagctccaccccgtgacccatttcctttttgagccctcatcgatgccccttctttcctttcacagccyggtgcatagcaygcctctgacttctggttttgtgttccaggaatgggccttgacgaaggagaagtcrgtgaagcacatggatttgtgccttactgtggtggaccgggcaccgggctctcttataaagctgcagggctgccgagaaaatgacagcagacaggtacggcttgcaggcacccgtgggtgcccgtrattaacccagaccagggtagccacggcctgcgccctcttgctctgtgctgcctctcaaagcatccatctctgcgtgtacttatgtgttcttttgcatcactgtgaataatgtctagctgccctattagacttaagccacaaacctaatgttgcttatttctgattatattctcattctcttccctatgccgctgaaaatttaaagagaaattatctacttttgtttattcatcaaatacttttttctatttcaatttacaaaaattctaaatgattaatgttcacatggatggtactcgatacataatgcaagtgtgtgtgtctatgtgtgtatatatgtgagcatatatatacacacatatatacacaccacatatatatacatgctacatatatacatatatacatgccacatatatacatatatacacgccacatatatacacatatatacatgccacatatatacgtatatatatacacaccacatatatatacatgtatacacaccacatatatatacatatatatacacaccacatatacatatatacacaccacatatacatatacctgccacatatatacatatataaacaccacatatatatacatatgcatgccacatatatgcatatgtaaacaccgcatatatacatatatacacaccacatgtatacgtatatatagatgccacatttatacatatataaacgccacatatatatacacaccacatatgtatacatatatatacatgccacatatacatctataaacaccacatgtatacacgccacatatatacatatgtaaacaccacatatatacacaccacatatatatacacgccacatatatacatatatacaaacaccacatatatatacatatacacacacacaccacagatacatacatatatatacatgccacatagatatacatatataaacgccacatatatatacatataaacacaccatatatatacatatagatacatgctacatttatataaacaccacatatatatacgccacatagatatacaagcacaacatatatacatgccacatgtatacatatgtaaacaccacatatatatacacaccacatatacacaccacatatatatatacaaacaccacatatatatacatatatacatacaccacagatatatacatatatatacatgccacatatatatacaaatatacatgccacatatatacatgtatatacatgccacatagatatacatatataaatgccacagatatatacatatataaacaccacatatatacatagacaccacagatacatacatatatacatgccacatatatatacgtatatatacatgccacatatatatacgtatataaacacatatatacatatatagacaccacaggatatatacatatatatacacaccacatatatatacatatatacacacacacacatatacacacagtttctttaaacatttcagaatagactttctacctgccttgtaagccggttttctctgacgtattcccttgtggcagcttgtggacacaccctttctcaaggcatggggtaacagttagtgtcaggaatagaaatgcaagcacaaaaggtcctccctgtatgcccatacttggagtgcctgcccctgttcttacagtcggtccttagagatagatgggatgtagggaaactgaggcacagaacctactggagccaagagcctaagccagcttctagtctaaccctgatttcacaacagaaaagtctcagaaagtcattgcctccaccctggagtcatctgggaagaccaaggccaggaccgagtccccggttctgaccccagttgtcagggagacgcctgcagagggccctctttcacctgtctgtctccaaacccctgcgccagctctgggtgctcctccttccctgctctgcagagtcccagcctgtcctggcagtgggagcccctctctagggttctgctcacaatccgcatctctaaatgtccatctgtgttgatgacttgataccaaaatgtgtaagggagtgcctgttaaacaagagaaggctagcaccgcttggacccaaaccacctagaaattgcctcactcattggcccctcgagaggaagctcctcgagggcaaggctggcatctgctgagccaagtactgggtgagtctcaaacacattcccctgggatgtaacggagcagagatgtctttggatgtaatggattgataaagtgatgactttagttgacacctttttaaaaaacaaatattacttcaatattgcttaatttcaagaattgacaggtgtttctgcttcagtcccagttttggggaaccataactgacacggcttaggacctttgtgaagcatgaaaagacctataaataataagtttttctggatgtatggcatgtataaatggggatctgttaggttttaaaccccaagactcaggctattagagaggatgtgggggctgtttcagtagagtctgactgccttgaaaatctgcgctccccacccccaaccacaatcccatcagacagacagatcagagcccacaaggccacctgtgcgagacggagctggggttttgttgttgtttttctaaggttcttgatttagctgatgctttgacacatgacaggcagtccctccagtggccagaatcagattccgttcattccgaattctttgttgagaagattcctggctgctcagagtaacagggcagcctcaatacatacacactttacatgacaatggggaaaaacagcatgaggggtgattgacagcaacgagggagctggaaatgaaagaggcaatgacaggcacttagcaaaagcctccccggctcctctgattgcactgtctttccctgctggcaagaactccaggtgagcaggtggacggaaataaggaaagcagggtacaagtgacaacatccttgtggtgtttcgcgcaggtcgggtccccagcactgggctcctctgcctgcaccggctcctccctgcctcactcactggcccctcaagaggaagctccttagcaaattttatcttggaactgaactggctttgccagttggaacatttggtttccaggcacgtccatgttttcatatgttgtgcatatttgcagagtcaaaggggaaagggaggcaggagtgagaaaatttaattctgcaatgtcaaaaggatttgcaaaaaatacttaggtgaaggagctttcgtgcacacagtataaaaaattaattagaaccacagacttcattatttgaaacgagctttggggaagaaaaaaatgttactttttttttttaagaacaaacattagagatttttaaagggggatttttctgtttttctttctttttttttttttttttaagagacaggatctcactctgttgcttaagactggagtgcaggggtgggtatgaccatagctcactgcagcctcgaactcctgtgcccaagcgatcctcccacctcagcctgcaaggagctaggacaacaggcatgcaccaccatgccctgctaattttttttaaaaaaaatgtttgtagagatgggttcttgctatgttgcccaggctggtcttgaactcctggcctcaagcgatcttcctgcctcggcctcccaaagtgctgggattagtgtcgtgagccgcctgcactcaggctgaaaggggtatttatgttacttgctaaacagggctcctcagatttccttcaggctgggttgtgcactttgattctggcttagttggtgggtaacgggtatgtgggttgagtttggttgttcgcttgatttgagtgttagtaaagaggcatcgtaccctgtactttacaagcggcatgttcagaactcagcaaacattggtccctgccatacagagcaccagggggctcaagggtagcagagacaagtttctcatatccaccaaggagcttgcacaccagtagagaacagactacatagaaataggcttctcaatgctatgttctgttcaaacaaccatctctcttcctgacatttggcctgacaccgttcctctggctcccccgagcagaaagccctaagtgggagcatggaggtgcccagaccaaggcctccaggcagggctgctttccaacagccaggggaggatctggccctgcattgtgtggatcccttcttggggtgaaccatcactggatcaagctttcatacgaaggcatgcaaattyccctacatcaaatcctgtgttaatgacgaaggggtgggtgcccagagctctggggctcagaggaggggacacccacagaaagtttggggcaggagacgttctgagttttgatccaaggcagagaatatgtttccttcctgggtcccagcagcacctgtggctggtttcctgtggggctgctgcaagctcctcggccgttcagatgagaggctgggaaaaacgtgtctatctgtgagtttttaatgcagccacaaggtcctgaattcacacgaatctgtttgtactcctttgcttgtgcccacactctraggcactctcctgtgtcttgcagaaatgggaacagatcgagggcaactccaagctgaggcacgtgggcagcaacctgtgcctggacagtcgcacggccaagagcgggggcctaagcgtggagrtgtgtggcccggccctttcgcagcagtggaagttcacgctcaacctgcagcagtaggagggtcygggaggccctgccgtcctgtctcctgcaccaytgggtggagtctggtgatcacattattgattatgtttcttaaactttcygcgaaactaatatacctcagtattccatcatggtctgaaagtcaaacttcggcaaggcacggacgactgtgcagacacagcagcggcaagaagcgagaactgccctccccctcctctcggtgcagcccagccgggcccccttccccaggccggagcgcccctcttccttccagctttcacttctgccggctccgcaactgagtgacacccagcgacaaccgactggggagtggtagaagcaactgaacggatgcgtgcgagctgaggacagggcgggaggagggggcacacatgccccakgggagcgaggagaactcttgaaatctccattttcaatcccttcgaaatcacgtatggtttccacaaagccgagtcgtgtcacgtggcaggtttacgtcaatagtccctctctctgctcctccattcgcaagtgtcttcctgggccagactcccctccacctcatgtacttgctatattgaggatgaagttttctatggtgggacactaaatataaagctatatagagaaagaatgtacggtcagttccctatggtttctgtagatcatcgtcatcttgtatattccccacaaagccgttcgcagcttccgggagaaggggccagagcccgktggggccagtttctcacagagggaggaggtggcctttgtcccctggagcccgatcagccagttggtgctactgctgtggccagctggggggcttcctccagaccaccggcctcrgccccggcatccctgttgggcgtcagcctgagagtccctactgtgcgtcagaatccaccttgcgtgctgtgcgtatctgtgaacctggagcggttacttattttgacagatatcactttgggtctttttacattaaatttcttttctctaaggaatataagacataccccatagctctgygtgagccagcaataccgctgccccctggcgacagggcagaccaatgatgccaggcagctgtcacacgctagtattggcttcattgtgatctgagccctgcmygctgggccttcagaattaatggccagcagtgtcagggatgagcccgtcagccagggcacaggcctggctcacagtcctkcacacctgctggcctggggagctccagccaggcagcgagtcctgccccgcccgcagctccctcccacaccccgcctggccaagatgactgcttcagggggctttggggaaagaattaggaagggtcagaaccaaacaatacctgctcatttacactgaggattcagggcgggagacaggagccttggggtcctgttaaaccacagacagttatgaactgaaagtcataacggggagaggtgcctggcttctacctgggtgctcaggaatgttcctcgtcacccctgccactctgtggtcggtgccctgcttcctcctccactcctggccgccttctccagcgccrcacacacagatgctcrgtctcagagaggctggcacggcctggcagtctgagaaaagcgtcagttaggcacacctgcaggcccctcggtgggacagcggcggccttggagttaggagccaccctgggaggttgtgccggtgccatgctcctccctgtgtcttgtatgaaaggggccactgtgtgtcttcctccccggcgggagcccyacrtgtgtgcactgtaggacagcggccccgaggtggaagcctggctggagggctgccctataggtcttctcttcccgcctcccctgccatgcaaccagatgtgttstgagtgggcagcgtgcccccacgctggagtaactccgcacgcttctgtctttcacggtgggcgctcggggggagcctgaggaaaacccccttaggtacctgtgcgaggctgtggagtgcaggccagagcagggtgtgcgtagcccccagcacccaggttcttctgtcagaccctgtgacctgcgagctgctactactgtaaggagggaaatggatgaatctggctcgttttaaaatcrcgttttctgacgaatcctttgccccttcacctttrccccgcccgcacccctaggccctctcagccttcctatcatcycacgtgtctacccagacccttgygcggcccatgcccygggggcggcgtcctgtccctgagctgggaggcggctttggatggtccgggcgtcaagagcaggggtgggccggggaggggtcctttgcggtgagctatgtttacatgacacagtgtgccaaagtgacttactgcggttgcgttagtttytartcatcaggactatctcaccctcccactcctgtttttaaaactcagaattctttcctaagagcccttcgagcaaagcgtgccgaagttagttgtcttctctgtgstggtcctttcttatgtcctcataaaagctcagatgatggtatctgtgagtatgttttgcaaattcaaaatatagtttggtaatttttttttccagttgatttttaaaaagaactgctgtacagagcttgtactttgtccattttatagatggaaaccatccttgaaaattgtttaacttaaataaagagaagatactttctagataccgctctttgctggccagagtctgtcctggtgtgtgagggctgggtggggtgggtgtggggactgggattggggtcagccttctgcagctcctgctcagtggctgtttcttatcaccttytgcagatgygcttttattgctgtgccctttggttggttattcttacttgtaataataatcattatcatttgtggagtgtttatgatgtgccaggcacccagccaagcccttaaatacatttgcattttacagccacaggggaagctggtgaaggaagttgctagcctgctcaaggtcacgtccttcctgtgtacctgcctggagccagcccttggcactcgcacccagaccctgtgctccaaaccaggggacaaatatttttacagtttttcaagtagttaagatttatagacttgtttaccagttacctggggctcttcggttccatccaggcgtctctgaggttcttcagatactatttgttttattttattttttttgagacggatctgtcacctaggctggagtgtggcggcgcaatctcgactcactgcaacctccgcctcagtgattccagcgattctcccgcttcagcctccaaggtagctgggattacaggcactcaccaccatacctggctaatgttttgaatttttagtagagatgaggtttcaccatattggccaggctggtcttgaactcctgacctcaagtgatccgccagcttcggcctcccaaagtgctgggattacaggcgtgagccactgcacctgaccttcggtaccttttaaattcctgcatttgagccaggccacagtagtgcgtgcctgtaatcccagctattcaggaggctgaggcaggaggatcgcttagcccaggagtttaagaccagcctgggcaacgaagtaagattcccatctcaacaacagaagcaaaagtacctacatttgaacagccccacaagggttcaaggaaacataaccttgaccaattatttaacaatttttttttcaagacagagtctcactttgtcgcccaggctggagcgcagtggtgcaatcttggctcactgcaacctctgtctcctgggttcaagtgattctcctgcctcagcctcccgagtagctgggattacaggcccccaccaccacacccggctacttttttgtatttttagtagagacgaggtctcaccatgttgcccaggctggtctcaaactcctgacctgaagtgatccacccgcctcggcctcccaaagtactgggattacaggcatgagccacygcacctggcccaaattatttagcaattttgattgacattggggtgaagtaggaggttggccactggcaggactggcccaaatgagtgtctgaaaccttctagagaccacatgtaatccattttctttccctattatttgggacaccaaaaatttgctgccatctgagaagactaaaggaactctcagcatcgttttgtagcacccactggagccccttagggatcccgtgtgtggtgcctgctctggcaacagggagaggtttatttattcggtaactatttgttgaaaacctgtgttgtgctgatagtcccaaagaagacccaggctgaggaggaaacacgttaaatggtgacaaataggacaagccaaatgcaggctctcggcctggcgggtgctgcacccttgttggagccgtgtctcaaaggttctgtgggattcggacttggcgagggagagcgttgccggcaggggctcagcgtctgagaagtcccatcaccaggacatagcagcaagatcccctgatggggacagcctgggaggaagaggacagactggcaggcgggcccgtgtgtgagcattgtgaatgctggggaaggctgtgggggtggggaatgacaggagttcctgactggagcagagagggtcagacttgcaacgcttttcagaatgaaatatccaacccaactcagtgattggattctgcggtataacttcacattgtcaagaatattcaaccagaaaaataaaatgcctctgacacactcttctgttcatggacttacctacagaagagaagaaaaaactctcttctcagcagttcttgcctatttctcagcaatctcctaatacaattgctgtatttgattttatgcattgtttgtgcctgcaaataacatacatcctgtttccaaaagctgtcgtctcccctagggttccaaagaggagtgttcgcttagcagtttctgcctgagctcctggggtcccaggctagggtggtctggacaggggctacagagaagaccttttggtcctcagcccaggtgacacccacgggtgagtcagatttgaaccagactctggatgcaattataaggagcattgtagagcagtagccatgatttcctcttcaggaataaagacccagtctcaacaaggtgccagcctcctgaagggcgtggaaagaacccttgcggggcaccgaagccactgattcacactcgctgcggagtttccctgagactgtccttcttgctctcaagttggcagaattgtctattggagagcttccataaaaagcccacctaaatggaggcgagattaaaagagatgttgtcttgtataacaagaaatccaaaggtgatgggattccacgttgatcctggggcttgacattgctgtggacaaactgctccctatccgagcgcccctcccctccatcccctcccaccgtggttcatttagtacagtgggtgctcgggtctccgtctgttcacgttgctgtaaaggaatattggaaacggtaggttatttggctcatggttctgcaggtcgtacgaggagcatggctccagcgtctgcttctggggaggcctcaggaagcttccactggtggtggaaggcagaggggagcaggcatggcatggcgaggggggcgggaggagccaggctcttttcaacaatcagttctcactcactcctgtgataatggcaccaagccattcaggaggaacccacccccacagtccaaacacttccaccacgcctcacctccaacattgagggtcagagttcaacatgagacttgaagtggacaaacgtctaacatttatcactgaacagacctggagcgtgctgcctcctgtgcatctttgttttttgacttagggaagatgcacctttgccagtgaccaccccaccccttagtctccccaccccttagtctccccacctcttagactccccaccccttagactccccacctcttagtcttcccgggtcgcactgcccagagccgggtccttgggaagccgggaagcagtcacctcccacctcctcccatgtcatggaagtgggttttgctggcaaggaggacagggaagggatgactactcattgagcagcccagtgcccaccacacttgccatcactggaagaattctggcagcagcagatggacaggggtggcagcgtggtctcaggattccttcatcctaagagaggcagtcgcagaccctgttgagccccttcaccctgttgatgccatggactcctttggcgtgagccatcaactcagggcctcctctcagaaggtgttcaaatgaataaaacacattgattacatgggattataaagaagtctaattatgccaagacacagttatcaaaatattttcctaatatgtgcttcttaatgcattaaataacaagtcttcctgtctaattgctgccataatttaaagtagtgatgagcataaacaatgttttgaaaaagctacaataattaatgtgatgaaaatatctgtgattttttaattagtgacaaagttcctattttgttgtcgacattcgttgtagagtgttccatttcagttggaggttgtgaaaataacaatatcatttttcccatctaagttgctggaccccctaaattctaagcatctccatgtcggtgagatgcatggtccccactgtcctggagcctccgtgactttgtcatctccctgctgcagggtcaaaggggtgttctccagcgcccaggcagctgcccagagctctaatcctgattccaagagcaaaaacgggaacagaccgcccttgaggacaggcgctgctggagccaagagactcacagtcggtcacctgatttgcatttatattgagaaatcacagctggagggtaccctggcagatgggtgaggctgagccactcaggctctagggaagccaygctgtcctcacagtgcccacccattgatctgtgacacgtgggccaaggggcgtgggattttgctggtcagcttctctccctattgaagccgcatgggaagraagtgggmagaagactgctcggcaagcaaggagccagagtactgaatgcaaggaccttcacaaagtgcctcttgaggtggaaagacggaggcgtttctgcgccgctgcgtggcctcagccacgaaactgtcattcggagactgcttggcctggactccagctcaggatatgcagggtgggtgctgcctgatgcctcatctgggcctgccaggtctgcggcaggagggcgggtaggatgggaaggagcccatcctgggacagagcatgtaaatgcatagccaccactgtcgggtgccacacaggagtgaagtccaggagtgaaaagaaacacttgagggaaaggaagaggggcgaacagaggaggtggcactgggtgcggcttctcaggccctggaatgggtgtcccacccttcaaataacctctcatctctacacaaagacgttaccccattttacccctggggaaactgaggctctgatcagctaagtcatttgcctaatttacccacacagtgccaagttaagcacccaggctgtgactgtcctcttcctggtccggtggggacacggggacaggaggtgatgggaagtgaaatgggcctttggtcgtagccaggggaggggcagtgactcccgttgctaacagggaaagctggagtcgcctccgcccgccggctcatgagggctggaggggaggagtcaggagactcaggggtgggagagatgggctccaccgctgcatcctgccacccaccacctgtgtcaccatgggatgtcactgagcctgctctgtgaaatgggaacccttctgttcaccctggaaaatcattgtcaagatcagagaggaagcacgaaaagtgcctcctggccatgcagtggctccacctgcaatcccagcacttgaggaggccaaggcaggaggattgcttgagtccaggagtctgagaccagcctgggcaacatagtgagactcccatctctacaaaataataataataataagctgggcatggtgatgcacccctgtggttgggctactcgggatggcttgagcccaggagtttgaggctgcagtgagccataattgcaccactgtactccagcctggagcaagaccctgtctcaaaaaaaattttttttaatttgcgctctgatctaggccagcccagagctgcagccccggcccatgagcctccccagctttcccggcaggtctgtgggccgtccagaaggaaagggactggagcaggggagccaatgggatttccacatctgccaagtcttcagggaatgtgggatggcacggggacccgggaaataagggtggaggtgtcagccctgcatttttacagcctagaagtgacgtcagagaccaccagagagggggacggcagagagagggaggacaggggcctggaaacacagatccacacacaggctggaaaggaccgagcaagacactgctggctgggcagaggcagctggaaggaaaggaaggaaggtgcgggacaaacgaggctgccccacggcccgagccagagcacagtgagctctgggaagaggtacctggatttttggcaacaaggaagttggtccgatgccagcaggtgaggagcatcctcctcatgtgaggaacacggggctggagcaggggaggacagggtgtgtggccactggttcaggtggggatgtctgggacggacctgagaagctgaggctgatgggacagcgaggggacagagaactctccggaaacttctggctccggggcagagggccgagctaaggggtggcr

SEQ ID NO: 93279 - DNA, 41861 bp, Homo sapiens
tttagtagagacgggatttcaccgtgttagccaggatggtcttgatctcctgacctcgtgatccacccgcctcagcctcccaaagtgctgggattacaggtgtgaggcatcacgcctggcctaacatttagcttttaatccagacctttagttaccaataattaatgatattacagtgaaaattctagctttctcttcagcagtaaaccctggagacctacgattaaagctatcgcttgttaatatttcactttcttacagacccagcattaaagctgaacagagtactaaccactatatgatcatggtgagccactggagacaaaggagcatttcaaacaatcagacctgaatcaaacctcttatctttaataagtcttacctttgttaaaacgaaagagatttacaaaagaactataagctgatttaaaagggggctcatcttgatcaggagtcaaaggtttaaagtgtgtgagatgagaaggactagtaggagatcgaggcaaatcattagcagagtccagtgttggggacgtcttatcatctgtggccatttcatgagtctgaaaaacaaaagaaacaagcaaaaatctaaattcctcaggaagctcaaaagttgattccaaacagcatcgaaatatccagaaaatcctattctgtgaaaagtcagactatgaaaacaaacagtaaataaatctagcttcatatattccaaaggactgaaaacactgctatctaaatcataagagccccaatcatctacaactatgatctgatagccaactcaattttaaacattactattcaaattatagaaaagatttaaattaataaaaatttggaggtaaagcattaatgtgagcaggcagaagaaaaataagcattttcacatcatttctagctctttcattttaagatgtttcggaagaagggatacacaacagctttttaaagttatggggggaagctagttatacaacacacacataaattcttcagtcttattttccttatttcaactttttttttttttttttggagatggagtcttgctctgtcgcccagactggagtgcagtggcgtgatcctggctcactgcaacctccacctcccaggttcaagtgatcctcctgcctcagcctcctgagtagctgggactataggtgcgcagtcaccacgcccagttaattttttgtattttcagtagagatggggtttcaccatgttggccaggctggtctccaactcctgacttcaggtaatccacccgcctcagcctcccaaagtgctgggattacaggcatgagccaccatgcctggcctcaacttttatattttaaaaagtaatataaaaatcattatatttctaagacgaggacatgaaagtcattctctaatgacatgtctacaaaactttaacaattacctcaagctacacttcatgacctatgacaactactcaaatcaacaagttgttccccactatctttgctcctaaacacatgaacctggtttttcctccctttaagcctcaattcatagacattaagatgaagatcttcttaaagggctttgtttctaaataaccaaaaaatcatatttcaaccaaagcaataaagctaaccacatcaccagatggaagttacagaaaagtactattttctgccatattgatttatatttcaaagagaagaaccatggataactctaatcattaaaataatgtagactggtccaggcacggtggctcacacctataatcccagcactttgggaggccgaagtggacggatcacctgaagtcaggagttcgagaccagcctggccaacatggtgaaaccccatctctaccaaaaatacaaaaattagctggacatggtggcgggtacctgtaatcccagctactcaggaggctgaggcaggagaatcgctggaacccaggaggcggaggttacagcgagccgatcacgccactgcactccagcctgggcaataagagcaaaactccatccacaaaaaaaaaaaaaaaaaaaaaatactgtagtctggcccagacacggaccctgcaagagatgggtgcccccatccgcacactgtcctttggccaccagacatcatgcctcccaaggatattctgggaggaaccagcagggccctccatctccaaaggtgctgccaagccagcagcagcatgggcccctccagccaagaccaaagctgagccagctatcccatcccccaggcccctgagaaaaccaaggagcccccagttgatctctccaaagtggtgatcaagtttaacaaggatcagctggaggagttcaaggtggccttcaagctgtttaactgagtgggggatggcaagatcccatacagccagtttggggacatgatgggggccctggaccagaacctcaccagtgccaaggtgatgaaggtcctggggaaccccaagagtgatgacctgaagtcccggcatgtggacttcaagactttcctgcccatgctccaggcagcagccaagaagcagaaccaaggcacatatgaggactacctggaggggcttcatgtgttagtcaaggaggggaacagcaaagtcacgggagcagagctcagacaagtcctcaccaccctgggagggaagatggctgaggaggagatggagactgttctggcaggacatgaggacagcatcaactaggaggccttcctgaaacacttcctaagcctactgagctctgtagatccctagggcccagacaatgggccccctgcaggcagaagcatgttccagccaccaggaggctacctactgtttcaaaataaagacaaggttcctcccttggagaaaacaatatatatactatagtttataatctagtctccactttacaaagaggacattacagtctcggtaaaatgcttttcacattcaaaatcatagctaccatctcattttactcttacaatcctggaaggcacacacagctggctttatgacattttacctttgaggcaaccaaggtactctgaacctaaaacaactttcttgggggtcacacagacattagtagaactgtcactataccccaagtctcaccccaaaagtattacctaaatcaaaattacttttgtagctcttcacacttcccttttagcctatccgcgttctctaactacttaaggctttgtctgatcaataatttaattaataaattaaggcagaaatgaaaccactgacttaaacagaattttggcaatacatgtttattggggggggaagaaaaagaggaagaggaaggggaaggaaagaggaaggagaaaaggaagaagaaggggaaggaaggtttctaatatcttccactgagaataatcatcaacaatccttctgaagtgtcatgacaattcagcaaaaagtgttgggaagtaagctgataactgaataagtatacactcaaaaaaaagtttgtgttttttttatattaaaaaaaaaaaagaggccaggcactgtggcctcatgtctgtaatcccagcactttaggaggctgagacgggaggatcgcttgaggccaggagttccagaccagcctagtcaacatagcgagacttcatctctattttatttagggaaaaaaaaaaaaaaaaaaaaaagagctctggagagaaacgataatgtgatggccgtaacaaccacccctggaaaacagcctacattctactttgacacaagtaatgtcagaggcagagatggcattctgcctaaagagtcttagaattacttctaaaggttatctacacaaaaattatactcggctttggaaataagaagataaaaattcccatgaaaacacttagcaagtgtagtctctgaaatataaacccaatcatatagttaaccctaataattacataatgacactagggccctgaaaaaattatcttataactctcactctttagcagcttaacaacgctttaaaatataaattaggactctttcctgagtggtaatcagtcctattaacctacctacccaaagccttctgatatatcaccaatacttcaccatttctaattaaggctactaatatatgcagacctactacaaactatcagaagccagtcagtaaaggccggacgtggctgctcacacctgtgatcccagcactttgggaggccgaggcaggagaatcccttgagcctgggaggcggagactgcagtaagccgagatcacaccacttcactccagcctgggcgagggagggagacccccgcccggtggctcacgcctgtaatcccagcaccttgggaggccgaggcgggtgaatcgcctgaggtcaggaattcaaaaccagcttcgctaacatggtgaaaccccgtctcccctaaaaatacaaaaattagccgagtgtggtgtcgcgcgcctgcaatctagctactcaggaggctgaggcaggagaatcgcctgaaccctgggaggcggaggttgcagtcggaggagatcgcgccactgcactccaacctgggggacagagcgagactctgtctctcaaaaaaaaaaaaaaaaaaaactggcaatgtaataatttaggaaagctgaatattggaaatgttagcttctatcaacaaagatttcttgttcaatttttgaccaacacgcttaaaggaaaaccagagcaggatccagaaagcagaaaaagggagaacacaggaaattagccttgctccacagaagagatttaacctacacaatctttgtcacaaacacaaaagaaagaacattttttgtaagaaaactgacagagtgggagttttggagtgccaaaaaaggggctcaaataaatcagaaataagtacattataccaagcgactacctctattgtcaacactggacatattttacaacacaggatgcactgcgtcaatagtagataatgaatcatgtatacacatcagatacacacgaataacttgctttatacagaattctagcacttcttatatttcttgactgtcttaggaataacctctgattgggcagaaaacccctaagtcctaaaagtttccaacacattccattctcatccttttgttgggaacattctaagcaaagggtaaacactaattgggaaataatgctcctcctcaagagactccaaaacctaagttgaaatggaatcgtctcaaatagcagaggcaagcatttaaaaagacaaacacatatttgaacccccacggttggtatcgtttctgcagctcatgaactttcttttccagcctacggatgcgcctctgacaaactcagaactcatgcactcagagggaaaagtaactgtactcttcccctcctaattaagttcaggcgtaagggtcgagagagaggcaaaggaacttcaaatgtttccaaggaaatctcaagggccccacctggcttccgtccccactcgccagacaaggcagccggggaatagggaggacaagctaattctaaagccagattctctgcccttccttgctcagccggcagccaggccctagcccccgactgcggagccctggttctcactttcacctcagctctggccctggagctccccataccggcctccttcccatgctgagccccagccggccaagctccaggccccctcccttacctgcgcctcctgccccggccgcgccggctgccccccgccccagcctccgcttcaacggctcagcccccggaagtcggcccccgagagcggcggtgggctcctcaggccgcggacggttgcggcaggaagcgaagctgcttacatggttgaygcggcttctcgcttccccccccaagactccgccctctgttttcctgtcccccagtccgaaatctttcccgggggccggctcctcccagcccggccgacgctcggatcagatgctcaggcagaaggagtccagcccagatcgagtcgtcctgatcttttggccgagattaggccgcttcagccttcctggaagaagccagggggactgcgcgcgtgagcgtcacgcatgcggggtcaacggatgggtgcttggtgctctgggcactgcaggggtgctggctggactgcggttaccgtatgtgttcgatactgtgggcactcataatatgttattgctttgttgtagacagttcactcgtgtagcactgaaccggagttagcgatgactctgtttccagacttgcatgactccaccaataaccagccatatgatcttaagcaaattgctcatttatttaggccttagacctctggtgtgtaaagtcggattaataaaaggactcacttcttaatacttttttgagattaagtaaatgcacttaaagcgaatggcacagttccctgacccagagtaagtgatgtcggctttatagttaattttttcatttaggtgttgtgttgcaaatgctgatgcaaataaagttaccaagcccaagccctatcttgttcagcttggctagagttattcgtcatttctgtcctgctgagagcgcagtgcagttaactgcagaaaacatgctcgccgcagttgtggggcttggtaggggaggatggaaagcagacgaaacctaaagggaaatgcagttttaaattctgtgagtccttttcctcaagagttttgtcaaatcccagcccagttttcctggagttggaargcaccatcgaaacctgcaggttgagtccagtgcaaatcccagtcaccatcctcagctgggcccttcagcaatctttctgggagtctgtagtcagcttctcccattccttattactgctgcgtcagaccaccaccacgacccccacattaccttgaccatcattctcatcagagaatcatattttatacccacgtgaaaaatcccaaggtatctgggcgtgacccttaacaagctaattccccacacaccacaacatttacctacatccacatctgccctggtctgcctttctccctcatctctctgaggaaggggcctcttcttccccagctcaatccttttggcccccaattcaccctctcctgtctgggagcttgcaccgtatctgcaacctccccttttccaatgactctgcctcctcagcccataaagatgctcaagtctctgccttcctttaaaaaaattttttttaaaaatttaagataagcaaaaaaggccctcgtaattatcaccatatgttaatatttcataaacctacaataaagtatgaaataggtacagagatcatatgaaaagaataaattgcccagccacgacgactgcagtgtatgtagaaactccatctatggtttaaaaaaaaaaaaaaaaaagtgcactccgcaaatatttttgagtccctaatttaacctgcagtgtgttagttatagaagcactacactaaggatagaattatgaacgtatcccactgcttcacttgactagcctaaaaaataaaaatatatgtgaacattacacagtccatgtcctcaagaagcttaccgtctaatatctatattagcttacagtttaatttctgtggaaaagagattgaaaactgggctactgtttttgcaaaagaaatcattttagattctcacttcacactagacatccaaaattaattccagatgaattttatctgtagagagattatttgtctgtgtatatatcctcctcaaaaactttcattcaagcacagatttaggattcttgctgaatcaattattgttcgatgatattatacttctattcctctgtatgtattagttgaattttactgcaactaatagcgttccatctttttctttctttctttatattggttagtatgactttggactcatttttttccaacatgttatagttcattactgccactattcatttctgtgctccaggtgtctccgccttggctggtgtgagccccttccagcagactcctgagtccatttgacatgcctccattaccttttgagcacatcttactttttgttctttttctctctccgccaccccttacccctggcaaccaccattctacccactacttctatgagttcaacatttttaaattccatatatatgagatcttgtggtatatttctgtgtctggtttatttcacttaacataatgtccccaggttcatccatgttgtcacaaaagacagaatttccttattttttaaggctgaataatgttccacagtatatatataccacattttattttatttttttgacatggagtctgtcaccaaggctggagtacagtggtgcaatctgggcttactgcaatctccaccctctgccccaacccccccgacctccaccccacccctattctcctgcctcagcctcccgagtagctgggattacaggcgcctgtcactgcacctggctaatttttgtatttttagtagagacggggtttcactgtcttggccaggctggtcttgaacccctgacctcgtgatccacctgcctcagcctcccaaagtgctgggattaccggcgtgagccacagtgcccagccccacattttctttattcagttgttcattgatggacacttaggttgatttcatatcttggctattgtgaataatgctgcaataaagatgggagtgcagatacctcttaaaaatagtgattttggctggacacggtggctcgcgcctgtaatcctagcactttgggaggccaagatggaaggattgcttgaagccaggagttcaacaccagcctggtcaacatagcaagaccccatctctataaaaagattttttttaatttcaataaaagaaaaaatagtgattttatttcctttggatatataccctgtagtgggatggctggatcacatgatagttttatttttaaattttttggcaacttccatactgttttccataatggctgtactaatttgcattcctaccaacagtgtgcaagggtttccttttctctattttctctccaatcttgttatcttttgtctttttgatatagccattgtaataggtgtgaagtgatatctctcattgtggttttaatttgcatttgtctgatgattaattacgttgaactttttttcatatacctgttggccatttgtatgtcctcttttgagaaatgtctattcacatcctttgcccattttataatcagattatttgctttcttactattgagttgtttgagttccttatatattttggatattatccctttatcagatgtatggctggcaaatatttgctcctgttctctgttgtctcttcagtctgtctattgtaacccttgctctgtagaaacttctcagttttatgtaatcccatttgtctatttggcttttgtagcctgtgcttttggggtcatatctaaaaaatcactactcagaccaatgtcatggagcttttccctctcgttttttacagtttcagggggtacacataacgtcttcaatttatttgagttgattattatatatggtatgagataagcctctaatttcattctcctgcatatggatatcccatttacccattactacttattgaagagaatatcctttccctatagtgtattcttgtccccttattgaacaattgactgtaaatgggtaaatttacttctggactctttattctttttttcactttttatttttttttaaaaatgagcatcctattaactgatagactctttattctgttcagttggtttgtctgtttctctgccagtaccatgctgttctgattactgtagctttgtagtgtattttgagatcaagcagtatgatgcttctagctttgttctttttgctcaagaattctttagctattcagcctcttttgtcattccataggaattttagacttttttttctagctgtgcgaaaaagtcattggaatttttatagggattgcattgaatctgtggatcactttggacattttaacaatattaattctttcaacccataaacatgagatgtctttttatttatttctgtcttcttcagtttctttcatcaatgttttataggtttcagtgtgcgggtcttttacttctgttaaatttctttctttttttttttttttttttgagatggagtctcactgtgtcacccgggctggagtgcagtggggccatctcggctcactgcaacctccgcctcccaggttcaagcaattctcctgcctcagcctcctgagtagctgggattacaggtgcccaccactacgcccagctaatttttttgtatttttagtagagacggggtttcaccatgttggccaggctggtctcaaacccctgacctcgtgcttcgcctgccttggcctcccaaagtgctgggattacaggtgtgagccaccacacctggcccgtatttatttctaagtattttaatatatttttgtagctattgcaaataggattgttttattgatttctctttcagatagttcactgttaatatttggaaacagtactcatttttgtatactgattttatatcctacaacattactaaatttgtttattctaatagttttttggtgcagtctttagggttttttatgtataagatcatgtaacctgccaggtgtggtggctcacgcctgtaatcccagcactttgggaggcagaggtgggcagatcatgaggtcaggagttcgagaccagcctggccaacatgctgaaaccccatctctactaaaaatagaaaaattagccaggcatggtggcgcatgcctgtagtcccagctactcaggaggctgaggcaggagaatttcttgaacccaggaggcagaggttgcagtgagccgagatctcactgctgcactccagcctgggtgacagagtaacactctgtctccaaaaaaaacaaaaaaatcatgtcatctgcaaacaggtacaatttaatttcttccttttcaatttggatgccttttatttcattcttttgcctaattgccctgactaggacttctagtactatgttaaatagaagtggcaagagtgcatgtcttggtcgtgttcctgaccttagaggaaaagctcttttttactgttgaaatgatgttaactgttggtttgtcatatataacctttattgtgttgaggcatattcttgctatacctaatttgttgagagcacttccttactttttgacccagcaggctcatcttgaactttccctgccccgggcctagaatcaatcagctctcaaaggagcaccaattccttttagtagggatgcagacatgtttgtaaaaattatgaaactaagttccagctaggatgcaataaaattagcactctcttacactgcatgtgaaaatataaattggtatattcccccctagaaaatgatttggtggatttaacaagcaccttaaatatatttatacttcatgatctaataattcccattctagcaatgtagcccaaagaattgatctgtgttttaaaaaaggaagataaagacatttgtcacagccatttaaacattaaagaaacaaaaaggaaacatccaatacaaaccaacacaaatgacatgaaagcaatataatcaaatccattctaaccaacacaaccaacatggaagtaatacaaataattttttaaaatatgtagacatcaatagtatgttgactaagacttttaaaagcatttttccgccaggcgtggtggctcacgccagtaatcccaacacttggggatgccaaggcgggcagatcacttgaggtcaggagttcaagaccagcctggccaatatggtgaaaccccatctctgctaaaaatacaaaaattagccaggcgtggtggcccgcgcctgtaatcccagctgctcaggagactgaggcaggagaatcacttgaaccgtagaggtggaggttgcagtaagccaagatcgtgccactgcactccagcctgggtgacagagccagactccgtatcaaaaataaaaaagtgtttttcttcactttacaatcaaccttcttgaaaaggttttcttgtctccctttccataccccccattcatgcttcagtcccctgtagtatggcttctatcttctgatcctcgtagaaccattccacttctatcttcttcatcctcatagagcctttttactaaaagtgcattcaagaggttttccttttgccaaaattattttcagaccctgtctttttcttttaatctctctgtagtactccctcttttttgaaaactttcttgtctgttggcttctatgacatcaggctctgctgattctttgttaacccccagactctccttctcattctctttgtgggggctccttttcctctacctgacctttaagacgtaagtgtccctcagagttctcactgagattgacttttctccttactttgaagtcctagataatatatactctgtcttcaactgttatcaagacatgctaaagattcccaaatttctttctccagcccaccctttctgaactgcagatgaggccaactgcctcctggacatcatcttgctgtcccatggcatcgcaaagttaagaaaccttaaacttaacccatgatcttggccatcagatctgtgactctatgtatattccttctttgttgaactgcaccttgtctcccaaactccaaattcagaattcccttttgccgttctctctctcataatcttcatggacaatcaatgaccaagctctattcattctacctcagttttttttcgataatcaaaatgaaaatacaaccacattagaatatttatgagaatcccattatctggatgagtgtgtcaaaaccaaatgcttacagaaatttcatggcctgtgtttccatttgtgtttataacagtatttggggccagactattaaaatactcagattcttttactggctaaatgaaagacaaatgatgtcaacacatgaaatattaaccaaatagagaggggtgctgggctaaatgaaccatcatatgtcatccagtaaaataggccggctatgtaaaaaagaacgtgcacatggccaggtgcggtggctcacgcctgtaatcccagcactttggtaggccaacactggtggatcacgaggtcaggagatcgagaccatcctggctcacatggtgaaaccccatctctactaaaaatacaaaaacaaaattagccaggcgtggtggtgggtgcctgtagtcccagctactcgggaggctgaggcgggagaatggcgtgaacccgagaggtggagcttgcagtgagctgagattgcgccactgcactccagcctgggtgacagagcgagactctgtctcaaaaaaaaaaaaaaaaagaacctgcacataaccagtgaacttcatcttcccatttcaagaagtaatttaatttcagctaaatgttatttgttgtatttaagtgatattaatggtgatgtattgttttctacttttctttctagtcattttatctataaatttttttattttacagttgtatgagctgtcagcctaaggagcatatatctagttttatgcatatttatagcaatattttaatgtcaatcctagggatctgaaaaataatttttttaagagataggatctcgcttggttgccccagttagagtgcagtggtgcaattatagctcactggagcctgcagcctcgaattcttgggctcaagtgatcctcccacttaagcctcccaggtaggtagaactataggcgcaagcttgcctgtctaatttttgtttgtttgtttgtttgtttgttttgtataaagagggtctccctatgttgcccaggctggttgcaaactcctagcctcaagcaatcctcctgccttcgcctcccgaagtgctgagattacagacttgagccactgcacccagccagatttttcagtggaaaatcaactcctccattactggcttaggaaacactgttttagatgctgagactccaataactgccacctttactagtacattggcttaaagccaaatttgcagccatctctagcaagtgtttaggatttgatataacatgtttgatgattgaatttgccttggttctatataacatcctatagctattcattttttaaccttatttttctcaattatagtcaatgtttttattgtgctatatttgatgtgtttttatggctgccctacattattttgggaacaagaaaggatatgaatgcttactttcggtagggagaaaggggtaataagcaatgtgaacctgatataatataaagtaattacagtctcaggtgtcttagggcatcagattcaagatgaaaattaagagtggagaaaagaaagggagatcagattgttactgtgtctatgtagaaatggaagacataagaaagtccattgtgatctgtactaagaacaattattctgctttgagatgctgttaatctgtaactttagccccaaccctgtgctcacagaaacatgtgctgtattgaatcaaggtttaatggatttggggctgtgcaggatgtgccttgttaacagtatgtttgcaggcagtatgcctagtaaaagtcatcaccattctccattctctattaaccagggacacaatgcactgtggaaagccgcagggacctctgcccaagaaagcctgggtattgtccaagctttcccgcaactgagacagcctgagatatggccttgtgggaaaggaaaggccttacatcccccagcctgacacccgtgaagggtctgtgctgaggaggagtagtgaaagagggaggcctctttgcagttaagaggaaggtttctgtctcctgctcgtccctgggaatggaatgtctcagtgtaaagctgaccattcgttctattctgagataggagaaaaccgccctgtggctggaggcgagatatgctggcagcaatactgctctgttactctttgctacactgagatgtttgtgtaaagtgaaacataaatctagcctatgtgtacatccaggcgtagtacctttccttgaacttattcatgatacagattcctttgctcacatgtttcctgctgaccttctccccaccatcaccctgttgccctgccacactcccctcgccaagatagtaaaaatagtgatcaataaatactgagggaactcagagaccagcgctggtgcgggtccttgcacattgagcgccagtctcctgggcccactgttctttctatatactttgtctctgtgtcttatttcttttctcagtctctcggctccacctgatgagaaatacccacaggtgtggagggtcagacccccttcaaaaagctcatatacctctctaaacagttctacaggaataaatggaggtggctgccaatatcccttaagccacctcaaaaaccaagttgacaaggtgtatgcttttttcttttctctcgggaaaaataccagtgccctctggtgtccaaagtgcaccttgagtagtaccacgtagatcagtttatcttcaaagaataatgtactaattcaatgttagagataattttttaaaataaattttggaggctgggcacggtggctcacgcctgtaattccagcactttgggaggccaaggcaggcggatcacttgaggtcaggagttcgagaccaacctggccaacatggtgcaacaccgtctctactaaatacaaaaattagcttagcatggtggcacacctgtagtcccagttacttgggaagctgaaagaggagaatcacttgaacccaggaggcggaagttgcagtgagccgagactgcaccagcctgtcagggcaagactctgtctcataaatmaataaataaataaataaatattggagcattaaattctgggcagcaatatacaagcatgctattgtcctacaaatcacaatataaaatactctttattttcatgtttttgagagcaatgaacacacaaaatataatctctggaggagactaaaattcttttttcaatccaccgttttctaaggcttcacatctctagtccaacttcattggatcacagataatcccccgccaactgagcatggtggctcacgcttgtaatcccaggactttgggaggccgaggagggccaatcacttgagtccaggagttcgagaccagcctgggctrctgaaacccatctctaccaaaggaaaaagaaaagaaaagaaagaaagaaaaattagttgagtgtgattrtgtgcacctgtaatcccagctactcggaaggctgaggtgggaggatctcttgagcccaggaagtcaaggctgcagtgagcggtgatcgctccactgcactccagccagggcaacagagcaaggccctgtcttaaaaaagaaaataataagaatcccattcattatcttctaatgcaaacaatcaatggagtttctaaagacctagacataggtggtgtcaggacctgcttctgtaacttttccatcctttgcattaggcagcgcggaaccccctaggcgaccccgcgctggccgggagcactctttcttcagmcaaaggtacgttccattaccgcccctcgggggcgcgctaggcagcgggccggccaagctgccgccgcccagggcgccctgtcccgttcgcttttgtgccgacctggaaacactctgtggtgctctagattgttacaaagttcggggtggtgcagccccagcgcgccccgctccccggcctgcaggtggcatacaagtctcttcgctgtcgggattcgggactgaatctctgccgggcggcaaccccttcccccaccgggatcaccgggaaagtggcaccatggattctccatctttgactgtggccacgcccctctcgctgactccgcccatcccacgggaattggcgtgtggcgattggaggcgtgtcgggggcggggctgggggaggtgggctgaggaggcggggcctgggaggggacaaagccgggaagaggaaaagctcggacctaccctgtggtcccgggtttctgcagagtctacttcagaagcggaggcactgggagtccggtttgggattgccaggctgtggttgtgagtctgagcttgtgagcggctgtggcgccccaactcttcgccagcatatcatcccggcaggtaacctcaggctccaaggggcggccccggtccctggctgtggaggggtggctctaattccgcagaaggcaggaatggggtaaaggaaaaaagcgcagatcttgggtgtggagggagtcaaggcctgcgtgcaaagaagggaacaaatccaggtattgagaatgggaaaagaaaagggaaggaggggatgctggatgcttggatatgcagaaggtctgcttttgggcctgggagggagaaactgggcggtgaggaagttggatgcaacgacaaggggaaaatcaggtctgcacttgggttggaaaatcgaggggtggaagttgcaagaatgcatgtagaagactaagcctggagtgtaggaggaagaaaacgtgcagcagctgggggctggatgcaaagaaggctgtaagccgcagacgggcgtctgcaggcaactcaggcggcgaggaatagccttgaagccgatccctcgcgtccgccagggggcgtggaggggcggagctccagcggccttcagaggggtcgctaggccacacggggcgagagggggctgggggaaacacccccgccagttccgggtgcctggagtttaaaaggtcccagcaccagcgaggggaggggaggggaggggcgggcgtggagacctggaaggaggtaccgatccagccttgattgcagccctcttgcacaacggccataaggacgggtgcaggccaagagcaaggacatgcaaaccccaagacctgctaacgggcggcgaagcgggggcacgccctcgcacacgcagagataaattgtgctcccatgacctttatttggaaagtgcctgcgggcctaaaattggcctttgtcccaccgagtacactcagcactgtactttaaaccggataaactgggctgtctggcaggtactaaaaacagctaaattctcctgtgagtgttctgtatgttaacacttttattccttgttttgttttaggcgataaactacattcagttgagtctgcaagactgggaggaactggggtgataagaaatctattcactgtcaaggtgagaattagcaaattttcccccttcttctgtactttctttgatgtggcagtacagtgtttaactggtcttgggggcaggccgaggcactgcaagggaatgagtgaggaatatttccaacaacgaattccaacagcttccttgtttcttttaatacagtgtcttatctgcaagagatcctttttgcccagaaattattgtagttcatgaactcggcaaaaaacaatctggccaaaaacttgaggttgatgaaaataatattaaatggctcttttttttcattaaactaytctgtattgttattccaggtttattttctggaattgcacaattatgttaggagataggattcagctacttyatatgagctggtgcctgctggtcttggaacagcccttccttctgaagttgggattgggttggagacaaaatctgaggggcaacaaaggtggagaagtcagtccagtggggcctcaagcccatcccatggaaatcagatccagaagaaatacaattatgttccacatggtagtaacaataaagcttcactgttttagttaaaagatggtaaaaatttcatggctaagtaatgtgaggaaaacctgaagcgtctgaagtatgcattatgagataaagaaagattactgcagagagtacagttgctttaactgagaaggaaatagtgaactaaaaagatatcagtcttcacattttaggtacaatatttgacctctattaactgtatttgccatcaagaataaattgccatgtcatgactgttgcatcatactatatagggacatggccatggaagtgtattatcaggaaccagataagttcactgcctccttttttgctttgttttaaaacaaggataggtgtgacagtggaatcaaacatgaactgaatcatatgctttcagctgtactacaaattatacttgacattacaaatgggaagtaattgactcatccacaccattctgttcatttcttttagtctagttcagttccagaaggttcccccaaaggaatctcctaaacactagtaagaagaattctagaattgcgaatttgggaagtgaaaatgggcctggggattggaaatacatccaggcttgtcaagaaacagacgcttactgtctactaatcattacatttttatttaaagaccaaattactttagctcaatttttcaagaaagactattttaggcttcttatctaataattctttaaagtcaattctcttgacttttttagtccttaagagaataaaagcaatttgcagctgygttgttggattaaaaaagmgtttcgattagagcatcattagaaggaatagataacttttagcaggctcagagcttcttctgcctctagggacaagctgggacagtttcatttcttccaaagcgtccaaccttgcactttctgagaatcagattgatttgtatatgctacccccacaccctatccttaaagtgctgtcttcctaggacaatgcacagtttgtcctatcccactcactagcagcttacccttgcctgtgaacagccagaagaagatgacagggacatgcttgggtcctgggcagtggccctactgtatagarattcttctaattgagaaatcactttgttgtatttagccccacatctccaatgtctgtgttatctctaggaaaacagttccaccaggaattcttcgtctcgcttttagacttaaagtttccctgaatatgggtcacaggaaccagctgaatctcctcatggctagttatttttattaaataacaaaaacagcctcttaaaggaggagaaatgctagcactcaccattctggacatcttgagagcycagtaaaatgatgagttggactgaagtgttcaataaacatgagattgtggaaataatctcatttcttaagacaaaccagtagttgagaataatgattgcattatgaagggcacgttatagggtcaggctctgccacgctctagctaggtggccttgggaaagctcttttttttttaacaaagtaaaatggggaaatgatggccatttttttggattgttatgagggctagctcagaaaccgcgtgtgaaacataacacaatactttgttcagagaagatactcaattctaatggtaaatagaattgctgttactagctttttattcaactacacataaattgaattgcatgaattgttcttttagtagtcactacgttgtttatataaacactacgttgtttatatatttcactttataatgaaataaatgacaaggcatgtattttttttttctttttaggtttattgaagtcaaaatgtccaaaaaaatcagtggcggttctgtggtagagatgcaaggagatgaaatgacacgaatcatttgggaattgattaaagagaaactcatttttccctacgtggaattggatctacataggtaaatgagttacccctccgtgtagcaaactcagaaaggataatctggctgggcatggtggtgcacacgtgaagtcccagctacttaggaggcagaggcaggaggatccctcaagaccaggaattcaagtccagcctgggcaacagagtgagaccccatcactttaaaaaaaaaaggaaaaaaaagggaaggagaaacaggaaaaaaaaaaagaatataatctgaattattttgaggtgaagttagctttttttatatagatatagctgtgttttgtgaataaagtttgttttaagcctaaatatattcagatgaatcttctaattttaacatactgctagaaaaactggatttatcatctaaaagtcaagaattataagggaaagaatgattttcagattcttctaaccttctgtttcctgtgaaggttttatttgtaataaaacagtggctaagaatagtacaatgtattgagaaaagggaaataagagaggatgtaagaaacagtaaactaaatgcagttaacacaattttgtcatttcaaactcaattttctatcactttacttagtcaatggacctgtttccttttcatgcctcaccttttgcccttttcatacaattgtagtgcagaaagaattcatgatgtttcttagttgaacccctcctttccagcaaaattcccttaaatcctgtgtccctttgccctgtgtgtaaagtgcctggggacagaggcaaaagtctatgtaattctctcatttttttcgctgtgtttttcataaacttgcttctgttctttgtacctttaggtagagatagaatttttaaaagggtaaagtggctgaagactggcatagaaaaatattgagcaacacgtttcagccaaactattggcaactctaagtgtgtttgcctcagcccagaattagtcatcaaaatttgtcctaaggacctgtttgagtggagacatttaattcacataatgtcattaaacatactttttaattgttctaaacctaagctgctgatgtctatattgaaatcatgataaatagaaatcatgataagatataaatacttgcagaagtcaaccaaacataagaaattaggcataaaaacatcttccaactaggttaaaaaaaaaaaagcatcttaggaactcctgtttcaggactttacatgacagtaggtgaactggcagggttcttttccttataatggctgcaactaaagatgctttgagcctctttagtgtggaatcatgaggagttttaaaggggagtcactatgactaggaggaaaaaatttggtggctgcagactagataatttttggaggctcaaacaagttttaaatttttccaaaattcctattattatcactgactggttctttttcaggagaatggagcaggtagtttgttttatgtaggctggacagtggtctgggcaatttgttccttcctttcttatcttcttagaaatgttaagaagacaagcaaaaaatctaataatttgctgatagattctccttatgagaaatggttcctaggaacttgaaaactactgatcatacttcctgttggagttgggattggatcaacatttcctatgcaagaagataacaaaggacatgactttgttagatttatatgaattatctaaagtcgaagcagttggaagttatttttatttggaaatatgtcaagattactatctctttgtttgcatcatgagttgggtaggagatctaagaaaggaagataagggaaccaaaaagaaatctagaggcaggttttaagagctgaaaaaccttttaaatccttggagaacagaataaacaaaacattattttgttttcttgctttttaacaaactattgcatgcttcaaataaagctttgcagtcattttctatgctccctggacaactaacattctttcagctctgaatgacctgcaatctttgtgttggtgtatattaagctattactctctggtatgtagaaaaccattgatggattcctttacttacccaataaattgtaggcttgtttccagagcaaacacttgctcaagaattacagaaggaattagctgggcatggtggtgcatgcctgtagtccccgctactggggaggctgaggcgggggaatcacttgaacccaggaaggcagaggttgartgagccaagatcgtgccactgcactccagcctgggcaacaaaacgagactcatctaaaaaaaaaaaaaaaagggaaaggctcattttatgactractggcattaatgaagtagtcattcgcatttttggcatcaactgtcacatctttacctcccaccacttcaacgtcaaaatacaaaaaatcctttaasccctcccacccccttttatttttaaagagcaatatttactaagggaaaaaggtggtccttagacttacacttattatactaattatatggagagaaaccaggccattattgcctctatctggtgaaaaacaggaggcaaagggcagagtttgatggtttccattcattttcctgatagacagcttcccattacaagaggaggggcagcccagcagtctagcctctcttagttctctttgtagttggcacccatcttctgtgtttagggtgtgccagtgctaaaacttggcagattttggtgtactcagagccttcgctttctgcataatgagctctatatgccatcactgcagttgtaggttataactatccatttgtctgaaaaactttgcttctaatttttctctttcaagctatgatttaggcatagagaatcgtgatgccaccaacgaccaagtcaccaaggatgctgcagaagctataaagaagcataatgttggcgtcaaatgtgccactatcactcctgatgagaagagggttgaggagttcaagttgaaacaaatgtggaaatcaccaaatggcaccatacgaaatattctgggtggcacggtcttcagagaagccattatctgcaaaaatatcccccggcttgtgagtggatgggtaaaacctatcatcataggtcgtcatgcttatggggatcaagtaagtcatgttggcaataatgtgattttgcatgttttttttttcatggcccagaaatttccaacttgtatgtgttttattcttatcttttggtatctacacccattaagcaaggtatgaaattgagaaatgcatatatgtataactgtatatttacacacatttagctaaaggcaaawacaaataaacttacaaataggcgtccatctcaacacattttttttcaaacatgctgttttttttcctttatccttttattcagttataccatatgatattgccatttttatgttggtaatttcatatggttcaaccagatctgtggttttcaacactggctgcacaataggatccccttacaagtttttttggtggttttgttttgctttgcttgatttgtttctttgttttagtttcaatgcttgagtaccaccctacacaaattaaaatctgaattccatggggttcaggcattttaaagctccccaggtgaatctaatgtgcaaacttgagaaccaccaaagattgtattaaacatgattccatcatgcataaaagaaaaaactggctgggtactatggttcacacctgtaatcctagcactttggaggccaatttggaagcactgcttgaggccaggagtttgagactagcctggacaacatagcagaaccctgtctctacaaaaatgaaaagtatttcaataattatgtcaattgttcatggaagagccagttttgtttattcatatacaaagtgagtaggcgaagctgagtggggtggcatgtgcctatagtcccagctacttggaaggctgaggcctgaggatcccttaagcctaggagttcaaggttacagctatgagctatgatcacrccactgcctacgcaacagagcaagaccctgtctcgaaaaagaaaaagaaaaaaaaaactgactcggtagttgaaagcagccttactaaagcattccttcctgcctggaaaaaaagtattgcttctttacttctgtaccagtacacttgttgccaaattaagcaaaaaaactgccaagtaaacaaaatcaaagttcagtgttgaaactgaggtttcagactttcacagaaagtagtttatgtcttaaaaggaccttaaaaacaggaatctctcatgctgaaatccagaggttttaatgtagccatcattgaaaacagtgtgttgagggtaaacagtttagtccttgaggggtcagttaactttgttccactctgtggctaaaactatcctttcatcctggccaaagccttcagaaatagctcccaggggcccaagcaagggaaggtagatggcagtggtgcaaactcgctaatcttgtaaaaatcaccctagattctttccagttcagtcgtgccttttttctgcgtatatcctttttgttttttgtttttgagacagagtctcgctctgtcgcccaggctggagtgcagtggtgtgatcttggctcactgcaacctctgcctcccgggttcaagcaattctcctgcctcagcctcttgagtagctgggattacaggcacatgctaccatgcccggctaatttttgtgtttttagtagagacggggtttcaccatgttggtcaggctggtctcaaactcctgaccttgtgatccgcccgcctccgcctccgcctcccaaagtgctgggattacaggcatgccaccatgcccggccttcctcttttttttttttttttttaattattttggcatcagtcatttgtaaaaatggccattctatttattaaagtccagaaagagaatttcaaacctcaggttgattcatggactgtttaaatatacataaacctatacaaagcatttatggtgctttggtacctcagtttctcccttttcagaaatagtaataaattaccacccatatttactttatggattttatatgtcaaaaatgttctgtgtaaagtaggtgtttaatctttattgttacttactgctcttttaccagttgttattagtatttctctacacttatagatgtggccggcacctgctggtacctaactctgcaagtatctgattcaattcattgaagaagatacaatgcagcaaagacttatggatgtctagtatatgccaggcatattattccactgagtagctgaggcccatgagggaggtgcctgtccttgaacagccctttcctaaaaatcatcatcatcccattgtagctgctcccagaatgatttgattgctccatatgaacaagtcctataacactagtaacaatgataccatgagagaccgagccccgatggcctaagtaaggacgagacctcaagtcctttgaccctggatgcattatttctactatatcatagttccctccttgtaagactgatgtaagaatcaaatgagattatgcaagttaagcatttaaagcatctggcatagagtaaggacaaagcattagctacctcagtactacaattagtattgttatcatcaccctctagggagacttccctgacttccttccatggtcacctcttttcctctgtcatcctatagtttttttttttgggggggggggtctaataccctcttttggcatttgaaagctcttatattgcttttcacttatatatgtctttatagggttgtaaacttcctaaaggaaagtggcttatgttattctctgtcctcttcagatcagtgctcagaaaactttcctatacctcgtataggcacctaataaatatttactgatttaggggaatgtctggacctcttcatccccatctcctaaaaaaaaaaaaaaaaaaagaagtttgacatactgccctatttgtctaggtgtcttctaggtctatattatatgaatattctccttacaattcctgctagggtattttttttttctttatacctttttcccctctacacagtacagagcaactgattttgttgttcctgggcctggaaaagtagagataacctacacaccaagtgacggaacccaaaaggtgacatacctggtacataactttgaaggtatgtatgactgtagcataagcttcttttttttttaaacaaatgatttarataatatttttattgctttttttgttagttatgtgactgcctaaaaatataatctgaatctacagtgtttttgcaaaacccgaaacttgacataaagaagtaatttgcttccataccttcctgtggcatgaataaaggcacaaaagggttacccacttaattggaaatgcctttaggcaaagacaaggagatgattatgcatttatcttaaagcacagagagaaggttggcagaaatctgctgtgcatgaattatatacattaaatattaatattctcaaatcacccagcatataatcctgccctttgctctggtagggctcttgtatctggaagaggtttccttatatatttgctgaagttttcttcttgcccttctgggtatttatcctgtgaaaaagtagaacatttgctttttgccttttctttcccagctaccctgctacctttgatggcaaatcccacccaaaagttgttgaaataattagtgggcccttttccttcactattgaagttgttgaaagcactcacacaaacaaaaatacccaacactcacctaccttttgtttttcttgcctcttccaaataatatctgttggaatctggttctgcaggcttcagcacctttcaccctgaacccaagttaaccctgagcattggcatggattcaagttctatctttaagtaataacaaagttcaataatagttgtaaaacacagtgattacatgtagcataattatttctacttatttctaccaactacagtaggagtgctcagtatcctccaggagattataagaattttcattcagtatttgaaatttaagtttttctcaataactgaggattgagtacacccctaaagtttaaaatagatgttgggaattgtaaaggtagggtgtttgtccattcttgcgttgctataaagaaatacctgaggctgcgtaagttataaagaaaagaggtttaattggctcatggttctgcaggctgtacaagcctggctccaacacctgttcctggtgagggcctcaggaagcttccaatcttggcagaaggcaaacagacaataggtgtatcacatggcaagagcgggaacaagagaaagagaagggggaggtcccagactcttaaacaaccagatttcaagtgaattaactgagcgagaactcacgtaatcaccaaaggggatggtcctaagccattcataagggatccaaccccatgttccagtctcctcccactgggccccacctccaacactgggaatcatatttcaacatgagatttggaagggacaaatatccaaaccatatcagtatgtaaaagaagtttcaaaattatttgccttttcttaaatgtatttctggttcatatcagtttttggcatttctgcatcttcaggattttaaagactgtatgttttttcatttctgctgtccttccaaaacaagttagaatgtccttatctagaactggcttttctctcattatgtgcctcagaaatttgttggaaacctgtctgggacttctgaaatctagtctcagatgtgagagctgagaagtaggtcatttggttgtggtgggtgattttagccttattacaactacattacatttattcttctcccttttttcctctcactggcttctcctctacagaaggtggtggtrttgccatggggatgtrtaatcaagataagtcaattgaagattttgcacacagttccttccaaatggctctgtctaagggttggcctttgtatctgagcaccaaaaacactattctgaagaaatatgatgggcgttttaaagacatctttcaggagatatatgacaagtaactatagttcttttttaactttttctttattctcaagtaagctgacatttgcatatagagtatgtatctccctatccctatgattctgggtaaattgagtgaaaatcatcactgtctcttaaagataagggcaaaactgaggtttagcaggagtgaaacaaaaccactctgacttgcttttataagataaacatgttcttaaataaggtccccacatgaattgttttcagagccaggttctttaatgtttaaataaacgtacgctgttagtgataagttctaatttttcatgtgtgagtttctaagtcagacccatttccattctttctgaagcccattgttagaatttaaaattctgttggccaggcacggtggctcatgcctgtaatcccagcactttgggaggccgaggcgggcggatcacgaggtcaggagatcgagaccatcctggctaacacggtgaaaccctgactctactaaaaataccaaaaattagccgggcgtggtggcgggcgcctctagtcccagttactggggaggctgaggcaggagaatggcgtgaacccgggaggcggaggttgcagtgagccgaaatcacgccactgcactgcagcctgggcgacagagcgagactccgtctcaaaaaaaaaaaaagaaaagaaaagaaaaaaaagaatttaaaattctgttttagtggagtcatttgaacttaagtctaagtttataacaacactggcttccacagcacaggaggtgagcatgtgttaatatttaagattggcataactccctttaggtgcaagtgttcaggccaaaatgttcctgaggcattttgattcctcctcctgctgcccatctataccaagcccagaaactgtctggaatatattttagtttcctgaatgacaccaagaagtagaacagtcttttcaaaaatgtattttaaaaataagctgaatctcaagaatctgatctatagtataatgaaaactgaaaagtgaagtagtcattgggatactctactgtctcacttaattctcacggcttccctgcaaggtgggtaaaattgttcctacagatagtcaaattgagttttacagttagaaaatgattgggctaggatttgagccaatgtctgtcagattcctgagtttctgctacttctactaaaatatgctgcttcttgtgtgtccggtcttctgtttgggacaagcagatgatatccctaacaaaatcaattttctttattaytattctcttttaccttttgtttcccaggcagtacaagtcccagtttgaagctcaaaagatctggtatgagcataggctcatcgacgacatggtggcccaagctatgaaatcagagggaggcttcatctgggcctgtaaaaactatgatggtgacgtgcagtcggactctgtggcccaaggtacagaggtggagcctggcctgtaggaacagggtcattccagggtagttctctaatttgggaaggggagttttgtagtcctttgttgtaaaatcttggaatgttaaacctccaggtccaccgtcttacctgacagctaaggaaattaagctcagactagagaaatgatttactcaagaccacatgggaagtaaattagtggattgrcactcctggctccagtgtcactccttgaagttttaaagcctacctgatctgaaaatcactccctttccctgccctccttgtcctttggtgaaaatgtaaaaaaccagggcactcaggcaaggagggataaagtgaggagcttgatcatgtcataaccaagctttggtgcctgcaaagctcatttattgggcagcaggacctactcatgtccctctgccagctgctgttctggtagaatataaaacaaatgtgtttggctgggcacagtggctcacgcctgtaatcctagcactttgagaggccaaggcagtggatcacttgaggccaggagttcaagaccagcctggccaacatagcaaaaccccatctctacttcaaaaaaaaaaaaaaaaaaaattagccaggtgtggtcgcatgcctatagtccctggcactcaggaggctaaagcatgagaatttcttgagcctgggaagcggaggttgcagtgagctgagatcacgccactatactccagcctgggcaacagagcaagactcttgtctcaacaacaacaaagaaaaagtgtttttgtttactgcttagcttacacacaaatcaattgagcaaagaaccctaggggctgtttacagaaattccaggagaagtttcatgcatggggtaagggccaaatcaacagaaacacagcgcctggtttcctcagcaccaagttgcccttcagtttcagttgcccttggtagctgtatgaacttgaatctccccagatgaatgtttgttaactttaattatgtttgtttttcccaagaagtactactttttctgtctcttatcagtgttaaacatctcctctcagtttgaaaatcagtagatcaacctggttaaagataactttttgccagataaatgagttacacaactctccttaccatccttctgtttctctacatcctcacaatcatttgtactgaatgcaacagaggaaggagtgttattgctttgtgatgactccgtggttgattattaacttcacaggtgatgttgggaggtagcaaaaatggagaaaagaagaaaatcaattatatagatataagagttgtaatgtggttctttcaataagaaaccacagaagagaactgttgtactgagggtatgaaagagagcgaggaagggcaactgggatgttcttagatccarccgatcctgtgtttacctgccttctcttcccagtcccagcaagtgtatgagcagcttgagggttcttaagagacagctctcgtccatctttatttccccagaacagcagagcattgcacataagaataacaataatagattgagctctgtgtccagtactattctaaggaatataaatatatattcatatatatttatgaatatatgtatatttatctaatcccacagcaacctagtgaagtaggtgctgttattactcccattttacagataagaaaactgagccgcagtagctatgaagtcatagaactagagtggaatgtaggcagttggaccctgaaccctccatcaaggagtaggtatccctgaaataagtgaggggaaaatgcagcctttccagacccattggctctgatatctggagcggggatcctgccttctgaaaggcagaattattggtgattccatgtgctcttgtttactttgcttaccaagacctatcaagattgagtcatttatgctctcatctctgagagactcagtgctcttcatgcagttggacccaacgcttcatgctscactacttacagggtatggctctctcggcatgatgaccagcgtgctggtttgtccagatggcaagacagtagaagcagaggctgcccacgggactgtaacccgtcactaccgcatgtaccagaaaggacaggagacgtccaccaatcccattggtaagatggtgtttacattgatttctcaccagagagtgctctccaaagcagcccagatgtgttcccttggctgctcagtgttttgtgtgcaaagtcatcaccaagtagctgatttgttctactagtaagatctatttgaatatgcttcttaaaatatacaatatttgcttttctgttttgtgggagaacataggttacagagaggaatgttatcaacaagcattttcctttacctctggtgcagtgaaatgtcacataaggctacaaatctaaaagtcacatggatagatccttttaacaagtttcaaagatagcacttcaaaaagagattacagcctggaaaaaggagaccaatacagacaagagatagaagagattgtgacctttttcaaattagaaaatgccttaagtttcaaacactagtaccatgccatgaaaatgtgtttttttaaagtttctgtttggtaaaatatttctaactctcctaaaacttctagcccatgtggttagtatctaaagaagtctgtcacctaaacaaaaaactattctgttttggggaactatgagacatttggaaacctctataactaggatgattggagtgttgtgttttttttcccctcttttagcttccatttttgcctggaccagagggttagcccacagagcaaagcttgataacaataaagagcttgccttctttgcaaatgctttggaagaagtctctattgagacaattgaggctggcttcatgaccaaggacttggctgcttgcattaaaggtttacccaagtaagtataagatgccctagtttctatggtcaaattaacacttatcctcactgggctcagagcatcggtgctttctggaattatataaattgttattcatcatctagttcaggagtcagcagatatctgtaaattgtcagatagtgaacattttaggctttgtggaacatatagtctttttgcaactacacaactattcaactttgcctctgccattgtagcaggaaagcagtcatagacaatacagaatcaaatggtgtggctggtaccaatcaaacttttatgttcaaaaccagcctcgatttggttcatgtgctgggctgtaatttgctgacatcccatctagttgataatcattgaacgaaaaggttctatttaattttaagaagcagattatagacaaatagaaacaaagatacttcagaggctattttattctactcctttattttctttaacttactgatgagaaaagtgagcagcacaagtttaaggtgtgcaattgattacagtcccttaagtatctgtaaccaatatttgggcaaatatttgacagcccatatgtttactgagaatttttctgagaacatagtagccagtatcctggggggattgtctccatatctcaaccagtgcatctgcagaggtcccaggtagggtcagtataccccataatggggatatacttggtcactgcatatttcttaatttaaatttccaacaagattgcagtgttcgctgggtgctgtggctcatgcctgtaatcctagcactttgggaggccgaggtgggtggatcacgaggtcaggagatcaagaccatcctggctaacacagtgaaaccccatctccactaaaaatacaaaaaattaaccaggcgtggtggcgggcacctgtagtcccagctactcgggaggctgaggcaggagaatggcgtgaacctgggaggcggagcttgcagtgagccgagatggtgccactgcactccagcctgcgtgacagagcgagactccatctcaaaaaaaaaaaaaagattgcagtgttcaaaatggtcttatcagtggaatacctttgtagcctatttaacaggcacctgtcagcaggattatgttatcctgtcttttgtttttctttttttttctttttattgagacagagtctcgctttgcccaggctggagtgcagtggcgtgatcttcgctcactgcaacctccgcctcctgggttcaagtgattcttctgcctcagcctcccaagtagctgggacttgtgccacaacacccggctaatttttttttttttttttttgtatttttagtagagacggggtttcactttgttagccaggatggtctccatctcctgacctcatgatccacccgccttggccccccaaagtgctgggattataggcgtgagccaccaggcccggcctgtcttttgtttttcttaagacactgatagaaataacaacattataactttttttaaggacatgtaacggtttgtgggaaggtgggtaaaggtttggctatgccctgaataagttttgttatgtttaagaatgaggaagaagtgtgatgattttggtctcagcagcattagtctgaaccgaaactcaatgataatttcacccccaaagctacatagcaagaaacctaactgagtatgtatggctgtctctactgccggttgcctagagagcctgagtactgagcctgggtcagccccaggaaccctgaacatagtcattgtctatagattttgtagcttactaacatgaatgcgttttcttccagaaacaaatagaatactattttaagtagcatttctaggactttaccactacctgctaccatatcagagaccaactaaattttctttttttttccttcccgttagtgtgcaacgttctgactacttgaatacatttgagttcatggataaacttggagaaaacttgaagatcaaactagctcaggccaaactttamgttcatacctgagytaagaaggataattgtcttttggtaactaggtctacaggtttacatttttctgtgttacactcaaggataaaggcaaaatcaattttgtaatttgtttaraagccagagtttatcttttctataagtttacagcctttttcttatatatacagttattgccacctttgtgaacatggcaagggacttttttacaatttttattttattttctagtaccagcctaggaattcggttagtactcatttgtattcactgtcactttttctcatgttctaattataaatgaccaaaatcaagattgctcaaaagggtaaatgatarccacagtattgctccctaaaatatgcataaagtagaaattcactgccttcccctcctgtccatgaccttgggcacagggaagttctggtgtcatagatatcccgttttgtgaggtagagctgtgcattaaacttgcacatgactggaacgaagtatgagtgcaactcaaatgtgttgaagatactgcagtcatttttgtaaagaccttgctgaatgtttccaatagactaaatactgtttaggccgcaggagagtttggaatccggaataaatactacctggaggtttgtcctctccatttttctctttctcctcctggcctggcctgaatattatrctactctaaatagcatatttcatccaagtgcaayaatgtaagctgaatcttttttggacttctgctggcctgttttatttcttttatataaatgtgatttctcagaaattgatattaaacactatcttatcttctcctgaactgttgattttaattaaaattaagtgctaattaccattcttctgcgtttctgtttattggatgccaagcaccacgctacatcctagccataggagtgtaatctgaaaaaattctctgctcttaaaaagtttaccatggtggaaatagataagtaaatagtaagatgtagatcctgcagtgaaaggaaagaggaccaaagagggaactacaggaagaattaaggaatattagagaatagattatgtctatgcacatgctaaggagtttagtcattatcttataaatgattagggagccaatgaagacttttaagaaataagggacttgatcatatttttatttttaaaaatagcactctgggaaactttgataaaaaatggatagtggctttgagaggccaaggcaggcagatcacaaggtcaggagttcgagaccagcctggccaatacggtgaaaccccatctctactgaaaatacaaaaattagccaggtgtggtggcgcacacctgtagtcccagctacttgggaggctgaggcagaagaatcgcttgaacctgagaggtggaggttgtagtgagctgagatcgtaccaccgcactccagcctggatgacaaagtgagactccgtctcaaaaaaacgaaaaaagaatggatggtttggggtggggaggagactgttgggtgcagttgaggaaggaggaccagttaggaggctgttgcgatactttagtgggaaatgatgaagatctgactggaacagtggcaccaggaagagaacgggataatccctgggataaggaagttgaatggatgggtcttggcaagaccaaggatatgtggggatggagggacagcagcaagtcaaagatgcttcccactttctggcttcacacctggggaaaggctgctccacatcctagcatctctgggagggaggccctggtgagcttttgcgctctcacacgtcagaagtcagtgagttggggtggggacccttggtaatttctagtctaccttcctggcaagcttggagttgggccccagacactgctctacacaaatccccttgaaggcccaatgaaacatggagcctttcagaatccgatggcatggagcttattcagaatgagcttttgaccaatttccctcagtgctacccccaaaatacatccaaatccaagcccacagtcctagaacaccctgttgagaggagattctcatgaagtaggggaggcccatgtggcttgggcaatttattcctggccaaattgaagttagaatccaaaccacatgagctctcctggcaagggaaataaaaatcaattttcacatgagatcaaccagtgtcaggtcactcaggtggtaggaaaaaaaaaaaagcattgcttctagttaacatcaagaaagaggcaataaatattttcatctcatgtaagatttttaagatttttcagtaaaagattttataacctatattatctgtagttttgtaaaaagaatagagatctaagtaaattagaatacaagacacataatcgttgtttctctggtggctttttgctgataaattcaactagtctttgcctcaatataacgacatgccaatgactcattttaacattaatacctgtaagtttttttaataggatagattgggattataaggaaaaggaatgtaaattctttttatgtgccttcatactatctcatttaattctcaccaaagtcttaagaagttgactctatagcactgatttttttatgagaaagcaaaaaattagagatgttattaataattaacttaaaggtggagctgatattttcttccaaaaggccacaggtctttctctctttggaaaatagatttttttttttttttctgagatggagtcttgctcttttgcccaggctagagtgcaacggtgtgatcttgcctcactgcagcctccgcctcctgggtccaagcaattcacctgcctcagcctcccaagtagctgggattacaggtgccggccaccaagcctggctaatttttgtatttttaatagagatggggtttcaccatgttggccaggctggtcttgaactcccaaccttccaccttggcctcccaaggtgctgggattacaggcgtgagccaccgcacccagccaaaaacatatttaaagccctttgatgtccaatatactggttaaatgtagtgttcttcagattattacatatttggctttttataaaattcaaattgttttaacattttaaactttacatccaaaaaaaattgtcaaataaaatgtgttttgcactctcctcctctcatctaaacttattactcagctgagcacagtggttcatgcttgtaatcccagcattttaggaggcttgaggtcaggagttcgagaccagcctggccaacatggtgaaaccccatctctactaaaaatacaaaaattagccaggcgtggtggttgtagttactcaggaggcagaagcaagagaaacacttgaacctgggaggcagaggttgcagtgagccaagattatgccaccgcagtccagcctgggcaacggaatgagactccatctcaaaaaaataataaaaattttaaaaaataaacttattactcttttttcagatttttgcctggtaaactcttcataactgttagagcatccatttcctctttcattaacaagattttaataaattttaaaagagttttgggccgggcatggtggctcacacctgtaatcccagcactttgggaggctgaggcaggcggatctcttgaggtcaagaccagcctagccaacatggcgaaaccccgtctctactaaaaatacaaaaattagccaggcatggtggtggtcacctgtagtcccagctactcagggggctgaggcaggagaatcccttgaaccggggaggcggaggttgcagtgagctgagattgtaccactgcactccatcctgggcaacagagtgagattccgtctccaaaaaaaaaaaaaaaaaaagtgttttgtttctactactttgaccaaagttgcaaaatacatcagtggccattttggaccagaacttgggactcacatttcaggtttgggtaggagatgaaagcatcacatacaacaaaatgatggcattggactgggtgattttaaatagttcctccagcactcacaagcatcctcagagttgatctggtgagtgcagatcaacatttggcctaatgtctatcaggatcagcatttggccaagaaccagttaatgttctaaaataattagcaaatgaacagatgctgaccaatacattcagaggctgatggtttattatgtaacaactagagggtcagaattgttgacctagaaaatgactgctctttagcacaacattgaaggcagcaggatccagggacagggaacatatgagttccagacttcaaaactctaaattgtaggtactgtttcttaggaagaatttctaactgaaaatatttaaaatttaatcttagcagtcagaatcacagctcccttgtgttcttgcttgatacataaaatccttctacaatattaacaagtgacccatcatctacttcaatattacataataaatatttcccccaaattaagggtcttggctcttcttattaagaaggaaattagaaactaatataaagaatgataataatgataatgaagactttgaatatttatatcaatactgataaaagttttgcactcacctctctagtattagagattttcacaacccctatttttaatattagggagaatgtagcttccaaactgtaaattcctctggaacaagaaactcaaagaactctgaatttgaatgatatctcagactctgcaggaggtgaattttgcagatattgtagcattgtttatgaaactggcccaattgtcccatagaactaatgtttatggtttttctgaataaacatagaaattggccctcctagtcttaaaacgaaaaagttacatttgtcttatctgagttcctttctcaagaaataaaccatcagggctctcagatagcatcaaggaattggaatttaccagatgactgcatctgaacaaggaaacatcagacccctcacccatcatgattgtgaagcaattacctgcttcctgttgaccaactcctcttccttactcctccctaattcctgtttccctgaatgttgttacattccttccctactttataaactcttaattttagtcagtcaggtagatggatttgagactgatctcaaatcagtgggtgagacagattgggttcaactctgaatacagcatgggcaagtgggaatttatagccaaggagcagggtggggtcaatggatggaaaattaccaagagtaaacatcaggggtgagggggattctggctaaagcaaccaataggattcttgctgaagagagaccagaatgatcagacatcacccaggagatggtggaagatgaggaatatgatcacacactgaagatgatcagatatcaataatgtgggggttccttgctaaagtgacttggcagggtcctttgctaaaactggattttacgagaaaatacacagatggacctagcagaagattcagaagcctgactaaagttcgaccaagcaaaactgtatctttgtcaagtgatacagcatccttctcagtgtatgacaatacgggaagagggggaaggatgcataatgttggtttgtcctcacgttggtgaaattagctttgcttatttggtgaaggtggtagctgccttgtgaatttactgttctctcctttgtaaatgtaagtaacgtgtagggagatgctgtgtatgcacactgctcatcatcaagcttcacccattgtttcaacgtccattgatgattttataactccatcacaccttctataattatcacacattagcataaaaagagtatatatttatattaccataaagaacagctttctcttccttccattcatctatattggtattattggtatagactcacagatccctttttttttttgagacagggtcttgccctgtcactcaggcttgactgcaatggcatgctcacagctcaccacagcttcaacctcccaggctcaagtgatcttccctcctcagcctccctagtagctgggacaacaggcatgcaccaccatgcccagctaatttttgtgtttttttgttgagatggggtttcgccacgttgtccatgctggtctcgaactcctggactcaagggatccacctgcctcagcctcccaaagtgctgggattacaggcgtgagccactgtgcccagcctggactcacagattcttattttattcaatggactgtaatttacagccatcttcatgtattttgatgcttagattgtctcagatttggccagtgggaatcctatcaagctgggttgtctcaggattgtaacatattttgcaaacagttaatttgggtatactgtcttgtatattaagccacctagtagtatgattcacttttcttaagtgaggcttcctccgagaagagctttcatgtgcgatgctccttttctaccaatagaatgtattggtccacgcgttcctttccagatctaaccagacaatgtctcagcagaaagtattgttgaaagaccgcctgtttcaagatggatctccagagactggagacttacttaacttaaaaaacaagtctggggtagaagcaaaggaaggtactagggtgctagggttgtcaccagttactgaccttttggaaagatggggatatcgactttcaaattctattattgagactaaattatggagtccacacgatggactttcaggtaataatgggaacagggacagagtatgactgggataggcacatgaggacttctagggcagctggctgtgttccatttctttatacgggtaatgattacaagagtaccttgtaatggtttactacattatacacttgttttgtgtggtttactgcattctttttttttttttttt

SEQ ID NO: 93280 - DNA, 13095 bp, Homo sapiens
caaatgaaaaagcagttcatttcacattgtatgtacttctcagtttgttccaagcatgacacttctcagctaggtggcctttctaagtggccaagatggtttatcttatgagtgagacagaaggtcaatctatttgcttgtgaggctttgctaagctctgaactattcatcaaattattttccctacgtttttcctctttcccaaccctcattacccagttatgtcttcattcttgctataccattccttgatgcagaaaacgtgccgttaaaaaatgtaaagctggacagtcaaaggtaatatttgaagactttttataagctttgatattttctaacataaaatgtacagggtaagactattcataagaagaaagagcaagccaggcatggtgatttatgcctgtaattccagcactttgggaggcaaaggtggattacttgaggccaggagtttaagaccagcctaagcaatatagcaagacgccatctctacaaaaaattttaaaaattagcctggcatggtggcacgtgcctgtagtcccaagcattcaggaggctgagatcacttgagccctagcctgggcaacagagtgagaccctgtttcaaaaaaataaataaataaaaagaccaaaatttattcctatctggctctgaaatgcgaatgcaaaaagacatgtatttgtacgctctcaatctctgtgcttagctcaaattgtattccagcataactcgtgtcattctggagtcaatgttccagagagaatatgatccacccagatataattaaaagttgaataaaattacaagacaaatattatattgcttctaaagtcattaaggaattttatcttaacaaagacaaatcatcaaaacctaaaactcaacagaaaaagaacgtcttggagtgaaaggcttaggtaaagtaagaatgacttaccaaagcagactttccaacgcctcctgagccaagaacgactagcttatactcacgcatgatgcaagcttgtcaaaacctagtaccttattaaaggaaaaaaaaaaaaagaattctaagtaaagttgtgtattcctgtgcttttcacagaaataaaacattcaggaaaatagatttatttaaaatgattactatacaaccctagtatggagcaccctataagcagacttattaaaagatgctcagaggtagaagaaaactacagaattacagacatgactttgagcccgatccaggatagagcacaggtctgaaaagaaatccaacctatcacctgttttgttacatcaagttttactcaaacacagccatatccactcatttgtgtattgtctgtggtttcttctgtgctgtaacagcaaagtagttacaacagagcctaaatatttacgtatctggccaagccctggcatacataaatggtaaatataatatgttggtagaggaagcagaagaccaaatatttattcctaaagtggggaacgtacagacaacctgaaaatggtcttgaatcagaggcagaactgaagaatatgagttcccagactgaaaacgtctacttagaatgtttagtatgatgaaatagtagaaataaaaacaaaatatatccagaaagaaacaatccataccaaggcttatcattataaaatttcagtatatgaacaatagacagaaggtcttcaaggattccagggtgggggcattacatgagaataaaaggctcctacattcctagaaaaaaactaaagagtcagtaaagtggtacaaaggtagcaaccagaacagattttaaaacttctgatcaagaaatgacagttttttgggtcatggttaacaaagctactataactgatttaaatgattttaatcaactaataacaatttgcctcagaggatatgcttctacaaactaaccaactaatgagggttccttacttctgaaactcaggcaatcaaaaatggcctgttaaacagacacatcccaaagccaaccaatcaacaactgtcttcacttgagtgacagtgcttctatagctaacattaacctgctcctgtctttgaaagtttgccaaccatggaacttcctaattccccaaaatcctgtaagaccagcagtctagcaaggttggggaaattaaaaaaaaaaaaaagggaaaaaaagagcagtgtatctgaccaggatagcttaggtaatcaagaactcggccagatgtggtggctcatgtctgtaatcccagctactcgcaaagccgaggcatgagaatcgcttgaacctgggaggtggaggttgcagtgagctgagatcacaccactggagtccagcctgggcaacacagtgagattctgtctcaaaaagattcaataggatacaaaataaaaattgatttaaggaaattttcaaaagtattctggcaaagacccaacagttaaagtaaagagatggcctttctttttgtatatgggttcaggtctgaaataggaaacctaaaatggaaaattggtaatccgaaaaaatctacaatggttgagattttcagagtcttacaaacaaactagaaaaaactaaataaaaaggtctttgttttcgaagaaatgcaagcccacagatgaggctacttgtacaaacagagccacaggaggaactgatgttgcatgttcactaacaaatggaagtacaataaccccaaatctgttcattattgctgctccaaaggaaatatgagcatccaattctccacccttcctccactgggagtgagagtgggactgactacatatagtcacaggaaaccttttgggggtgatggaagtgttctaaaaactagttgtagtgggccgggcgcagtggcccacacctgtaatcctagcactttgggaggctgaggcaggcggatcacaaggtcaggagttcagcctggccaatatggtgaaaccccgtttctactaaaagtacaaaaattagctgggcatggtggtgggcacatgtaatcccagctactcgggaggctaaggcaggagaatcgagtgaacccgagaagtggaggttgcagtaagctgagatcgtgccactgcactccagccccggtgagactgcaacactccatctcaaaaaaaaaaacacaccaaaaactggttgtagtgatggttgcataactatatattcactaaaacctccaaacataacacaactgaccgaaacaacataaaaactacaattttaaaatactgaatataaaaactatacatttatcagaggtgatttttctaagagacgtatgcctttcttatttcacaaaggtggctgagttggctgtgggagctacacttcttagtgaggtgactgggactctttttcccagctgcttcatttatccatgaatgagcattattatttgttgctagaatgagtcaggttcatccatattattgtatctatcagtaacttgctccttttatttattactgttgattaaaatataccacatgaatacatgatattttctttacccattcacaccagctgatttccagtttggggatattatcagggtatttctgttaccttaaacagcaaaacaaaacaaaaaaaacccaacagtacaatagtcaagatttgaatcagtatttttcaaatctgtgctttctactacaccagccttgaaaagactgaaaaacagatttttattgcgaatgccaactctgactgactggcaacagccattatcctgtttttaggatggtgtggttgcatctagttttgcagaaaagacaactctgttcaataagcaacataattggcttgtggtgctggtagggactgggaaagagctgtagcacctgttatttgtatagcgtatttgtgatctttaggcataacctttctgttcaagtgttcttttcctgaagtccttagctcaggttaagaatgagcactttgaaatatgtcaattccctaaaatttcatgcacaattaaaaatgggaatagttacatcagattttcaaagacatttgtgacaactactatttgagacattgagactaattgttctctttcacagaaccccatggggggacaattttgacagcacagcatagtggctaatggtacctaagtttcaaattgtggttttctataatcttgggcaagtcacgaaacctttcagagcctcactttccttccaggtaaaattaagatagtaacagctacatgataaggttgtgagatggattacaaagaatgtaaactccatgaggatagggattttttttgttttactcactgccatattcccagaacctgaaactgtgcctgaaatatgtgatcaataaattaaagaaagaataaggaaagaaatgtagtaattcttcagagtcactgacacaacaccttgcacatactcgtcaacaaaagataaatttcaggccaggcgtggtggctcaygcctgtaatcccagcactttgggaggccgaggcggttggatcactggaccagctggaccaggctggtcagaagttcaagaccagcctggccaacatggcaaagcctctactaaaaatacaaaattagccgggtgtggtggcacatgcctgtaatcctacttactcggaaggctgaggcaggagaactgcttgaacccaggaggtggaggttgcagtgagcccagatcgcaccactgcactccagcctgggcgacacagcaagactccatctcaaaaaaaaaaaaaaaaaaaagtaacttttaaaataagagtaacaatggtttgagctgccactcagtacactaaagaggactgctattccttcagttgagaatcactgctcgacttttttttttgagatggagtcttgctctgtcacccaggctggagtgcagtggcgccatctcgactcactgcaacctccgcctcccaggttcatgccattctcctgcctcagcctcctgagtagctgggactacaggtgcccaccatcacgcccagctaattttttgtatttttttagtagagacggggtttcaccgcgttagccagattggtctcaatctcctgatccgcccgccttggcctcccaaagtgctgggattacaggcgtgagccaccgtgcccggcccactgttccactctttaatctactagctcaaaaacatgtaagaaccctccatgtcaatataaaaaagcaaaaacctgtgcatacatcagtattttgaatcatttaaaaatgttcagagataatgactgggaaatagccctcttttaagtatttaaaaaacacattactaaacaaaaatcctgtaatattggcattgtctctgaccgctaatattaatcacagaagtcttaatgaaatctattgtacctcaagttatgcagactgtaattttgacagcctaggaggaatctcattattacattacctcaagagtacggaaaaaatcttgagattataatagaaaatgaatttcaattccctggaataaaaaaaagaaaaaaaatacatgacaaggtggggggatagggaattttcttttccttttgcttattttttttcctgacagttctattgttaataaatagaaaaaattataaaacaaatgaaacaaaaactgaagttaacagaggaattgtgaagttgttctataactaccccaatattattataagaatgctgataattactggcatttttaagaagtagactttagaaaactcaaaaataccaagtttagccactcaactcatagagtaactataaaatattgatgttggaaaagtactggattaataaactaatggtgagggtacctttttaaagaaacaaacaggtaagcataaaagaatcaattaaagtttaattctattctttaagtcttaattacttctcagaaaacacttctcaaaaaggactaagagatgcttaactactgaaaattacaacattaaatatattttaagtgctttatagaaaaagaaatactcaatgtaaatactgacattttaaatacctatcttatatcaatgcaatatttacaattagcaagcaaaaaatttatctagaatgaaaagataaatatggtagcaaaggacttaagttagtactttaactggtgtgccacaagtaaatgattacattctgagaagcttgctcatttttaactacttgtacatcagtagaaaataaggattaagtcaaaaagaggataggaagtaatactagaatacctgatattataaattattaagagttctgactattagaaggtattactgccatgtactaccatttaaagtgaagagattttggaagaaaaacaaaaactataatcaacagaaaaactctgaaagaaattttaagatgaacaaccttcaagaagttaaaggcggctgcagtgsaccgtgggcagccagggtcggtgaagaatcccaaratggctgggcgaaaacttgctctaaaaaccactgactgagtagcttttgcagagatcataccccagaaccaaaaggccattgctagtttcctgaaatcctggaatgagaccctcacctccaggttggctgctttacctgagaatccaccggttatcgactggkcttactacaaggccaacgtggccaaggccggtttggtggatgactttaagaagtttaatgccctgaaggttcccgtgccagaggataaatatactgcgcaggtggatgccgaagaaaaagatgtgaaatcttgtgctgagtgggtgtctctctcaaaggccaggattgtagaatatgagaaacagatggagaagatgaagaacttaattccatttgatcagatgaccactgaggacytgaacgaagctttcccagaaaccaaattagacgagaaaaagtatccttattggcctcaccaactaatcgagaatttataaaattgagtccaggaggaagttctggcccttgtattacacattctggacattaaaaataataattatacagtagaccaatagcaccataattttaggcacagtaaattagccaatatctctcattgctaactcagtttcatttaacttcttgtgttgcctttaacaactttttttttaatatcattctcgcttgaatttccagtataagtgacaagattttcttcatttacatgtgctctctttatggtattccttataaacaagagcatttatttgtaaaaactggatgcagtttgaaactatctgtacagttaagaattgctagttaacaataatatgcctatgtatgagttaatctgcaaatgtagtacatttgtattcatctttagtctatgaattaaccaattataccaactaatgagggactcctggatcttcattttactcaacgcgttaaacagaaaagactgtagcatatatgcgaaatgaacttaatgttatcaacagtgcaactatacgatacttcatcagccaaaaggtgcaatttctacatcatgtaggcacatacacaattataaactttatgcatgattcacactgcctctccaacacaatctaagattacagatgaagaaaatcaattaaatttctaaagaaagctatcaaaatactaaaaattccactactgttcaaagtattttctacactgttttttttttttacctttgattcagaggaactgtggaatgcatcgattttttcaaatgcataagtatttcttctatttatctttgaatatattttttgggtagtttttagtattaggtcatttacatttaaagattcctaatttgagttccttatataatcacctaaaatttgcgtgactgcaactaacctgattgatgaaagtaactgacagcttttacacttggctatttacttcttgcaaaatatctactaccttactcatttgtttaaaagtagtttattattacttctacaactttttccatttactctacagaccgtagttttatttgcattggttcttttttatcaatttaaaaagctgtttaattctagtttcagagcaaaccacagcaaagacatggaaagacaagaaaacaaaacctcctttggcattgtcgagagtccggtttcagtggctgcttcataactgtttgaaatgaaagtggaagaagggggtggtggctcatgcctataatgccagcactctggcagacagagacaagcagactgctttaactcaggaggagttcaagaccagcctgggcaacatggtgaaaccccgtctctacaaaaaatatgaaaattagccaagtgtagtggcacacacctgtagtcccagctacttgagaggctgaggtgggagcatcactcgagcccaggagtcgaggctgcagtgacccatgtttgtgccactgcactccagcctgggtgacaagtgagaccctgtctcaaaaacaaaacgaaacaaaaaacatattctacattaagttcagtaaatttatctaagataattatttcattaaccggagattattaactagtattttcacaaaacaataatgaatgctataataattctgagttaacagaaaatcctgaagacatgaatcaaagaaaataaaaactggtcttatggggtagctttttttttgtctaaatgtgttcactatattacacatcaaaatgcaaataactgatttaattatccaacattctggattgcctataacattcttcctaagattcaactgtagatattactgatccaaattatgaacaagaattattctaaaaaatcactgaggaaactaaaaagcgtaacaaaatgacaaatttatgtattaaaaagaaaattcttgtttatttgatgctgagatttattgaggacatactccatcaacccaagaactgtgctggtcagaaaagaaaatctaagaaatgacaccttccattaacactactataatacagcaatcaatatttgacatcaataaatatataatgagtacctaatatatgttaggcactattctaggcagtgggaatataaagcagtgaaagaaagaccctgtcctcagaatttataatctggagtaaagggtatagagggggaaacaaagtcagtataaagtgtcagctgtgataagcagtatggagaaaaaaaaaagagataagaatggatggttttatatggggtggttatgaagaacttctattaaggtgaaattactatatagctcagtacacaaagagtcctgtcaatggattgatattaaattttgtttttaacaaaagactaccattaggctttgtcctgttgagcatttaaaaaatcatctttgggccgggcatggtggctcatgcctgtaatcccagcactctgggaggctgaggtgggtggatcacgaggtcaggagatggagaccatcctgaccaacatggtgaaaccccatctctactaaaaatacaaaaattagccggttgtggtggtgcatgcctgtaatcccagctactcaggaggctgaggcaggagaatcgcttgaacccaggaggcagaggctacagtgagctgagattgtgccactgcactccagcctagcacagagcaggactcagtctcccaaaaaaaaaaaaaaatctttggtggggtgacatgctaattagtttgtggctgaagttaaatttggatttgggagtcaatccagccccttcctctgcaaaaaggggcataaatgggatttctggagaagtctaaatgtagttggtcttatgaggtgctgtttttcaatatgtacaaaatgccctttggtgagttcctgtgccagctctttagaggaggatatgtacctcttttcctcagctgtgtagcaaaaacaacacagatcagggcagcatatctcaagatgcagttcttaggaggttagtgtcaaggaaatgtctctgaagcattcttgcactaactcagcccacagtgatcattctccttcatgacaagttataccaaatactttaggacttgattacgtattaccttgtactattttctaaggagacaacaagctgtagaaagtaacattaactttgaatttaagaagctctatttaaaaagtcgtatattttgagataaatcacttaattcttggtttccagattccttgtctacaaaaagatggaatgagggaaaggggaaatactgaacactcagatgacttacatcagccaggtaaccatgtaaacgcttgaagcagttaaggtcttattaggtaataacatagactgtggtcaagtagggagtgaatgctttacgggtaaagtcatttgaattctaaaaattatgaatattgtataaaccaacaaaatcaatttgagagataagagctctgaaccctggtccagcagtttttgacttctcgactagatccctaaagtccctttcaattataaaatgttttgttataataatgttacatgtaccagactttgaagaattaaacataaatggaattttaaaagcatcttaggttgggcgtggtgactcatgtctgtaatcccagcactttgcggggccgaggcaggcagatcacttgaagtgaggaattcgacactagctggccaacatggtgaaaccccgtctatactaaaaaatacaaaaatcagtcgggcttggtggtgcatgcctgtaatcccaggtgctcaggaggctgaggcaggagaatcatttgaacctggaaggccgaggctgcagtgagccaagattgcgccactgcactccagcttaggcatacagagtgagactctgtctcaaaaaacaaaaaaaagttagattccttaattactataaaaaaataaattgcactggtaataaaatttaatataatctaaatattatttctctaacttcataatggttgtttgatattatagatattttggagtcattatctttcaaaaacaatacacattttaaaaaggagtgaaaataaacgtaagacaacatccttactcctaaagtatgcacaactgggaaaatccattaagactagtgggcactcaaccaggacaagatgcaaccacattttcctttaccttctcgcatgctatttatgcaaataaaagccatgtaactaaaaattagggcacggacatgacatcctctctcaggaaacacacttctcttcaaataataccacaaataaagagactaactgtataagggattatacaaattggttacagagattaagactgggaagtaaaatataaaaagaagttaaaaacaagtgactaccaaggaaaaaatctatataccaaatatacaaaaaatgtggactagtgagccaagtgtcaccagactgtactataaaacattaaagccaacaacagattacctttaaagactgctttaatcctatccaggataaaacacagttgaacaatggaattttaaaaacttaaatttgtattaatccagttagcaaaatttgcatcccaggttaccttaaaaactttgaatccaaaattatcttgaaaagcaaacaaattaactcattaaaaaaaaggacccatatttaaataacataaagcaattctacattttaagaagatgaaaccaaataactgacattttaagagacttcctgaactgagtgaggctagttcataattggtaaataaagaaatcctggggctggtttgaggcccaaactcagtttttccttatacacttaaaagtaaatactgtatcatctttggagctcagggtgataaaacatgaaatctggaaataaggagaccaaaactagctacgtaatttaccaggggggtggtcatttatttctaggctggcatcttgtttttttttttttttttttttttttttttgagatggagttttactcttgtcgcccaggctggagtgcagtggtgtgtgatctcagctcactgcaacctcagcctccctggttcaactgattctcctctctcagcctcccgagcagctgggattacaggtgcgtgccaccacacctggctaattttatatttttagtagaggtggggtttcaccatgatggccaggcttatcctaaactcctgacctaaggtgatccacccgcctgggcctcccaaagtgctgggattacaggcgtgagccactgcactcggcctctaggctggtgtcttaatctgtgaaatacggacaacaatactgactgtaccgagttgatggacagattaagaatgtacactgtttattaaagatttacatgttagttattaccatcatcaagcagctgcagggtagtacttattttggtacccactatttggtctataaatgtttgctgaataaagactaataattcatttccagcaaatgacagaagtatatagacttttaaaagaagagtagtaagttatctttttataggtaaattgccatttaagttcacatcaattattgacagatgccatgaatcccaactgaagatgaaatacacaaatcttggcattaaaaaaagtagggacaggccgggtgtggtggctcatgcctggaatctcagcacattgggaggctgaggtgggtggatcacctgaggtcaggagttcgagatgagcctggccaacatggtgaaaccccatcgctactaaaaatacaaaaattagctgggcatgatggtgcacacctgtaatcccagctactccggaggctgaggcaggagaattgcttgaacagagactccgtctcaaaaaaaaacagcagggataggcatggtggctcacacctacctgtacaatcccagcattttgggaggctgaggtgggaagactgctcaagactattctggacaacacagcaaaaccacacttctacaaaaaatttataaagtagctgggtgtggtggtacatgcctagagtcccagctgctcaaaagaatgaggtaggaggatcacttaagcccacgaattggaggttacagtgagctatgactgcattactgcactctatcatgggtgacgcaagaacttgtttctaaaacaaacaaacaacaaaaaaacagtgcttatacttgccttctaggaatcacagtccagtaaaaatgccctgcagcagaaactctagtgttaaaaccaacttctgggttccagagacaattg

SEQ ID NO: 93281 - DNA, 18851 bp, Homo sapiens
aagaatcttccaagcagagggaattgcaagtacaaaaattctaaaggagaaattagtttgttatgtactaggaatagaaaaaaacagtatgtcttgggtaaagaagcagaaggagagctaggagatgagattaagaagaaagtgtgatctgctcctggagggccttgcaagccagggttgcaacccagggttgtaagccagggcggtgaaacatgcaaggaggctactggcaggctgctgtgcagcatggtttcagtagagggcagagaagaagcagggagatggcttaggaagttaaatgtctaagactggattgtataactgagacctgaaccccaacccgactgtctgactgcaaactcctgggtcttaacccctgtgctgttcttttcttttctttttttttttgagacaaagtctcactctcgtcccccaggctggagtgcgatggtgtgatcttggctcactgaatgcactccgcctcccgggttcaagtgattctccagcctcagcctcctgagtagctgggatcacaggtgcctgccaccatgcccggctaatttttgtatttttagtagagacggggtttcaccatgttgttcaggctgatctcgaactcctgacctcaggtgatcttcccgcctcggcctcccaaagtgttgggattacaggtgtgagccaccacacccggcctatgctgttcttttcttattgccagttcctggaggagcatttctgacttgtgccaaaattgaaaagttttcctttattgtctttcttccttcctaggcccctgtgggtgcagtaccctcaggatgtgactaccttcaatatagatgatcagtacttgcttggtgagaaatgaggatagttggtggtgggttggctttgggccaagcagcactgcggatgcccagggagggactagtgaagctggtggtgcagagggcaggcactttggtgttccctgttctgggaactaatccccctattcagagttgattctggcatattttaggggatgcgttgctggttcaccctgtatcagactctggagcccatggtgtccaggtctatctgcctggccaaggggaggtgagttaaggaagggcatggtggggaaagatggtggaagccaaaggaggcaaacaggacgggacccctgtgcactgagtgatccggtatcttacctcttttgtcactcacaggtgtggtatgacattcaaagctaccagaagcatcatggtccccagaccctgtacctgcctgtaactctaagcagtgtgagtaagcctggtctggctgccggttccatctccctgtaaatttccagaaggggagggaatgtgtgccttagggtccagtacctatgtgggcatacatgagtaagcaaaacatgctgtggggcccaaggttggacaagggggcaacttcatcctggcattgctcttgccctagatccctgtgttccagcgtggagggacaatcgtgcctcgatggatgcgagtgcggcggtcttcagaatgtatgaaggatgaccccatcactctctttgttgcacttagccctcaggtaagtgcataggcagcgagtctcctcagccatttgcctgccttcctaggactcagttctctggggttgtgcccctcactccctcttgggctcaggcgctcacctatcccacttcttgctcagggtacagctcaaggagagctctttctggatgatgggcacacgttcaactatcagactcgccaagagttcctgctgcgtcgattctcattctctggcaacacccttgtctccaggtaatgggtcacccactcttccttggctgcctttgctggggcctgatccttgtgggggctcccagttcactgtgctcttttctcacattctgaccttgctttgggtctcctccttccttctgttctgttatttttccccctgatggacatctgcttttaccatctccagctcagcagaccctgaaggacactttgagacaccaatctggattgagcgggtggtgataataggggctggaaagccagcagctgtggtactccagacaaaaggtgagtgaccaatctggcccctaggatgggggaaggagrggaagccggggcaggtttagggatgcccttgcctgtaggaacgttgttgttatgctatagcccattggtatgactatggcactcttttattcctcctccaggatctccagaaagccgcctgtccttccagcatgaccctgagacctctgtgttggtcctgcgcaagcctggcatcaatgtggcatctgattggagtattcacctgcgataacccaagggatgttctgggttagggggagggaaggggagcattagtgctgagagatattctttcttctgccttggagttcggccctccccagacttcacttatgctagtctaagacccagattctgccaacatttgggcaggatgagagggctgaccctgggctccaaattcctcttgtgatctcctcacctctcccactccattgataccaactctttcccttcattcccccaacatcctgttgctctaactggagcacattcacttacgaacaccaggaaaccacagggcccttgtcgccccttctctttcccttatttaggagccctgaactcccccagagtctatccattcatgcctcttgtatgttgatgccacttcttggaagaagatgagggcaatgagttaggkctccttttccccttccctcccaccagattgctctcccacctttcatttcttcctccaggctttactcccctttttatgccccaccgatacactgggaccaccccttaccccggacaggatgaatggatcaaaggagtgaggttgctaaagaacatccttttccctctcattctacccttttcctctccccgattccttgtagagctgctgcaattcttagaggggcagttctacctcctctgtccctcggcagaaagacgtttccacacctcttaggggatgcgcattaaacttcttttgcccccttcttgtcccctttgaggggcacttaagatggagaaatcagttgtggtttcastgaatcatggtcacctgtatttattgctaggagaagcctgagggtggggggagatgatcatgtgtgctcggggttggctggaagccctgggtggggggttgggggaggactaatggggagtcggggaatatttgtgggtattttttttacttcctcttggttcccagctgtgacacgttttgatcaaaggagaaacaataaagggataaaccataaataactggtggtagtctggattctagttctagcctgagccacagaccctagaagcctagagaccttacatttgctttcctttttttttcttttttgagactgagtctcactctgttgcccaggctggaatgcaatggcatgatctgggctcattgcaacctctgcctcccaggttcaagcagttctcgtgcctcaacctcccgagtcgctgggactacaggcatgcgccaccatgcccagctaatttttgtatttttattagagatggggtttcaccatgttggccaggctggtctggaactcctgacctcaggtgatccgcctgcctyggcctcccaaagtgctggaattaaaggagtgagccactgcgccctgcgtcttttttttttttttttttttttgagacagagtgtcgccaggctggagtacagtgtgtgatcctggctcgttgcaacctctgcctcctgggttcaggcagttctcccacctcagcctccttaatagctgggattacgggcacctgcgaccatggccagcttcatttttgtatttttagtagagatggggtttcgccatgttagccatgctgatcttgaactcctgacctcaggtgatctgcccgccttggcctcccaaagtgctgggattacaggcgtgaggcaccatgcctggccatgggccttacattttcatttggcttcagcataagcatcctttttgggttttttttttttttttttgagatggagtctcactgttgcccaggctggagtgcaatggtgtgatctcggctcactacaacctctgcctcccaggttcaagcgattctcttgcctcagcccccaagtagctaggactacaggcacctgctaccacgtctggctgatttttgtatctttagtagagatggggtttcaccatgttgtctcgaactcctggcctcaagtgatccacctgcctcggccttccaaagtgctgggattacagggatgagccactgttcccggccagcatgagcatccttgatttcagcaaaatgagcaagtgcaagccttccttgggttgctagatattttcgtagaagagcccagcaagatcatcacattttagtaggcctagttagtaagtggtgatcagagccaatggagtccctcttggatagaaatagccataaggtcagatagctgtttctcaaactaaacttttggaggatgtcgggggttgaggagacatagtttcgctctattgctcaggctggagtgcggggagtgctgtggtatgatcctggctcattgcagccttgacctcccaggcttctaaagttctgggattacaggcatcgatcactgtgcccaacctagaggcttctgcttgtagctaacagcacttttgtttttgtttttgtttttgagacggagtctccctcagtcgcccaggctggagtgcagtggtgcgatctcggctcttggcaagctctgcttcccgggttcacgccattctcctgcctcagcctcctgagtagctgggactgcaggcgcccgccactacaccctgctaatttttttgtgttttttagtagagacggggtttcaccgtgttagccaggatggtctcgatctcctgacctcgtgatccgcctgtctcggcctcccaaagtgctgggattacaggcgtgagccaccgcgcccagctgctaacagcactttttaaagtttcccattgttttagtgacaggaagtatactgttcccccttcccctcattttgtagactgaccacaagtcagagattattttaccagaaactttttttggggggttattttttttttgagacggtctcacccagtcacccaagctggagtgcagtggcatgatcacggctcaccacagcctcagcctcccatgtcagcctcccaagtagctgggactgtaggcccgcgccatcacacccagctaatttttgtgttttttttgtagagacggggttttgccttgttgcccaggctgatctgaaactcctgggcttctaaagtgccaggattacaggcatgagccactgggccgggcccttttttttttttttaaaggaaaaatgagaaggatggcttgtgcttgtgaggaggaaggggatgcattcatggaattccccagctcaggaactatttccaatcaatttcctggtagttaaaacacttccttggcacccctgttgtcatctgttgaagaaatgtgggccagaggacacactagagatgctggaatcgggtgtccagaaaggacacaaaactgccctgtggcaatgacataatttttgtcaactttggtttcttatctatctcaaagtattatagtgaggattccaggagagacacccagaggatcatgtggtgggccttagatttcattcgtgtaataagtattgagcaacagctattgggtggcgtgactgactggatggatgaataaggtgaagatctgggcgccaggactggctttctcaggcaattccgtgatgagggggcgggtctcgaggtaggtaccacgtgcacctactcgagattctgcacctacccggggttttgactgccggccacgcgagtttggcacgccggatgtgacgtcaccacccggtggttcccggaacctggcggtgggaccggaaatcaagtctacaaggcgggggggtgcacagatgaccggaagcgtgccctggcggcgctgccagccccagctgggagctggtaggggagtgcgaggaaggcgggacgcagggcggagccgctgcaggggcggggcctgcggacaggagccggggtttggggcgggaacccctcgtcccctgcagaccccgcctgctcgggcgcgggcggcggcgcggccatgaagctgaagctgaagaacgtgtttctcgcctacttcctggtgtcgatcgccggcctcctctacgcgctggtacagctcggtgagcggggcggggcgggggtgcggcgggctggcccgagggcgcccgccgccgtgcatcccgccctggggatgaacccccggcaaacaccattcatccgctcggccctccggacagctctgcggcctcaggcgcactgccctctatagaacgcaccgcggctacccgccgcacctcggatgaaatccagactccttcccagagcctgcaaggccccgcatgatcctgctgccgtccgcctctcccaaccccatttccacccctctccctcgctctgctgcagccagactggcttgctgacagtttctcgaaaaccccacgctcattactctctcaagcacttaacttgttccctctgcttggggtgctttgcttccagcgtttcccgggctgcctctttctcatccttcaggtcttagctcaaatgtcacctcctcagagaggccttccctgaccaccatagctaaagttaccattcttaattccattcccttttattctctatcctgattattttcttcatggccccatcacagtttgtaataatgttattaatttgtttctttgcttagtgtctgcttcctccactaaacagaaagctcgatgagggcagggactgtgtctgttttgttccctgctgtatccccagcacctaaggcagtgcctcctaggaagagtattcaataaatatttatcctacgatggaatcaatgaatttaacaatgagtctttggtcacctagccaagggaatggatcgaaccctgccccttatgcaaagatttagggacagtgccactgcgttatcctcaggtatttgaaagactgtccaaaaggggttccatagtgtaatggttagttggcaccttggactctgaaaagactgtcctgtttaaggacatgagcttgttagaagcccagaaggcaaaattaggaccagcaggtagaaaagatggaatcagctcaatatccaacataaaattgtaacaatggaatttattaaagttggagagggtctgctgcttgaggcagtgagtttcccacacgagaggtatagaaaaggctactagggaagtcataaggtgatacctgcattggttaggaattaatgagacgattacggccctttgggatgctgaacattctgcggttctctgtccccaccttctttccccattaatgcttcctgggaccaggccagccatgtgactgccttcctcccctgcgggcagcagccgagcagctacggcagaaggatctgaggatttcccagctgcaagcggaactccgacggccaccccctgcccctgcccagccccctgaacccgaggccctgcctactatctatgttgttacccccacctatgccaggtatgggctctggtgcactcaagaggtctgcgttgtccaagaagttggagttgatgatgaggagtttggggaggcactgggctaggagttgttcctcaaactagagcatgccaaagacaggataaatgaaccacatttatactcaaatatttgtgggaaaatagttctttttcaggctgggtgtggtggctcacgcctgtaatcccagcactttgggaggccgaggcgggtggatcacctgaggtcaggagttcgagaccagcctggccaacatggcaaaaccccgtctctactaaaaatacaaaattagccaggcgtggtggcgcatgcctataatcccagctactggggaggctgaggcaggagaatcccttgaacctgagaggcggaggttgcagtgagctgagagtgcgctattgcactccagcctgggcaacaagagtgaaactccatctcaaaaacaaaacaaaacaaaagaaaaaagaaaaaaaatagttctttttctagaaggaaaatacaaaatttctaccaaattataagatagaacaataacatttcaaagaaattttgagcttggcagtgaattaactctctctccttagggaccgtttggcaagaaagttaaaaccccctgattaaagttgaaagggcttgtctgggcgcagtggctcacgcctgtaatcccagcactttgggagcccgaggctggcggatcgcctgagctcaggagtttgagaccagcctggacaacatggtgaaactcttgtctctgaaaaaaaaaaaaaaaaaaaaaaaaaaaaaaagttagctaggcgtgatggtgcatgcctgtaatctcagctactctggaggctgaggtgggaagattgcttgatcctgggcggcggaggttgcagtgagtggagatcatgcagcctgggcgacagagagagcccatttcaaaaaaaaaaaagttgaaagtgcttggcctgatagtcatactagggtccagaaatagttataccagctgttacttacagtgtgtttactctctagcaggcactgtatttagtgatttacatttgcttttgttttaaatcaaatgtaattggttttactaataaaaccaattggggaatgtggttttggatctgtagccataagggtgttaatacatcttctgggaatcagatggctgtcccattcacgcataggaagctctagaccccacctgcgacatgcacacacaaccagccctgggacaggcaggtagatctgaaggataaagaagtacagaagaggccaagccccacgttccacattcctggtttgttccttttttttttttcttccccccgcctccccgcaacaccgagatggagtcttgctctgttgcccaggctggagtgcagtggtgtgatcttggctcactgcaacctccacctcccgggttcaagcgattctcctgcctcagcctcccgagtagctgggattacaggcgtgcaccaccacaccaggctaatwttttttttttttttcccgagatggagtctcactctgtcgcccaggctggagtgcaatggcacgatctcggctcactgcaacctccacctcccggattgaagcaattctcctgcctcagccccccgagtagctggggttacaagcatgcgccaccacacccggctaattttttgtatctttagtagagatggggtttcaccatgttggccaggctggtctggaactcctgacttcgtgttccacctgcttcggcctctcaaagtgctgggattacaggtgtgagccaccatgcctggccagtaattttttgtattttacttttgtattttttttttttttgagatggagtctcgctctgtcatctaggctgggtgcaatggcgtgatcttggctcactgcaagctctgcctcccgggttcacgccattctcctgcctcagcctcccaagtagctgggactacaggtgcccgccaccacacccarctaattttttatatttttagtagagatggggtttcaccgtgttagccaggatggtctcgatctcctgacctcatgatccacctgcctcagcttcccaaagtgctgggattacaggtgtgagccaccatccccagctcttatttaatctttaaaacaacattgttataaagtactgttattcccattttacagttgaggaaactgaggcttagggagattgagccattttcccaaattgtctcacataataagttacaaaactggatttcaaacccagatctacctgatcccaaagcctgtgcccttaatttgtttttttttttttttttttttttttttgagacagagtttcgctcttgtcgctcaggctggagtgcagtggcacaatctcggctcactgcaaccttcgcctcccgggttcaagcgattcttctgcctcagcctcccgagtagctaggattacaggtgactgccaccatgcctgggtaattttttgtatttttaatagagacggggcttcgccatgttgggcaggctggtctcgaactcctaacctcaggtgatccgcccacctcggcctcctaaagtgctgggattataggcgtgagccaacatgcccgrccttttttttttttttttgagatggagttttgctgttatcactgaggctggagtgaaatggtgcgatctcagctcactccaacctcctccttccaggttcaagcgattctcctgcctcagcctcccaagtagctgagattacaggcatgtgccactacacccagcaaatttttgtatttttttagtagagatggggtttcaccatattggccaggctggtctggaactccagacctcaggtaattcacctgcctcagcctcccaaagtgttattataggtgtgagccaccatgcccggccctgtgcccttaatttatagtctcccacagcctgagctctggagttgaggtgggtgatggacatggaccagaagaacagggcaggtgagtgttagcatgaagttgacaggcaagaaagagggagtttaggcattggttgggaagggccacaggagacgcaggcagtggcccaggagaagctgtctgccctggctggagcrggcaaatggtgcctgccccttttccttgtgctgcatctctcccctgcaggctggtacagaaggcagagctggtacgactgtcccagacactgagcctggtgccccggctgcattggctgctggtggaggatgctgagggtcccaccccgctggtctcagggctgctggctgcctctggcctcctcttcacacacctggtggtcctcacgcccaaagcccagcggcttcgggagggcgagcctggctgggttcatccccgtggtgtcgagcagcggaacaaggccctggactggctccggggcagagggggtgctgtgggtggggagaaggacccaccaccaccagggacccaaggagtcgtctactttgctgacgatgacaacacctacagccgggagctgtttgaggaggtgagcaccaggatggggatgggcaagagaccaggtgcggccagcttcattcgttaccttggttagcagtgttgccgttggctgctgggtgaggggctggaagcagtggggcagagtgagccaggtggctctttctgctgctcccttccccggaccacccctctgtttcttctctcccgacctccgttagatgcgctggacccgtggtgtctcagtgtggcctgtggggctggtgggcggcctgcgattcgagggccctcaggtacaggacggccgggtagtgggcttccacacagcatgggagcccagcaggcccttccctgtggatatggctggatttgccgtggccctgcccttgctgttagataagcccaatgcccaatttgattccaccgctccccggggccacctggagagcagtcttctgagccaccttgtggatcccaaggacctggagccacgggctgccaactgcactcgggtaagggaatggagatgggcatagaaacctggctcttggatggacaggtgatgggggaggtacagtgagaccctgggaatgggtggtttaaccaggagggactctccagatctctgatcagccttgctgactctactgaaggggaagctgggaactagcgggggaaagtggtctcctgccactctgccccgagttctgggaacccatgtggcacagagaggatgaaggaataaggccctgtttgttgtttttttttttttttcagacagagtctcgctgtgtcacccaggctggagtgcagtagcgcaatcttggcttagcgcaagctccgcctcccgggttcacaccattctcctgcctcagcctcccaagtagctgggactacaggcacccgctaccacgcccggctaatttttttgtgtttttagtagtgacggggtttcacggtgttagccaggatggtctcaatctcctgacctcgtgatccgccttcctcggcctcccaaagtgctggggttacaggcgtgagccacgcgcccggccaaggcccggttttagaggcactaagtcttcctccaccctgccctttacactttgaagcctatactgtatatgtcgatagggttagagaatccattccaggctcggggacccagaggcctggctgcagctgggcctggctctcactgcatccctcctggcacaggtactggtgtggcatactcggacagagaagcccaagatgaagcaggaggagcagctgcagcggcagggccggggctcagacccagcaattgaggtgtgatggcggccccaccccaactaccacctcttttcaggcacagaccttgtgggactgggccccaggcctgcccaggatgtggttttccaagtcctgacccttggagccagaagtggcccctctgcccctccaggcccagggcatggtcctgctgcttcacccctcccctagcctgccgtgtggcactgcccacaggctggggacaagcagcccttgtgttgagtcaggttggccctgtytagggtggaacagaaggacagatggacccaggagggagggcagctgagtaactgggtaacttattggggctgggcatgcactggggggctggaggagctgggctggacccttcccacctgagcatgctgacccccttcctacctccagaataaagaatctcaacctggaggggcctcttgttttcctttgcttcttacattgggttcttgctttctgatccttacagatgtgggctcctgttgctgcacaggtcgagccagggtccaaactttggagtcctagctgctccatcagacagaaatcagttctcccaggcccccatccccttgacaagaaaaagcaattgcttccatccaaaaactttattgagtctatatcagaatcagcctccaggccttctcatgtcactttcccatcactctgttctttgctgttccctggtggttctgactacaagggctaggccctaggacatctggttttctttcttaccccagtccagctcgctgactatccttagcccctctaatcctacgatccccccaacctggagccttggtaaggagttgtgaggttttcagacttgtccatccctccctcttcctcaccccaagctccaggcctctaggcctcagatagatcctccttgggaggtgcttctcctggtggggcctcctcaggtgctggcctgcaggcaacccctccctgtagccatgctgttttcagcatatctttcagcccactgggaaagagatagccctgggtctctcctcccgcatcaatgacccctccaagcccctccagtgctgtttgcaggtaccgcaggccaaggagcaccagagcctgtgggggaagcaaggggaaagagtcagggagagtcagcggttccaagaggcccagggttggaggcagggaggagtcccgggtgggaggaggtgtcagatgctttgctgactcacctgcagtaggaaggtgacagccagcatgctacccagtgtgcctgccaagtcctgcaagtgctccagcagcacctcatggyacccttgggcccagaggttttggttgggttgtyggggatcgaacagggggtgggcgtaggagtctgaaagacggttttgcaggcaaggscggggtgagtgggggttgcaacaggagaaagggaccccatcagtcaggtataggccttctacattgctctggatccggctgcaaagggagggacagaggggttaggatgtctggagatagaggcctgggggagggactgaagggcacaggtgttcagaagggaaaaagaatagtaaaacatttactgactgctgtactatgtgccagccaagcataattcacatcttcacaacaactctatcagataagtactattatttccattttacaggtgaaggaatgggcccagggtggtttggtaacatgccctgggtttcacagctaataaatggcagagctgtaaccagtctctcagccactatgttctacttattgcccctctgagcgaggtggggattcaaggcagcaggagggagcctgtccagggaggaggaggaggaggaagggagacgcaaatcactcactcagccacatcccggtcaccgggatccaggtaacggctgctgacccactggaccccaaaccaatccttgtacccgtggcgcccgcagcagtggtacctcagttgcagctcatccaccagccttttggcctgacagtgcccaggcacctctgtgtccttgtagtgagccaaggcagtcaccaggccctcctccagcgcctcatccagactcccaggcaaagccagggctagcccgaggscgacgaccaggagcycccccccaccagccrtgccagccaccagcagcgggcccaggacccctcgccagggagggtatagagctgcattcagacttgcccggctggctcctacacccactagtcctgtgyccagagccaccgcgcccgctgccagggcagcctggggcaggacagkgaactgacaggagggagccaggaaggtgccaaggtgccttagctggaccaggaggtgcccactacagaggaggatgacgccaccagccagcgccagcagccaggagaggagccagagcccttgtgccaggcggatgcggggctgcaggggcagcaccaggggcaacaccggcgccatctcccatctctgcccaagggartgcagaggtgtcagggatggaagctggctggggcaggatgctgagtcagcccggcccggcttgagctgggctaatgccaccctgaccccaataccctgagcatcctcccatcctcagccctaataacccgcccccctgtcagccccaatacaagatgccttggccttgccccttacgagaaactccgcccctaggccgagggcccgttttgtgaccccgcccctgcccctcgcggaagtggtggggttggtccgctcaaccctgaggggttaggggctggggggcggagatatcggggcgggcgctcccttccccgtcccctgggaatccgggggcggggatccgggaagggcctggagccggaggccgggagtaggccagggggtcagccggctagcccgcccccgtactgagcggcgaggcccggacagggaggggttaccaagcggcccggccccccctcgggcccgccccccctcccgcgcttcctggcggctccgcgtccggcgcctgtttgtgctgcggcgctgtggcaccggacggccctgccaccccacccccgggagccgagagcggccccgggagagtccgagggcccgggggggtctggacactgcggccccgggcccacagcgccccctccaggccccttccccgcgcccgacagcgccccctcggggtggtggtacggcgcccttcgcgcgcgccccggggtgcttccccttcccctctccccggccgtggcccccgcggcttagacgcctcctccgccgccgccgctcggagcaacccgggggccggatggacggggccgcggggcccggtgagtacggggcggggcgggcggcgtgccccttcccggagcgcccggctcgtcgggttatgccagagctggacggctgtctggaggcgtccccgcgtgctcctccgccccaggggctccgagcatcctccacagttcctccggtcgccctccctagttgcttgggtcttgctgtcacttcgggcttccccagcgtcattctacgccccacgtaactccgggcccctcgatgtttccctgccccctgcgttactccgggcctcttctcgtggtatttcaggtctttttccttctgatccccactgccccctgagaccttcactgtgactctgctcaccactcacactctctcctgtcactctggatctcttttcttgtactctgggtcctcagtatgactccattcccgcaccccgttctctctcctggtgttcccccggctcagttactcagctttcgctggagacctgagcttgctgggggcgcgtggggagggctgcggtccctgccctcaccagtgcggcgcctctctctgtggctcccacgttcctcggcagtactccatatttcccccccggtactccatggtactcccagtctttgcggaggctgagacggcagcaggaagggagctttgccaggtttctcgcctgccctgccagaaggaggcccttgatcctttaccaccgtctcctcccctctggacgagcattcaagcctggggctgcctgaaaggggcagtcctaccggacacatgtaaagttgtggggagacagaatcccctctacgctttcttcaggtgatgggtacattctgagtacctcttgcccttttcccaggtgacggccctgctcgggaggccctccagtctctgagccagcggcttcgggtgcaggagcaggagatggaactggtaaaggcagccctggcagaagcccttcgcctgctgcggctgcaggtgcccccttcctccctgcagggctctggcacaccagctcctccgggggacaggtatgcatgtcatcacaccccatttttcctcctccttggggcctctggggcttcaggttaattcaacatctctccagcagtcttgcagcccccccrggactgccacccacgtgcaccccttccttggtgagccgaggcacccagacggagacagaggtggagctcaagtcatcccctggaccccctggcctgagcaatggacccccagcccctcagggggccagcgaagagcctagygggacccaatctgaaggagggggcagcagcagcagtggtgctggctcccctggccccccggggatcctcaggcccttgcagcccccacagcgtgctgacacgtaggtgtcctgtggccctgtggcggaagctgggaggggtggtaggattgcagagtacagttggagggaatgaccttcactatgcccccaccaggccgcgaagaaattcttcctcctcctcatccccctcagagcggcctcggcagaagctctccaggaaggcaatctcctccgccaacctgttagtgcggtccgggagcacagagaggtgggtgaggcttcccctcaacccaccccgccccaggcgcaggctctcgactttccatatccctcacctcacatccctggttggggtggggggacctgattgcccaacaggaataaagaaacaaacacttctggggcgcctgctgtgtaccgggcactgtgctaaaccctcgacctcctccatctcagtcagtccccacaacatccttgggggttaggtggtctcaygctgctcattgcacaggtgaggaagcaggctcagagagggtaagtcatttgcctggggtcacacagctagagtcaggatttgaacctaactcttcctgactccagttcccctaccctttccactacatcacagcacaccttctgcgatcccaagaggcttttctagaagcttccatggctttcatggacggctgtccctagagcttcagccctctttccgctggatctaccaagtaccaatctattaatacttacttctagagggcaagaggacatcctagtggccggatgtagttgcctcagagtatgtacgggccccaggacacccggatgttcattctagccctgtccttggcctgtgctttattctctgaagagacagtatcactttactgttatctaacgacaggaatctctggagagatgtggactttcttgcttgcctcccggatccctgagaggcggagctggtgtacattctcgactccctttggtcccattttacggatggggaaatgaaaaggtcaatagcggggcctagtggcgcgcacgtgtaatcccagctactggggaggctaaggcaggagaattgcttgaacccaggaggcggaggttgcagtgagctgaggtcgcaccactgcactccagcctgggcgacagagcgagactgaggcctggtggtctggaggagagaaagggctctggcaccctgcactgcctcttccaagctttgtggccttgtgctgtgcgctcagccccttcagcctcaatcttcttatctcttaaatggaactagaagtctccatctactagggccctgatactcacgaagcaaactacaggcttgcagaagtgactgtggtttctgcagtgacctcttttcttgtgtcctgcccctccccgcttaggtcttgggacctgaccccaatccctgtgctttctctcttcccaacagccgtgggggaaaagaccccctctccagccctgggggccctggatctcggaggagcaattacaatttgggtatgtaaagagggacagagaggaaaacttggatggcagggttaggatttgggctgtagccccaggagctattttgggtaggtgtggtgggtagggttctgctctgtctttcctggaagggggtagttgacaccaccccttttctctgtagaaggcatctcagtgaagatgttccttcgagggcgccccattaccatgtacatcccgtctggcatccgcagccttgaggagctgccgagtggcccaccgccagagaccctcagccttgactgggtgtatcctgccccttccagtcccatgagaaccacctttctcaccttgggacccctctta

SEQ ID NO: 93282 - DNA, 43473 bp, Homo sapiens
  misc_feature (1)...(43473): n = A,T,C or G
caggagggcacgagctggacactcactccacgaggactcctcccaggcccctgaaggtggccagccttggatatgagtcaaaaacagtgtcctgaggacccagagctggatgttggctccattgcaagccctgtgctgatttggggctcccagaggctggcccaggcatgccccaggagcacacatgtgggcccagccctgccaaagcaatgtccagtgctgtcactcaggaatgcagctgcccagggcccattcatgcctcatcagtgcctgctcagtgaacgtgcaggagcacatcaggatggcgttgccctaagttttatgtggatagcaaagcaaggacaggagaggcaccatcaagctcccactgcctgggggtttgctcccaacccaaaaacatccagggcagcagcctggcttatgaaacatgggagcagctttacataatcataggaaaccaagagaaaatgtgtgttcacaaaaatgcaacctgcccataacttcactagctaatttttgtatttttagtggagacagggtttcaccatgttggtcaggctggtctggaactcctgacctcaagtgatccacctgccttggcctcccaaagtgctgagattacaggtgtgagccactgcgcccggcctattttgctttttttctgatcagctgggtgtagtggctcatgcctgtaatcgcagcactttgcggggccaagatgggcagatcacctgcagccatgagttcgagaccagcctggccaacatggagaaaccctgtctctactaaaaatacaaaacttagctggatgtggtggcaggcacctgtaatcccagctactcaggaagctaaggcaggagaattgcttgaacccaggaagctgaggttgcagtgaaccaagatcgtgccactgcactccagcctggataacagagtaagactttgtctcaaaaaaaaaaaaaaaaaaaaagtcaaccatgttcattgccaataaattccaacaaaagagaaaagggtaggtaaaaaactgaaagtccccaattcccactctctaagcctcccacggtttgtgaacctgtccctgcagactctgcatgcccatgtaaacttacacacacctacaagcatgcgcacaagtgcacaaaggcacatgtgtgcttttatttatttttgacagaaataggatcaccctctatctgcagttctctaccttgcttttaccccattaacaacgtattatgggccgggtgcagtggctcatgcctgtaatcccaacactttgggaggccgaggcaagaggatcacttgagcccaggagttcaaaactagcctgggcaacatagcatgagaccttatctcttaacaacaacaaacgtgagagggtgtgtgagcattgtctgtgagtgtcagtgtgtgtgtgtgccaaacagttcctgcaatctgggattcgtcatgcccggcccaagtgcagccccctctgggtccccaaagtacaggggacatgaagaggtgggacatgacttcctgacactgccagtctcttatgcaaggtgcccctgcccagtatggctagaccggtcctggcatttcaggctgaagggcaattcagaactctctgcttcacattccactctaggcagccagtacaatccatcagcactgccttggtgatcaaagccattgcccaggaacaatactgggtggcatggcacccctcaggaccccaacccccctcaggtcccttttagtgatactggagatccctggggagtggctgtgggggactcttacgtggggactcacactgttctggctcctctaagggtgaccttctccctagtgctgcacgggtcctgggggacagctcagattccagaatgtggctctgctctcaggtcactgtggcctctgctggcacctgatgccggcagtaggacatttctrccacttcctaccctccaacagagcacctttgtgtctcggtttctggaaaggccggaatgaaggacaccagtctgaatggccagattccctcccctgaggcctccctgatgccctcttggcttgggtgcagccctggcacttgctgactctgtgtcctcaggcacatcacttgacattcatgctttcattctgcaggcattcattgagcccctattgtatatgagacccagttgtagtccctgcggatagagccagggacaagagattgtattccggctctccgggagctgaccaaagatcatgcagataggcagagagccctgcagagaccaagacaggcagtgtgatgggcagcatggctctagatccaggccatgtgaggagcctcaggaagggctctgctggctcagggagcagcctgtgcaaaacctctaggagggagtgggcttggtattttttaaggaatgcgaggtcagtgtggctgagatgggtagggctgggggacctgaattatatccaaagggtggaggaagaacaacatgggagttaagctggggaggaacacttctctggcagccatggggagggtgaacaggaggctgagagaggatggggtgtgagggcagcagggagccagatgttagctggaagccagacaggatcccagggctttcttccaagtgccatgtgacttctgaggcgtgagggttcgaataaagaccctgggacctggggacaagggaaccaccctggacaaactgggtgctagcaacacctccagctagcctaggattctggttctgaagctgaccttcaggaagaccaagagctcttgaaataaggctgaacccttgggccctgtgaaagggaaaacactcaaactctgtttttcctctgttctcacaccacaacaattaacacaaaagactcctgtgatcaaatgtgtgggggtttctccccatgcaccaagcaagcaaccaattctgcagcgacaccagctgggtgtcctccaactctattccattctgatgctaattacctggagatagcctcagaaaccacaggttaaggattcagtcccccaagagcacctcctccttcccatgagtcgcaagattgggactgaccagcttcaagttggggttcccaccactccctctttgggttcaattaatttgctagcgcagctctcaaaactcaggaaagcacatttatcggttagttacaaaggatattttaaaggagacaaagaaacagttaggcaaagagatacataggcggaggcctggaaaggtccctagtgaaggagccattgtctccatggagctggaatgttccaccctcccagcacgtggatgagttcttgttcaccttcctgtgagcctccacgtgttccgctgtccagaagctcctgaaccctgtcctcttgagcctttcatggacatttcattggacagacatgattgacaaccttgtggaaatgtgattagaccaaaagtatatgatctaatactaactgactgagtggggaaaccccgcaagacctgtgtgtcctgactcttcttgacctctctgtgaagctcactgtctggtaaaagggcagactcttgaaaccttttgaaaactctgtgccatccaactctgtggcccttaggacagtggctccctaagggagtggcctcaatttccccatctgcctaacgggactcatccttatcactctgcacccactctggtcttccctcctcatgggtatgggacagaaccccttctcatgggggtctaatgacctacaattacacgaggtaggtgagagaacttacttatggccagctccaagacagaccggcaggagaagatcctgccatggggagagaaaggagcaggtgaaaggaaggtaggagaaggcctgagagactctgtttctggggtctgctcctgaggtctaaagcaccccagtggtataacaagggttgggggcagttctaagccaggggcctgtatatgcatatcatagtatcacaggccccattcatgtggaacaccaggaggagagagagcctccctgaggtccctggagctccaggtggtggggaggggacaattttctttccattactcctaggtccccagagccatggtgagttctgtgccattgtcagagaccagagtgataaggatgagtcccattaggcagatggggaaatggagtccactcccttagggagccactgctctaagggccacagagttggaaggcacagagctttcaaagggtttcaagggtttgccctttttccagacagtgagcagcttgagggcagaggtggcacctgccaggcatctgagggtggcacactgtggggcccccctccaatcctagcccatagccctcaccagccagacaccatagggccagcctctgcgggctgggccagcaggagccaggtgctatgggatgccatacttagggtctgattgggcatctgggggtcaggccagcagaggagcacctggaggcgagctgggggactcactcaaattcagtcaatcgcctcatgagccagagctctctgagtatgggcaatgcagggaggacacagaggacacagggcggccactggtgcctcttggatctctcagggttttagctccctgcccagccatccatttgagggtcttgcctttatctttcctctgtcaaatggagcttcttcctctgtaaaataggcattgtaggcagtatgtacctcactggccaagtgtggtgggcagattgaatgaaacagtgtctgtgatgaaagtcccctccctaatcccactctggggagcttcatacctctgggaaccatggggtctgataacagtagtggtgggtgcccctgtccctacagacctggaagcaaacccaataatctccctaaaagtcagtagtgtttctaggccctaataatttgtaaaggatcttcccctagtaatttctcagttatcatcacctggcattgtcatggctaccactatcctattctcattttcaataatccccatcccctgtgcagggctctaaagccctgagtggctgggcatggtggctcatacctataatccggcactttgggaggcagaggagggcagatggcttgagcctaggagttcaagacctgcctgggtaaagtggcaaaaccccatctctacaaaacatacaaaaattagccgggcgtggtagtgtgtacctatggtcccagctacttttgaggctgaggcagaaggatcacttgagcccaggaggctgaggcttcaggcagctgtaatcactccactgcattccagcctgggtgaccatgggtgaccccgtctcaaagaaaaaacaagttttttaattattagaaaaaagaaatagggcctggtgcggtggctcacccctgtaaccccagcactttgggaggccgaggcggatcacctgaggtcgggagttcaagatcagcctgaccaacatggagaaaccccgtctctactaaaaatacaaaattagctaggtgtggtggcgcatgcttgtaatcccagctactagggaggctgaggcaggagaattgcttgaactcaggaggcggaggttgtggtgagccaagatcatgccattgcactccagcctgggcaacaacagcgaaactcagtctcaaaattaagtcctgcagtctcttgggcctggggttggtcggctggggccaagcctggcacccaccagccttgtgaccttgattgcccttgccaagcctcagtttgtccatctctaaaatgggattcgccgtgacaagtccacggaggactgtgtggaggagggagactgagaggctttcgagtcaggagcccagactcgaatcctgagttgttcgttatgttattattattggtgtgtgtggttaactgctaacctcgcagtccgcagcggcccagcgcctaggggaggggagcgggcaggaggcggccccaggcggggcggggctgaaggcctggggtgatccgagccccgcctcctccccctgccccgcctctcccatccccgccccgccccgcccggcgacttaacgcgcccccgccccgcgcccggcctcggcagccgcctgtcgccgcgggagcagccgctatctctgtgtgtccgcgtgtgcgcccggtccccgcctgccgcaccatggagagctaccacaagcctgaccagcagaagctgcaggccttgaaggacacggccaaccgcctacgtatcagctccatccaggccaccactgcggcgggctctgggtgagtgcgcggcgccggccggggacgcggctcgggcggggcggggggcgtctgcggcggccagagtcgccgcgggctctgggtcgcgctgcgagatgcctagacgaggaaggtggcccgggcgccgtcggagggcggagacgcgcgcctcgcagggccccgggctgcaggcggcttccgctgcgccgcacactcgccctacgcccgggctcggccgcgtgggcctctggtcctccgtgcgcctcaggccggctcttccccacgcggatcgccggccgcgcagctgcatggtggcgcgggggatgggctcgcgactcgccaagtaccctctagggtgatgccgggaaggccaccattactgctgttctacagaacgcggccctcttaaccctctccaccacctggctgtgtgggcgccgccgggagtgttcccccttccagatggggaaacggaggctccgagttagtcagctacccaaagttacacacagggagatctgatttgagccccagcagtccgactctagagaccctgtttttaattcctcttgcaggagactcgggggcccggccttctccccacctcagactacgctcccctacccctgtctcctgccacccctgggttgggtccgagtttggagcagggggctgctgagacgccaggcagcggcggggctgattgggggaagaggggaggagggcggtggcacgtgggtgcagaaccctgggatccattgtgaaaaggaggtctaagatttgacctggggcgggaggaggcggagggcaaggagactgagaaggctgagcgccggaaggacggagttccagggccctagcgccgggagtgacgtcctggggcagggccagccaccaggtgctgtatctcccaggcaggagctggcgtgcctaggccccaagatccttccctggccagcccttttggcccagaaggtggacacccaaggagcctcctctgtagcggagacagggataattaatgagggccaccgtgcatgcagctggaggtgtccagtggggtgggtgagggggtcagtcagtgaattacttcagagcctgcttcccgctctgtaaagcggggacagtaatggcacttaaccacgctgggtggtttcaaggactccagtgctctacttggaggctgctttgaggccacagtgccagcagtgctccgggctcatgacagggttgtgagggctgcgtgatggatgatttctcgggaccttcccaaacaagctctgtttcagacagacaagattctggcttctggccaatttcattcaggatatattattaagaagtaaatctgttcacctttctgggtggatacgcattcaccctttgtgcctctaagayaccctgttctcagaagggattagatgtctttcaaagcccttcccccacccactgccttgcacactttggacctgttagctctcctgggtttgtgtcagtcttaccacttatgtggggtatcccctgcctgggcagggacctggcttactctcagctcccctttcaccagcctggcacacggtagctctgcaggccttgtattgcttatttggtactgttggacctgctacctttggccgtttcagggggtytgaggtctagctggagagaggcagcaattacccaactaagtagtattgcacatctgagcatctttcagggctagataaaacatgcagatgtttacagggttcctgagctgccaagtaggtatctggtatgacacagcatcatcgtttgttgcatcctgagaataaccctgtgagatagattgtgttgtattcacattttatagacgggaacactgaggctagtgtgttaagttacttgcccaggctgggaattggtggccattccgtactgtctggttggggctcatgctgtcaggaatgcttcttggcagggcatggtggttcatgcctgtaatcacagcactttgggaggccaaggtgggaggattgcttgagcccaggagttccagaccaacctgggcaacacagtgagaccccatagcttaaaaaaaaaattttttttttgagatggagtcttgctctatcgcccaggctagagtgcagcagcacaatcttggctcactgcaacctctgcctcccaggttcaactgattctcctgccctagcctcctgagtagctgggactacaggcatccgccaccgcaccggctaatttttgtatttttagtagagatggggtttcaccatcttggccaggctggtctcttgacctcaggtgatccacccacctcggcctcccgaagtgctgggattacgagtgtgaaccactgcccccggccaaacattttttttaattggctaggtgtggtgatgtgtacctgtagtcccagctacatgggaggctgaggcagaggatcacttgagcccaggaagttgaggctgtagtgagccttgaacatgccacacactgcagcatgggtgacagagtgagactgtgtctcaaaagaaagaaagagagagagagagaaagaaagaaaggccaagaaaagaaaaatagttgggcatggtgttacatgtatgccagcactttgggaggccaaggcagaaggttcgcttgaggccaggagttcaagaccagcctgggtaacattagcaagaccctgtctccaaaaataaataatgtttcggccaggcgcagtgactcatccctttaatcccagcactttgggaggtgtaggcgagtggatcacctgaaggtcaggagatcgagaccagcttggccaacatggtgaaaccctgtccctactaaaaatacaaaaaattagctggacgtggtggcgggcgcctgtaatcccagctactcaggaggctgaggcaggagaatcacttgaacccgggaggcagaagttgcggtgagctgagattgcaccattgcactctggcctgggcaacaaaattgaaacttcttctcaaaaaaaaaaaagaatgcctcttgggcaagcagtctgtgccaggctggagaatggtgaaaaaggtgaaagggaaggccaggtacagccgcggtggatattagtcagtctgaaaggcacttggagagaaataagatttacaaatgtagggtgctccaaaagagtggaatgtcaagtgtgtctcctagttctttgttaggcaaagtctgatttcctcaccgccgttacccctccggaaacatactgtggtgtccgagagttacaccatgtttacattgtaatgtcttggagagggaagctcactgaactcaaaaaatatccatttgcaaaagaaaaaaaggatatgtaaaatacagtgactgtgtgtgtgtatgtatatgtttaaaatatgcaaaaaaggagggaaaacttatttttcagaaggaaataacgttgctatgcaacccatattttgaaagttgtgagccaagagtatgtgtgtgtttgcacccaaaagctaatcaaggaagacttgagacacaggtagtcttctgtttcttgtccccagatgtttatcttgaggcccactgttccctctctgcaatgaggcatagagtgaaggctcagtccggaagccctggcccaatctgggctgtagtcacagctaaagtgacagtttgtcagaatgtccccttttctgggggagctcacaggactttgatccagttctttttcttttgagatggagtttcactcttgttgcccaggctggagtgcaatggtgcgatcttggctcaccacaaactccgcctcccaggttcaagcaattctcctgcctcagcctcccaagtagctgggattacaggcatgcaccaccacgcccggctaattttgtatttttaccccgtagagacggggtttctccatgttgaggttggtcttgaactcctgacctcaggtgatccgcccgcctcggcctcccaaagtgctgggattataggcgtgagccaccgctcctggccccttttccttttttctttttttttaagacagggtcttgctgtgtcacccaccaggtctggagtacagaggcacagtcatggctccctgcagtcttgaactcctaggctatagcaatcctgcctcaccctcctgggtagctgggaccacagacatgtgctaccatgtctagctttggtccaatcttttgctggccacttactgagacaggatttgtacattctgtgaggacccaggctcgtttctcgatagctttcccattcctatgccattgctgacccgtgtgcagtgaacctcaccaggcccaggaagcagggacactggcctctgtcaggagttgggcctggaggtgaagggacagacctcacagaaggctctttgttgaggcagcgcccacagtggctagagcttctctggggtcatctccttccatgggctgaaggaattatggsaagggtccagctcatcctggctttaaaaaaacaaaaccccagtggccttgtcagaagtggcctggatgctgaggctggtggcaaagatttctcagttctcaccagggccagactgtggtgttatccaaacagtgcaagtgtcatctgaggactccatcacagtcaggcctgattcaaaagggaaggtggtctgtgctttcaacaagtccccccaggktttctgacccacagctttggggaggttaatgcctggccagtcctggctggtggacacaggagatgagtccaaccctggctctgttcctagtggctgtgcctttgtcagaaaggcccttccggccaggtgcggtggctcatgcctgtattcacagcactttgggaggccagggtgggaggattgcttgagcctgggagttcaggaccaaactgggcaacatagtgagacctcatctctacaaaaaaaagaaagagctgtgcatgtgcctgtagtcccagctacttgggaggctgaggtgtgaggatcacttgagcccaggagttcaaggctgcagtgagttatgatcatggctctgcactccagcctgggcaacagtgaaaccctggctcttaaaaaaacaaaacaaaacaaaaaaaccttcctatctcaggttctcagttgcccaggctagaatgctgtggcgtgatctctgctcactgcagcctccgcctcctgggctcaaatgatgccctcatctcagcctcacaagtagctgggaccacaggcatgagccactatgccttggctaatttttgtattttttgtagagttgaggttttgtcattttgcccaggctggtctcaaactcctgggcttaagcgatccacctgcctcagcttccctagagtactgggattacaggccattttctccatcttgaaaggagaggttcatggataggtggtttcaaactgggtgcctcaggagtagggctggggatggagtgagtgggctccggggtcccaccgcccgctgttgctgattttacatcctggtgctctttgtgcccttaaagtggctgggrttgtatcccagtttacccagctctgacatccaggtgctttggctgaaggcttgagggcctcctggggtctctggccccatgtggctccgcctctctgggcctgtttctgtttttgggctgcctcaggacccatcctggccctgactgaggcaagagcatgaccgttgagattgccccagcagcagcatttcctcactcagtgtgaagacactggccaccctggggtggcttggttctctgcccgagtgacctctcctctgcagggctggtggtcggtgttttaagaaactggaagtgaagtacagcacctagttaggatctggctgagactttgtcgtggcttcctatggactctaactgatgtccggcccctgttgtggctctgacccctcaacattcattgtctcttgtggcaggcttgttgtcactgtcgcctagttccacaaaatcaggaactcccttcttgccacagaccagtttgccctgggtgctggggacacttctagaggtcagggacctgcacagagctaggtcctcaggcaggctctgctcctgccctgaatggagaggcaaggtaggggagagaggatgtgctgggagctggggtgagcccacctgcagatgggggttgctcagaagtcagttgcatttgtgcactgggtggaatctccgaggactacacagctggaagggaagtgtggacgcccaagaacttcctctactgagctctcctagcacctttttcttcatttatttgtttgtttgacagagtctcgctctgtcacccaggctggagtgcagtggggcggcgatcttggctcactgtaacctccacatcctaggttcaagcgattttctgcctcagtctcccaagtagctgggattacaggtgcatgccaccactgcccagctaatttttgcattttcagtagggatggggtttcaccatgttggccaggctggtcttgaattcctgacctcaggtgatcctcccgccagccttggcctcccaaagtgttgggattacaggcgtgagccactgctccaggccctttttcttttaaaaacaaatttttaggccaggtgtgatagctgatannnnnnnnnnnnnnnnnnnnagaaacattaaaaagttggggctggaagcagtggctcccagcacttcaggaagctgaggcaggaagatcacttgagaccaagagttcaagaccagcctgggcaacatagtgagaccccatctctacaaaaaataaaaatagagaccatcctggctaacactgtgaaaccctgtctatactaaaagtacaaaaaattagccaggcgtggtggtgggcgcctgtagtcccagctactcgggaggctgaggcaggagaatggtgtgaacccaagaggcagagcttgcagtgagcacgagattgggccactgcactccagcctgggtgacagagtgagaacttgtctcaaataaataaataaataaaaataaaaacaaatttctagcagcttgattaaggtataattggcgtatcataacattgtaagtgattttaatgaatttgcagagatttactacaaaaatttaccacatctcctaaaagatctcttctggacatttgctgtcactccccatttccacccccagtcctgggcaaccactaatctaattttctgtctctaaatttaactcttctagacatttcatataaatgcaattatacagaatgagttcttttgggtctggcctcttagcataatttttagagggtcatccatgttgtaacatgaatcagtactttgttccttttttttggggggtggggggcagggtctccactgtgtcccgaagctggagtgcaatggcacagtcatggcacactgcagcctcaacctcccgggatcaagcagtcttcccasctcagcctcctaagtagctgggaggcactcaccaccatacacagctaattttaaaaattatttgtagagacagggtatgttgctgagcctggtctcaaattctgggctcaagtcctcttcctgccttggcctctcaaagtgctggaattaacaggcatgagccaccacgcccagcccttcatttctttttacggctgaatattccgttgtgtggacatagtgcattttgtttatccattcaccagyttttcttagcattttgctcttatcctagctctgctgctggcaggccgtgtgactttaggcaagtcactttctgtgaaccttagtggccccatcctccgaatgaagcatagtctartatttactgagcaattgctaatttctatgcatggtgccacgttctgtacatacacactacatcatttagtcagattcttcttttacctccgttttatagtgaggaaactgaggctcaaagaggttacagccccaaggttactaggatacatcatgtattcatttgtgcactcagtttgtgcctggtactattcaagcctgtggatacaacagtgaaaggcccaaagctctgtcctcaaggagcttgtattgcagtagggtagacaggcaataaccacctaatgtcaggtggcaagcatgagtgaggggaagaagagctattttagacagtgtggtcagggagggcttcttggaagaggtgacatggggcagagatctgaagaaacaacctgaggtctggagccagaggttctttccgggcagaagccagctcgggtasttcagggcacaggaagagcaagaactgcttytgatgttcatttccaccctgacatcctgggattctctcctgagtattttttttttttttttttttttttgaggkggagtctgttgcctaggctggagtgcagtggtgcgatctcggctcactgcagcctctgcctcccaggttcaagcaattctcctgccttagcctcccatgtaaagtagctgggactagtggcccgcaccaccatgcccagctaatttttgtgtttttagtagaggcggggttttgccatgttggccaggccggtcttgaactcctgacctcaggtgcctcaggtgagccaccgcccctggcctcttctaaatttttttttttttttttttttgaggctgagtttcactcttgtctcccaggctggagtgcaatggtgagatctcagctcactgcaacctctgcctcccaggttcaagcgattctcctgcctcagtctcccaagtagctgggattacaggcacccaccaccatgcccaactaattattgtatttttagtagagacggggtttcaccttgttggmcaagctggtctcagactcctgacctcaggtgatccacctgtctctgtctcccaaagtgctgggattataggcgtgagccacctgaatatttaaaaaaaaaaaagtatatgcataaagaagaagataaatgatgtactcttgtcataaataatgaacctgtgtgtagctgctcccaggattaagaactagtacattacagtgatttttggaactacagtgggtccctccatcctcatcttcccttcccctgagaaagaactataccctgaattttttgtttgttatcattctattgttttcctttttttttttttgagacggagttttgctcttgttgtccaggctggagtgcaatggcgccatctcggctcacttcaacctccgcctcccgggttcaaacgattctcctgtctcagcctcccgagtagctgggattacaggcatgtgccacatgcccggctaattttgtatttttagtagagatggggtttatccgtgttggtcaagctggtctcaaactcatgacctcaggtgatctgccctcctcggcctcccaaagtgctgggattacaggcttgagccaccgcacctggcctgttttccttgtagtatatacaaaaagacttgtacataaatcaatatggtcttctttgttaaacagatccttctgcactgtgcttttttcacactatatttgggagagaatattgataccggatttgtgaagtgtagctcgctcattcttactgctgtatagtatcccattatattaatatattccagttaacctcgtctattgataaacatataagtgagttccaggtcttgcaattgcaaacaatgcggggcagccctgtttgtgtttccttttttttgttgttgttgttgtttttttcctgagatggagtctcactctgtcaccgagtctagagtacaatggcacgatcttgattcactgcaacctcagcctcctgggttcaagtggttctcctgcctcagcttcccaagtagctgggattacgggtgcctgccaccatgcccagctaatttttgtatttgtagtagatacagggtttcaccatgytggccaggttggtctcgaactcctgacctcagttgatccacccacctcagcctcccagagtgctgggattacaggtgtgagccactgtgcscggcctgtttgtgtttcctgtagaatgtgtggaacatgtgagtacatttcactgtatgttcctactggtgaagttgctgggagttaagggatgtgcatcttcggctactgatctggtttatttttaatgcttgaaagattacttaggttctctatttcttcttgagtcagttttggtaaattattttcattattgttattattttttagacagagtctcactctgttgcccaggctggagtgcagtagcatgatctcggctcattgcaacccacgcctccggggttcaagctattctcctgcctcagcctcccaagtagctgggattataggcatgtgccaccacgcccggctaatttttgtatttttagtagagacggggtttcaccatgttggccaggctggtctttgagccgctgacctcaggtgatctgcctgccttggcctcccaaagtgctggaattacgggtgtgagctaccgcrcccaacctgacatccmttatctcttgaaggagcccatctggagggtgagggagcctctctggccttttcttgcatagaaacctgtgagcaggtggagtgagcactaaagcgatgacagagattctcctggccaggggacatctggaagaatatatattgtcctggaggggagtggagagggggcttttttttttttttttttgagatggagtgttactcttgttgccaaggctggagtgcaatggtgcaatcttggctcactgcaacctctggctcccaggttcaagtgattctcctgcctcagcttcccgagtagctgggattacaggcgtccaccaccacacctggctaattttttggtatttttagtagagatggggttttaccatattggccaggctggtcttaaactcctgacctcaggtgatccgcctgccttgacctcccaaagtgctgggattacaggtgtgagccactgcccccagcctggagggggctttaagagactttctttgggcctagctctaagcttgccacaccaccgtcacaggttgaactaattggggttgtaagtggactgttttggtcaaggcagggtgtgttagttttttttttttttttttgaacagtcaagtgtgcttgttagccctgtttatcacagagtcagggtatacagtaagtaccctgtagcccctccaccgtgctcctcaccccatctctcgccagtgttcacccagagttgtcacacacagcaccacgggatggggcgtccacctgcagttgtgcaggcagtctggaatggcaggaaaaactctggccctgaggaggccacaggcttaaatgtatgcctttggccccaaaggcccgctaggaagttgagcttgaaagtaactgtctcctgtgtgctcagtgctttacagtgtgcagagcccggtctcaatccttggtgtatttctcccctcttgcctgcctgtggccagcaggagtgggtggtgtcaccatccctgcctgtagataagagctgcaggtgctgagagggttggcagtggtggcggctgctagagacctgggtactgtgcatgctgcgttatctcactgtgtctcccagacactctcccaagtgaagaagctgagccccgggttgacgaagcacttgttgaagtcacgaagcccaagtggcacagctcacctccccaacccaggacgctctgccgagggagagccccaaaagctctggggaagagtgcggggacacctggctcctaagcgttcttcttttgtgcatgtttacttggtagaagtgaagagagtggccgcagcaggctggatgcagcctttggaaggaatgaaaggctgcaggcctagcaaggaaggcttaaaatcagctgcacgttctacttctcacccttggtcacctcgcagctgaccttcctctctccacgtttactctatctgggcctgggtgtgcttctgccacacacagaaagagcctgtgccacaccatttctccctggaaccccttctggtggccaatgggactgtcaccccggggtgtcgaggtggatggggcaggtggagccctgcacttaccgtccttgttcttccccggaacagtttggcccagtgtccacccacatccttctcccaccaaggatccctcctaatgggaccatggctttagaaacaggacccctcagggccggggctgcccttggaggtgggaaggacgagaggtcagcctgaggtgacctccagttgaagctggccctgggagcgtgggattagggtggcctccagttgaagctggcactgggagcgtgggattagggtccctgccaggcagaaaaggktttctcgtttaccatgtcctcmcctccctctttcaggtgtagtgtcttttcccatgaccgggagttcatagaaatagttaagtataagatgatcgtgtgcgagaatgttggtactaaaccagcatggacagttttctggatttctctactactaacttgtctgcactgagcgtgactcacccctaacctggtgggagcrctgattggaggggcgggaggctggcggcgtgagctccagatggtgcatgtgcccttgggcttggcatgcggcgtgtcttcgtgtgaaggacctctgggagcagcgagagggctgagctgagctgagctgagctgcatgtggaggggccctcccgggaggcctgtgccctgaggctgaacttttaacaaaaccctgggaccagagggcttcagggctgatcaggacctgcagcgcttcctgctgggaagcaggaagcaatagaaagtttacgctttctattgctcaggagccgctcagtgattaaaacaagtctaaaaagccaaggggactccgtggccccaccactcccaggctggaaggcaggttcttgctttgtcagccyttcctcagcccttgtccataggcagaaggggtttttattaatacatgattgtagccttgtaggagatgagattatgtgtcttgctttgaaaattctacacaaaagcctgtttcctagttgctacagcagccctcaaactgcccatttctaaagctttcaagtagcccagtgatgcaattggaaagcccaaggcccagtttttcaggctaccacaccccatgcgtggaggctgctgggaggtctgtggtaactccatgagcctcagtcccttcctccctgccccatgggctcagaggcccagcacccctgggtgctgagagggcagggtgcccttcacaagtgggcagtgtccgggcagtcctgtcaggatgtggggtcagtcgtaggaatgccggcrccccttggctgctgagtccttagactcctgggggccactaggtgggaactgggttctacctgacagcagctgcccccagccgcagtgctagccttgggctgagtcttctgtgctagatctctcctgggcccctccttccttcttactcaagtccaaccccagatattttcagttgccgtgattctgaggatctgatgcccctggaaaggtasaacagtccccagcacccactagctggcccaggccccaaactgccaggagtggccttcttgagaccatgtgtcaccctcccagggaacaagagctcgtggctgtctgataagccaggcctgtgtgactcctcaggacatgcacccccaggtccctgtacagctgagcacaatagctcaggagtgcagggccatgatgcctgtgtctgtcttctctcctgggccacagccaccccacgtcatgctgcagcgccgcagagatcatggctgtcctctttttccacaccatgcgctacaagtcccaggacccccggaatccgcacaatgaccgctttgtgctctccaaggtaagagcccagctgcccactgccagccacaccttgcctgggactagggtcacacgggccctggaatggtgagtggtctttgaggagayctggctgggcccacctctcccaggtgccttctccctgctcgtcctggcctctccctcagtgtcctgctctgtgctgacccagctggctaaggaatacaggactgaattgatgggttgctctgccatggagcccaggtacataaacaacgctttaactcaaagaaatggagtaggggactacggaaacatctgttgtgtgttctgcccagtctgggtgttgacaggcaggactggcatctcggtctgggttgtggctccctacctgctctatctgcgttgtgccagcgctcccgaggccacggcttgccccctcggggtggtggtgtgctgtagcagggttttggatggggaccccctgaccccccccttctgggtggaatcacagccacagatccctgaaatccacctgtrctcaggcctgcctccgtggcgtttggtctctcgggcaggctttagagcttagaagtctgtccaagttgttcccatgccacaaaccagggattagggcagccggctgcctgctggggttttggcttcgtccagcctcacagctgtgccccctgcacctgtcttagtgcctgcctggccttggcagtgggaactttgggctgaaaaccaagaggctgaagagggctgaaaggggagaagtggccttcacttgcttcctcccctgaaatggatgctgcagttggccggctcrgccgggccccaggggtcagtgtgargtaggcacagcccgaagtagaaccgctccccacctgacctcaccccaccatccatctcccggcagggccatgcagctcccatcctctacgcggtctgggctgaagctggtttcctggccgaggcggagctgctgaacctgaggaagatcagctccgacttggacgggcacccggtcccggtmagtgctcctgccagagcctcccatgcctctgcctccacttcctatttcccagacatgtgggacgggggtagggggtgcccactgagaagccaaaggtgttgaaaggcggaggagggcattgagttgaggaaggaaagaagcaggtgttttggggacacgtattcaacccaagctggtgccaaaggggaaggccttctgaggcctcagccagggtgctctgggatgacttcagggagggcctctccccaagctacccttctgcactgggcctccttggctaggtagctacagcttgggaagagaggggactcgataagggagtggctgcaggatgctggcgaaaccctggggaagggacccagtttgttccttggggtgccatctggcatccctgcaaacgttaagacttcatggattaccacaaaaactgtcacatggtctgggtccccacgaggggcaaatgttctgtcaattttttcatgattctctctcccagcactttgtgaagtgggtgatgtgggaactgaggctcacagaggttcrgtcccttgcctgaggcctgaggccacatagctggctagtgggcagggctgggatttgaacctataattataattagttcattaggagaagaagtcacatgctaggtagaggccatcctggggcctgaccttctgcagaggaagggcttgctgggctgggtgggagtgtggctccctaggcgggtgagaccaggatcccttctcctctcagattaacggtggccttctgttatgacagaaacaagctttcaccgacgtggccactggctccctgggccagggcctcggggcygcttgtgggatggcctacaccggcaaatacttcgacaaggccaggtaacacacctactccccacccccaacctgggtagttttggggagtggtccttgggtgacccacccttcaccatcgcccccagactcttcctctttcctggctagggcagagtaatacatatgcgtggcctcttttgctctttaaacatccgctatggctggtgccatgaccggccccctttacaaatgaggaaacactcaggagttaagggacctgccctgggtccctcagcagtgactggcagggccaggtttgcacagagtgcgtgctctcaatcatgtgctcttcagccagagtgcttaggctgaggacttcctgttttgcccccagccctgtgcccagaccccagaagtctcagaaagacccacccccaggcccctgtctgactaggcaccaggagcccaggcctgagccacttgcctttatcttggtaaaggggagggttgtatgttctgaggggttctgggatacctgtaagccacctcctatcagcagggaagaaacaaacatttgagagattgagccttcagagggtgggtgatgagcctgaccagaaaggtgtgctgctctagcgcccaccaggtgatttgtaggaacggccccccaggaaggttctagccataagtttgtctgcggtggtcagatatggcctggggggatgaggttgtaaactgttaagaataatggctggctgagggaaggattgcttgaggccaggagttccagaccagcctaggcaacagagcaagactctctctacaaaaaatacaaaacttagccaggcatggtggtrcacacctgtagtcccagctacataggaggctgaggtgggaggatcacttgagcctagggcttcaagattatagctatacatgattgagccactgcaccctagcctgggctacagagcgagactctgcctctttaaaaaaaaaattattcttttttttaaagaataatcactgtattagtctgtttycacactgctgataaaggcatacccaagtctggggaagaaaaagaggtctaatggacttacagttccacatggctagggaggcctcacagtcrtgstggaaggtaaggaggaacaagtcacatcttatgtggaaggcgcaggcaaagagagagtttgtgcagggaaactcccgtttttaaaaccatcagatcttgtgagacttattcaccatcacgagaacagcatggggaagacctgtccccatgattcagttatctcctgctgggcccctcccacaaccagtaggaattacgggagctacaaggtaagatttgggtggggacccagagcctaaccatgtcagtcactcatcagaagggttcctttgccctttgggggctaggccctgtgctcagtgctcatgtgctgtattgggttccacctttaaaagccccctgtgagttgggtagtggtgtgagaaccgtgacccgtcttacaggtgaggaagctgaggcaagatgctggcctaggccatccagttggtggtggaggtacccaggctgctcttggagaggctgagggcaccacaggagctcggggagtcctgtgggcgggaagcctcctagaggaggaaggccagtggggccagcccgcagggtgtgagaagggcccagttctgcagctgatggcatctccactgccctgtcctccactcctgcagcagaagtgccatagtggggttcgggaagactgtgggtccttgaaggacaggaggctgcagggagcaccttctgtgtgcaggcccttccccaggactggctctccaaggaggcctcacagtcccttccagaccccttcaggccagtgtcacctgaccacagtttgctttcattccttggtgagccttggggcaggcttggctacacccagaagtgattcaccatgaagtaaagagagagagacacacaaagaatgagatgcatgtttaagagcrttttatttggcagagaaccagagatgtgagttaattattccctacagttgctggaaataattccctgtgaaggggcatttcctgaccctaacataatggaacaagtcagtgtagggagaaggagtttagctgggttcccagaagccagggtggcttggggccagggttgcctggagcctaggcccctgactgtacctgggggaaggggccagggcatccagggattatcatgtcaggccaggcaccyggaggtagcgtcttgatagagcaaactggtctccactcactgtttctccctgccctcctgtttaaaaagtacagaatgatattaagaaatgaacgttttccttatttttttatttttattttttctgagatggagtctcgctctgtcacccaggctggagtgcagtggtacgatctcggcccactgcaacctccgcctcccgggttcaagtgattctcctcctgcctcagcctcccgagtagctgggactacaggtacgtgccaccacgcctggctaattttttgtatttttagtagagacgggctttcaccatgttagccaggatggtctcaatctcctgaccttgtgatctgcccacctcggcctcccaaagtgctgggattacaggcatgagccactgcacccaaccaatgttttccttattcttagcacactgcctcccacccccaatttaaatctaatgatgtattttgtccatgttatcatgagaaaagcttacaaatctgtaatcccagtgtgtgtgtgtgtgtgtgtgtgtgtgtgtgtgtgtgtataatataaaatctagtattacactttaaaccaagccttctatcatgagctttttctcctgatattaacagtggagagctggttttttttgttttgttttgtttttttgagatggagtcttgctctgtcacccaggctggagtgcagtggtgccatcttagctcactgcaacctccgcctcctgggttcaagtaattctcctgcctcagcttcccgagtagctgggattacagacgcgcaccaccacactcagctaatttttatatatttagtagagacggggtttcatgacgttggccaggatggtcagtctcaaactcctgacctcaggtcatctccctacttcagcctcccagagtgctgggattacaggcgtgagccactgcacmcatcctgagagctggttttaatgatcacataatattctgttttatggagatgctataatccatctagccagtcctytgttgtkggacacgtaaggtagtttccaaatcgttctacaacaaatgtcgaccttctgtttagggttccctctcttcaaattagttcatgaatggatgtktgcagccccccacccctarctctaacagctcaggcaataccaagcctcagggttagcccaggctcctgtaggccccttccctgttcacaaccccttcsttggcatctcctcgggacctcagcacgccctctgacctgagcctgatggccctgtagggcttagccttgtccctagtctcgaagccaaagctgtgctgggcctccagtgctagcctcggttcgacttccctggaagtgggtgtgggcttggggtggcagycagttgscttccctggaatccctttctgggaagtcgagttggcttctctggctcagccccatcatgtggcccctttctggagctgctgtgccagaccagagtccctgcagggtctctgggccccctcaaaacctacaggggaaagaggaggcaaggctgggacaggatagggcctctgaagtgtgggcctgaggctttgtccttctggccatggtaccccacaggggcaccacctcctgtggtggaggccacagaagagcagtaygaggcaggagaggctgcagggagtgctcctggcctgctggcatgtggaagtgctgagtcatgctgacagctccgtggctrgctgtcccagcctcttcctgctgcccctgccttggccctgcggcagggaggcctggaggcttggactgctgagcatgcagccgggttgagggccttttcctgcaggagcaggagggcagccrtgtcccctctgagcccaaccaggcaccagcctcatttcctagggctacacagmtagacactgggcagggtaaggggaggtccccaagtcctaccactcctcaccctacwtgcatgcctgcacggcaaggagcggacagtctaggctacagtcagacctgsgtttgaatcctggctcagcaacttcctgacagcgcgaccttcagacaagtcctgtctgttgctgccgtccctctgctacccccatcccctcacatctcccaggccgggaacgttctgtttgctgggtaatttatcccaagttcagtgttctttttaaygtctcactgtcttgaaaagatcacagttgcctgtgttgaggggaggagagggcccctgtggtagagaaagagccaggtgcagcttcagtcttggggtcaagagctagtcttggaagcttggggagagcctgtcccaggaagcgcctggtcctcaagtgccctctgctctatcctccccagagccctcttgctccagggtgttgcctagagtgcctcaggcctccytggcccacctccctcctccgggcagaagcagagcttggttcccaaggttcccctttcccactggcccacccagccagtcccaaggcctcctccaacctctggttcacagcggggtctgtcccctgcagcaggtggctcaagcctattcacccacccttcctcactttcctctcattccaacaacccccatttttctagatcttattagccagatccctgttgtcctagacctctgtttcttaacaaccagtacttcttcctgagctcctgacgtcttccttcatgccattttctcttggggtgtggcttgtggtaggctgcaggaacctggtgacactgttgcccctcgagtgtaaatgccrtctgttctgcatatccatgcgtggctgctcctttacccagartgcaggctccttggatgggtgggggggtgggagccagctgggtccaggtgagagggactggcctgattcactctctgtccacagctaccgagtctattgcttgctgggagayggggagctgtcagagggctctgtatgggaggccatggccttcgccagcatctataagctggacaaccttgtggccattctagacatcaatcgcctgggccagagtgacccggccccrctgcagcaccagatggacatctaccagaagcggtgcgaggccttcgggtatgtacgaggctgtggcctgagtgtggtcacagcacgggagagtggtctgtgatcacagctttgcaggtgcaggtgcaggagctgaagctgggaccttaagcaccatctaaaggtccctttctttagcatttgactcacaatttcaaactctaggcatttggacttaatggctcaggatatgtgggccaggcccagttttaagtgagtttccttgttttcgtggttgtggcatggtggctctcggagcttccacacaccatctcacgtcagctcgctttgttcttgaggaaggagggttcttgagggatgggggcttgctcggtaaagctaaaggatgtatagctgcggagaggtttgaacctcagtttggtggccacgtcctgtgcccagccccgcccagcctggggaggaggaacaggctcctggtgaaatgggagatagggtttccagrtgccccccttcggccttgattggttacaaattcagggtcaaagggcacaaagcagggaggtcaatctgcatgggtgtcagccagaggggctccacctcaaagcctccaccggtgtygccaaacacaagctgctctgcacaggggcccagcattggctgaggaggctgtggaggggagggagcagggcaggtgccgtgcaaggctttgagactcaggtcaggcctccaggactgcgttttgcagatgaacccatgcctgtgactacactaagtaacaggatgcttggggttaccttgcagtagyacagcatacgcaggcctgtgttccctgatgactgacctcagaaagggagaggaggaagggaggaaataatctctgttggacaggcgaggaaactgagccacaggktcctcaccccacagrcctccccaaggccacatctatctggggactcagagtacaaccccagcagcacccccaggacctgtgtccataacctcgtgactcaagccagattcctgaagtcctggctccaccgctaacttgctttgtggcgtgggtcacgttacttactccaccttcggtgtctcagttgatttgtctgtacaatggggccagctcagcacccaagcatggcgtggtgaggcttcagtgggctaatatgggtagtggttggcatggcactcagtttgagaagtgctatttttattcttatgtcaaaaagagtccccaaaaggatagcttttcaagagaaagggtgctctgccccagctccttcctgtatatttgactccatggttcatttcaaaaacatttccagcaccacatccagcatctgtggagtgatcaaatgtgttccccaaataagaattgggccaaaaaattcatcaagaatctaatagcagacagattccaaacccagtgcgctgaccccagaacagctttcagtaggaaatgagcagatcaggaatgaaagagacaataaaggaactgagctctggattacttaagaggaggaggaaaacctgttcagaggcaaacaaaaggaagtaaaataatgtgaaaaagaaaaggatttaaaaaacccaaactggaaacaggaatgttgcaagctttctactactccagctgaggccgcagttgtggggtggagcctgggcagaccccagctgccaaggcagacctttccctggaaggctcctyggtgttgtggcccctgggaattgccccttactctctgccccctgtycccagttggcatgccatcatcgtggatggacacagcgtggaggagctgtgcaaggcctttggccaggccaagcaccagccaacagccatcattgccaagaccttcaagggccgagggatcacgggtcagtatgcacaagcygccctccccaccttcacccctsgcccagacactgtggctacgtagctctgaccckcacatccagggaaacagcccttgctgctcactgagctcaccaggctccagggaaggggagcgggagatgctgtgactcagtgacccctgtggctgagccaggatttaaactcagatccgtctggcctctgccggtgggggcatgtacaggcaggaggagaggagggacttggagggtctgtgggtgagaggaaggtcgtggagtgaggcagcccccgtgccccaccctggctggtgcctttcagagctgcagctgtgtgtgctctgccagctccggccacctgctccagctgaagggccgacacagagccaggcagggcccggagagaactgttccctccaggaggtgagtggggtactcctcaagcaatggcagatgctgagcaaggcctgtgtgggccaagagccttggggggtttggaacctgggttctgccccaggccggagaatgaggcaggcgtaagtcactccctggcacccaggtgtgggcttcagattcctaggcctgggatggcctcacccattttaaagatgggaaaatgagactacaagtggtcagggacttgcccrgggacagaggaagtctatggcacgaggggggctgatcccagggcctgggtcggcttccctgccaaatgcccctggctgcccacctgcctgctctcaggggttgtggcttgttctgcccatgtagactcaggtatatgaggaygttctgagtgggggtttggcagtgctgggaggtgtctgggagggggtggatgtcgaggaaagggctctgggatattgtcatggctttggtgctgctgcctggcactgccctctggtgttaaaaatgggcaggatctggaccacttgcagcttcttgggggctcctgctagtctttcgggctgctgggtgctacctgggagttcagtctgttcttggctctggccagactctagtgactactgaggtgacctccagggagagggatattcagccttcctggccgcacacaacaaggtgccatggggtgggcatgcctaggtgcttatagactcctctgctgctcacagatgcattgggtgaccctggaagccctgttctgggccttgggttccccttctgatggccagggtcccttccaacccagtcgacaarctgagtatttctgcagcagacacctctacctgtgtgtgaccctgcaggcggggttgtggggaggaagagaatggacacattggtgaagggatggggcagtgggcccagaaacacacacctgcccacgtctggcccctcctttcccactcagctgtgagctcccaaaggaccaggcagtagacagtgagtggtgggcacgtaggagtccatcctattcactgcgaccctcctttcctggcccccgtgcctggctgggctctgcctgtctgggatgatgccattcctcccttgccctcggcaggtagagggccagtctcctggagcagcctcctggccctctgggagcttctgtcttacccattcctctgtcctcccrtgttgggtctgcaggggtagaagataaggagtcttggcatgggaagcccctccccaaaaacatggctgagcagatcatccaggagatctacagccagatccagagcaaaaagaagatcctggcaacccctccacaggaggacgcaccctcagtggacattgccaacatccgcatgcccagcctgcccagctacaaagttggggacaaggtacaaagtggggcctgtttctctgaacccatagttctcaggtttcccaagtctgtggcccagatacaccctctggagggctgggaaagggaggagagcgattcatttagggcgaggagtgatccctgaggtgttgttcctgtcacttccctcagaatgacagacatctctggagttgacctgcagaggctcagaccgggcaagggaattgcccacttagcaagcttagcaagctactgacagaactgagatcaaagccaaggactcactcccaagttcttgcatcgctggtccacgagggacccttggcctgagctcaggacccccacctgacctgggaaaggctaggcagagctgtcccactccaggtttctgtcccaagggaacccatccatgcagcctgtgcctggccttgactcccaagccttctgtgttcccatgcaaagtggaataggttcatggacctggtgcagcaggcgggaagttggggctggtgggtgtcttctgtagcttatacctttcacagccaggctaggggccggggctccaggggctcccaagacattgaccgtagtcgttggcaacctttcagcagttaaaagcctctgcaggaccttgtgctccagggcttccatttttggccccgttttaatccttctctgaaagcagggctccaggctgcaggtgtgcactcaccctcagaggggtccagagccttcccactctcttcctcacagatagccacccgcaaggcctacgggcaggcactggccaagctgggccatgccagtgaccgcatcatcgccctggatggggacaccaaaaattccaccttctcggagatcttcaaaaaggagcacccggaccgcttcatcgagtgctacattgctgagcagaacatggtaggtgctggggccggcagggacaggtccacccaaggctgagggctgtggtctgaggggtgcggggcagccatgttggcagagccaggtgcctgctgtaggccagcccagggagactataagaaaagccaggacccagcgttaacccctgaccttgaacagccacagtttgggaggttctgcccaggtgcaaatgtcctggacaggtgtgcacatgggggagccgaatgggactgcaggtrctctcaggaggagctgygtacaggccaggcctggtggtgaatggggtctcttccaggtggaggacaggccyggccagtaggtggggccgtgatgggtttagcagcccgagtctgttgagcacctgtaatgcacacggctctgggccctgccaccctgagggatgcagagatgagggaactctgggcccctgacatgtacccatttggggaagcagacccttgtcaggaactgaggttgtgaagtaaggaacaatgttttrtccatgttttcaaaatatcccctcctggtggtccaggagcccagcctggcttgcaggcccctagggacagggagcttcctctctctggagggcactcagatctccagagttcttccaactggacctgaaattctctctgtggtttccagagactgctctgcagggcgtggggctggggaggtcccaggtactagggaaagaggccttgtgttggctggcagattttggagccttgaagggcagctggtttggaactgatgactgtactcagtgctgcttctggatgagtgatttggggcctggagcctcagcaggcatgaggctgctgccctcggaccccagggaggggttgggaggaccggtctctgcagaagaaggtggtgggggacatattcagaagcccagaaaggatggacaatctatatacaaattgtggctttctccacaaaaggggtcctaggctccccgaccaccctctgcctgcccctttgggctgaccctgtcccacctgcccccaggtgagcatcgcggtgggctgtgccacccgcaacaggacggtgcccttctgcagcacttttgcagccttcttcacgcgggcctttgaccagattcgcatggccgccatctccgagagcaayatcaacctctgcggctcccactgcggcgtttccatcggtgagtttagccagggygtttacacctggagctcccttgacttttgcaccaggaggtatgggagggggatgggccaggattccagcccatggatgsgggggtaggggtcttatttctgcatatcctttcccccacaccccaggggaagacgggccctcccagatggccctagaagatctggctatgtttcggtcagtccccacatcaactgtcttttacccaagtgatggcgttgctacagagaaggcagtggaactagccgccaatacaaaggtaggttgcatggctgttctttctcctgctggcagccatcacttcccaagggaaacagaagaggaggccagagctggtcacttgctgccccagggggtgtttcctgaccttgcccctggtgttcgtgtagcttgtggaagttagacaagaaaaaacgaaatacacaccccacttactgccacgtggcagacattgtcaactgattgccagtctgtctctgctgagaatcctggcagccctggccggtccagcggttgacacctctccaccctcctgagttgggttctccaagacaggcaaggatgagctgagccctgtggtccaggcccggagctgcatgccacagacccagtgcgcgtggttcctgcccctctgcctggtgcagtctgtgggagtagcccacctgcagccagtctacctggtggaaagttgccttcggtctgaggctgcaaggtggtgggcagttctcagagtgttcaagtggggtgcgggcggcagagggcaagcaaggcccttttccctgctggagtagccaggatgcagtaactaaygctcccatgggaagggatggcctctctagaaagacctcgtctctgaggttgggtgtgccacatcctgtatcstcagtttatctgtttcggtctcagggtatctgcttcatccggaccagccgcccagaaaatgccatcatctataacaacaatgaggacttccaggtcggacaagccaaggtcagtgcctcgcatgccccaggagcccacagagctgcctggaccctccctgctgtgactcccagcagtcagggcacaccctgccccagggccctgagccttactcaccctctgtgtcacccccaggtggtcctgaagagcaaggatgaccaggtgaccgttatcggggctggggtgaccctgcacgaggccttggccgctgccgaactgctgaagaaaggtgaggagaaggggcctccaaagtcatcaactgagcggccactgcatgctaggtcttggggttctttctttcgttctttctgttctttcttgaagagctcacagctagagagaaagcatttcatttcattaaataatgatagcaattaaagccatcctttgagcacttgttctgtctggcatgttgctaagtcctggggctgcagtgcccacagtccctaccctatgactctaaagtcgagaccccccccagcatggtggccagatcagtggcctggagcctgccagctgggctggaatcactcagccaggcactagttaaggaagtaagttattcactgtcaccatgcctgttttcctatctgtaaaatggagatactagccccttgccctcagggctctcctgagggttacatgcatgtgacttggtattctattattattactgcgagctcacagtgttggctagtggtttgtaggggagacaggcattggcctctcctgcaatagaatcacacagcagatgtcatgttttagcacgaaagagggggcaggtgtggcatcttccagaaagtggcttcagagtgggtaggaattgattagcagagaggagagtgaagggaggccggaggagggtcaggcaggagcaagatggggctggaggagccagaggagtccatccccaggcagggggagacccaggggggtgagctttaagcagggcctggcaagcgtgggtttgtccttctgagaaggtgcctctgctgctggggccgcacgtgggcctctgatcactctgcgggctgcagctccccaacgtcaccacatcaagcctcaccttccatcaggccagacacctggggtgttttctctcgcattccctttgtcttcaaggttgtgggaggatgagggaaggcgctcagggcctgcacgctccgctctgggttcttggatactgcgggcaacacagctggaccagatgccccagtgcaaggggttggcaagcatgagctcagccatgggaacgaggtggcaagtggttctccctgggacagggacaggcccgcaggctgagctcttagctacacgcagccctcaggatgtcccaccaggccsccaccagggcagatagtggtgcccagccctcccctcagccacgccgtgtgctctscctcacagaaaagatcaacatccgcgtgctggaccccttcaccatcaagcccctggacagaaaactcattctcgacagcgctcgtgccaccaagggcaggatcctcaccgtggaggaccattattatgaaggtaaggaggcctggggcaggcaggctgggcaagggacagggccagagagcygagcrttggaygtgcctcttctatctgagccccaggagggcagctgtggcccagaacacccagagctgtccctcagagcagctgggacgtggtctcttaamaggcctcaggcttggcctggggacctagctaactcacagctgctgatgagctctgtggagctcctgctgcccaggaagctggtgaggattccaacctcgctgctaaatggtggatggtggcgtccctgaggtagtgtagggtggaagctatggtgcagcttgggaagcaatgcagaatttctggtatttgtgagtccttcacacagcaggctccctaagtacacaccagcctctctaagtaggaggccccagtgggagagatgggctttgactctggggtcaaatgtagataatyggactatggacagtggctggctggtcaccaacaatggtgtttgaaacaaacatttagaggccatatttgggcttataaaaatagttctgggccgtgcatggtggctcacacctgcaatcccagcactttgggaggctgaggacagcggatttcttgagctcaggagttgggagaccagcctgggcaacatggtgatacctgtctgtctctttaaaataaaaaaaaacaatgagttatgtgatgggctcatggctacaggtggagaaaggcagtgcatatgcagcctcctccatccttgactaaggctgacagagggctgggcccaccaytgctcaccctgaggcctcgtcttctgactcccctcctttcatttctaggtggcattggtgaggctgtgtccagtgcagtagtgggcgagcctggcatcactgtcacccacctggcagttaaccgggtaccaagaagtgggargccrgctgagstgctgaagatgtttggtatcgacagggatgccattgcacaagctgtgaggggcctcatcaccaagkcctagggcgggtatgaagtgtggggygggggtctatacattcctgagattctgggaaaggtgctcaaagatgtactgagaggaggggtaaatatatgttttgagaaaaatgaattggccctgaaatgttttcttttttgatgtgtttgcagccagtgcaggttctgggraagaagcgtggagggtgcgctagggaggctggtgtccttggtcctgggccaggacctgggtgtcccaagtccccttggaatcacctgcaactgccctcaacctccagaactatcgctgcctcccattcatcaccaggtgacatttgactgcaacctgccttctagctgagaggctgagacctacatccctcattgtgacctcagtccacctggccctgagcgggctggggaactgcctcagtctggaagctgaccaggcactctcagggccgccccacctcccccaagtccccacagccttgcagtcaggtctcctgggatagggaggttcacttgcttgttgtccctcgtccttgtcatatccttttaactaggcatctcagagaagcagagacagggcagccttcgtcctgggggaaaagggaccctcaggatggcatgagaggtcctcaatcccaagtgtggaactgtccccctcaacttgttaaaatgcagatttctgggtcttgccaatggggcctgggactccatgtgacaactggcccaggagcttytgatgtcacacagaattctgcagtcccaagctccagccccracctgctctgctgttcctaggtgactgccctcacactgctgaccacagtggatttctccccctgctgctcgggctcagctggggtcagccctgcttataaggtcaactgtgcaaaaccttatactggccaagaacaaactagtgctgggggaggagggctgggtgccccggccactggtggagtccccaggaaatcctcaragctgttgcgaggatgagacacatttgtggacacgtccmcctgtcctcctgaccgtctggagagaataaacctgtcaaagccaaggtcaggcaattgccccccacttagctacccagccaggtctagcagtgccagaggctgtgcctgtgtttgcctcaacaccaattccagagggaccaggcatggggtgatgtggtttggtcccaggggggtgccctgggctgatgcctgttcaccagtgtgttgagggcagacctgggattggaacctgggtctctgtgagtctagagatcccaccttctgtaccctactgcccctagggccctcaaaagaggaatcatgcagtaggctcccaggagggccctggtcccataggatgatgggaayagcctggggctcaggtcctgtgcgtctccagagcccacaggcccctgcagagaatctagaggcaaatactgggacaaggacacctgagccataggcacaggcccagccagcagcctggtgagcccatctacactggctagccatgccccaaggacctgggaggcctggctaacccaaagtagagggacaggaggggcagctgccctcacctccagcctgcctggcctctcccaggcccacacagcttgtgaagaagaagacgagagcctgggcagcaggcgccggggcctgggcaggatgagggaggagagtcaagaaccctgacccagtcacccagacccagtccggggacatcaaggctacaggaagctgggacattcaggaatcccagagctgaaaaactctgcctcctttttggcgagaagacttagagtataatgtgcttagtgtagggcgtgcttggtgcggagtgtgctggaggccatcactgggtcctcatgggagcctgacgaacttgtcatttctccctcagcccctgctcaggaaatacgggaagccaagacagtgcctgaggcctgactggaggctggtgtggcctgacctgtcagctagcaaggcctggcggtgcctcatggcatagacagctgagcaggagggcagcatggccccccagcagcctaggacaaactttcctggcaccagggaaagcccctcccacccctgctggtaaaggggatgctgaggctacaatccacacagccaggagccgggatgcagctgcaaggagggcgtgctggtgacccctcacgtccctacccacttgggcaaaggctgtggcagctgagcctgataggggcgggcagggctgggggcaaactccccagaccaaaaccacccccaccaccctctgctcagtacatggggcagtcctctccccaagcctcagtttcctcatttgttcagtgggaatcatgacggcctcacaaggctgttgtgagaatgaaataagagaagtgttaatgcctttagaacactgctaggcagatacgggctcagaagaagttggaattcctaaccgttcacaggcagggccacctggctggggggcgcctttgtcactgtgcgttgtgtgactacagacatttaggaagcacagacttctgcccgtagcagcccatgctgggcagtcggggcctggctctcaggggtggtggcccagcacacagctgttcaacttgatcataactgtccttgacacagccctgacctgttggttatcagcttcactgtgatataattcacatagcacacaattcacctatttgaagtatattattcagtgggttttaatatattcaccaagttgtgcaacaacgccacagtcaattccaaaatatttccatcatccccaaaaggaaccctctatcagtcctctgctgagggccacacagatgcctcttgctgcagagctgggatcacagctgtccccttgctcccaccaaaggtcccctcccaagatgggtgtgtgtagggcaggatctgggtcctgccatgaagggaaaaaaccacttcaaacagcttgtcctgctttcccacctcaagggcgaggctctgcctgcaggacctggggcccatgtgtcctcgctggtcctctttgggaggaggaagaggggagaggagggtgaaggctgttggccactgcgctgggtgggattccagaaaccgacgctcagggattgggttttacggacacacggatctgcagtatgaatcatgaaaacaccaacacacagaaaatggggaaaggaacagcacagcagaacataatgttgctgactacaggctccttcccctgctcagggaggacccaaagctacgtctcctaccccagtcttcactccagagaaggggggttgcccagacatggccctaagggcaagatgaggaaagtttctgagttgggcccagggggtgctggcaacccaggttggacacccagggcctgtattcacgctggttttggtggtttattctaggtcaggcacaaccttgggaagaatgagccctttgttcctggttcagctggcaagacaggaaagggctgccctagggtccggggtcctgccgctgccccacagcctgggcctgaaagctgccgaagccccagtcagctcaagctgccatgagacagtaccataggctgggttgctcaaataacagaagtgtgcttctcactgtgctagaggctgggaagtccaaaatcaagatgttgccccttcagtttccagcaaggctctcttctgggcttgcaggtggccttgcctctgtgtgtgctgggggcaggaagatcgagccctctctggtgcgtcttatagtataaggacactaatcccatcagatcagggcttcacccttaggacctcgtttaaccttagttaactttttacagaacctgtctccaaatacagtcacattaggggttagagcttcaaattatgaatttgggtttggttgggggccacagctcagtccatagcagccctcaaatctgccaagttcacagttcacttctctcccaggggcacactattctggatgtcggaacttgaagtataagagaaaaatgaaactatcttgagatttaaatgagaagagggggctgggtgcagtggctcatgtctgtaatcccagcactttggaggccaaggcaggaggatcacttttgcccaggagttcaagaccagcctgacatcatggagaaaccccatctctacacaaaatacgaaaattagctaggcagcagcatgcacctgtggtctcagctactcaggaggctgaggtaggaggatcacttgagcctgggaaatggaggttgcagggagctgtgagcacacctctgcactccagccagggcaacagagcaagatcctgtctcaaaaaataaataaaagctagaaagaaggagggttctttaaaaagggagcagaggccgggtgtagtagctcacacccgtaatcccaacactttaggaggccgaggcaggtggatcacctgaggtcaggagtttgagaccagcctgaccaacatggtgaaaccacgtctctactaaacatataaaaattagccaggcatggtggtgtgcacctgtaatcccagctactcaggaggctgaggcacaagaatcacttgaacctgggaggtggaggttgcagtgaaccaagatggcatcactgcactccagcctgggcgacagagcgagactctgtctcaaaaaaaaaaaaaaaaaaaaaaagcagaaacccatcagcaggccactgagcacccctccacacacgtccaggtccagggcaggagaaaaccccaatccccctccttgatctgggtctcacctcccaacaacaacaaagtttccaacactggcaaatgtgggtttctgcctcaagtcttcatcaaagtacctcaggtagtcttaattagtacagcaagttgtacatggtatgtttttatgtttttagtgatttcagatctgaacattctatacgtatgtttttcacatgttttcacaggaggaagggacaaccaaccagagagtttttgttttgtttgtttgtttgagacagggtctcactttgtggctcaggctggagtgctgtggtgtgatcttggctcactgcagcctcggctccagggctcaagtgaacctcccacctcagccctgagtaagctgggtctacaggtgtgcaccaccacacccagctaatttttgtattctttgggtacacagggtcaccccgagtaagctcagtctacaggtgtgcaccaccacacccagctaatttttgtattctttgtatacacagggtctccccatgttgctcaggctggtctcgaactcgtgagctcaagcaatccaccagtcttggcctcccaaagtgctcggattacaggtgtgagctgctgcgtccggcctactgaccagagttttaacaaaaacttcccatccatacaccacactttaaattctggaagtttccatctccactcctgtatgtctaaaagactgagaaatccccgaactggataaggcgctttatccctttaagagtttaattggagacaagcagagacctctgcacatgcttgagcccaggttccccaggggtggggggtaaagggctttgacatttccaccccaccaggaatttcatttgagctgatctctgcaacatagatctcagcaattgcctgtccattcatcctcacaggcccacgttgcattgctttgcaggcggtagtggcctgcatggaagaggagcctgcagcgccacctgtagggctggggagggatggactcatggaccagagatcctggctgcagcagtgcctcctggtcgttgtcacacacaactgaaactgcaaggtacatgctgggacaaagatgtcaggctcactccctgtgagactaggcagggctctcttccaatgacaccggagttcattgattttactttttccttattttattttttctaaattttatttaattttattttttgagatagtgtctcactctgttgcctgggctggagtgcagtggcatgatctcactgcagcctcgacctcctgggctctggtgattctcccacctcagcctcctgagtagctggaactacaggtacatgccatcaaacctagctaatttttgtgttttttgtacagatggagtttcaccatattgcccaggctagttaaattttactttttaaaaggctaaactcgaactcctgggctcaagcaatcctcccacctcagcctttccagtagctgagactacaaacgtgcgccaccgcacccagtttgcttttatttatttttgagacggagtctcgctctgtcacccaggctggagtgcagtggcgcgatctcggctcactgcaagctccgcctcccgggttcacgccattctcctgcctcagcctctccgaatagctgggactacaggcgcccaccaccacgcctggctaattttttttttgaatttttagtagagacggggtttcaccgtggtctcgatctcctgacctcgtgatccgcccgcctcggcctcccaaagtgccgggattacaagcgtgagccaccgcgccccgcctgcttttattttttattgacacataataactgtatatatttatgggttacagtgtgatattttaatacatgtatacaatgtttagtgatcaaggtaattaacatatccatcacttcaaacacttatcatttctttgtgtcagaaagattcaaaatccactctttggctgggtacaatggctcacgcctgtaatcccagcactttgggaggccgaggcgggcagatcatgaggtcaggagttcaagaccagcctgaccaacatggtgaaaccctgtctctactaaaaatataaaaaaaattagccaggcatggtggctcgcacctgtaatcccagctactcaggaggctgaggcaagagaatcacttgaaccagggcggtggagattgcagtgagccaagatcgtgccactgcactccagcctgagcaacagagcgagacttcatctcaaaaaaaaaaaaaaaaatccattcttctcgctattttaaaatataattcaataacaataaattgttaattatggtcagcctacggtgctatgtaacactaggacttatt

SEQ ID NO: 93283 - DNA, 20146 bp, Homo sapiens
actgcagggcatcttggactccttgtgctttggcaccagcaagtaaaaaatagttacactggtagaagtaattaaccctgattggcaagaggaggtaaggctgctctcacacaatagcagcagggaggaatagatatggtacctatgagatccactttgggcctcttggtactcccttgccccactgtaactgtgaacagacatgtgcagcaaccctgaactgagaaagttacgacaatcaagcatttagcacctcagggaggtgagttgcacaaccagctgagccaccaacctctgatgaggaaccttctgaggatgaagggaatttagaatgaatattgagaagggacaagatgagttgctgctcgagatcaactagagtgacaggggctgtagttcacatcagtaacctccttcttgttagttcctcccaggaagaaaggcttctggaacctatgtgcagaagtaaatctgtgaagctcaaggggtgcactgtggcagttgtgagaatgtgcctcacagacctccagctagaaagagcacaacagaccaggggtcctggctgctgctgctgcactataaaatacatcactgattttatgctgaggccactccttccacaggcatccagtgactggatgtggcaagagtattaaggtagacccacttttgggtgacgcagaacgactctatgactgactgttttttttttttttagacgaagtctcactctgcctcccaggctggagtgcaatggcgtggtctcggcccactgcaacctccacctcctgggttcaagccattctcctgcctcagcctcccgagtagctgggattacaagtgcccaccaccactcctggctaatttttgtatttttagtagagacggggtttcaccatgttagccaggctggtcttgaacttctgatctcaggtgatccacctgtctcggcctcccaaagtgctgggattacaggtgtgagccaccgcgcccagcctatatgactgactttggcttgagaactccccagtgattatgctgaaccttctttagacaaggacagccttagacaagccagcctagaatgcttccctcaacttttctccgatcttcattgtggcttcacaactgtcccagccatacaaggctttcttcctctttttctgaaatatgcatttccccaataaaaccttgcacagttaatttcatcatagtgtctgcttctcagaggacctgaactttatagcttagatgtgaggggtaagaagaaagaagagttaagaattagcctctggtttctggcttgggcaactgagtgcatggtgattgtcagtcactgagataaggaagaccagggatctccatttaaagagaaaagacatagcaagaggacagagtaggggtgtgtggaaggacaaaaggaaggaaaggcagagaggcctcaggttaggaggacagttccacttgctacaggtttctgttgcagatgaagttactccttccccactgaagcctggtcccagttctgtatatcttaagaacagctctaatttcactcatggctcaaaaacagattctcataaaaacatgtgtaaggggattggacagaagaaacctaccctggggtttctgtcttagcatgggctgctataacaaaataccacagtttgggtggcttaaacaacagacatttattgtagccactttctctctatgttgctcacgtagcctttccatggtgtatatgaagagagagagagagagagagatctatcttccccttcttctcagggacctattctaaacctacttacctccaaaggccctgcctccaaacaccatcacattgtgggttagggcttcaacatatagaggggcacaaacattcaatccataacagtttctttcagccatattggaaagtgctcattctcagacactcaggctttataaagtcctgtgccatgtggacacttagcatagatgaccctaagctgatttctgttccttacaggaaaaaggaactaaactccggcttacagaacttagcaaggtcgcttcaaatagcccctcgctctcagaaaggtgccactcttttctataggcttcttgcagaccctgttcttcagtctttgaaagtggtgtctggggcacaactggtttatagggaacatttattaacttttttccccttatctccctgaccttatcccccacctactcttttatctgcaagtaaatttaacaaagaggggaaactacatgtgtgaacacaataatttccagaacaaacccggaaakcaattattgatagctatgtaaagtgttgcaaacaggggcatgtttgactgctgtggctgagtggagaacaaagagcattatcaccagatacacaaggctagattcatttccctggaaatgcagaacagtttaaaatattgctaagggacaaagagattttactccggtgctaactcattgatttttagtgaaaaatactttttaacaattacttttttcaggatttaatgttgataatgtcagtccttaatgcatgtcaattattttattattcctctatgggtttcctagtgttatgctatggattgttcttagtctgcagtgaaatgcctctgtccagccatctcctctccattcatgtaaacccagcattccagtctttgttccaacttcagaacagtggtgaagggaattggcattgttgataagataycactttgtgtattggtttttccctgttaataactgaatgctttaacaagtttatcagccccgcttgcttaacaaatatgttaaaacaggaactgtggttccaaaggctccaaagtaaagaggacaaatattgctgggttgaaaatttccttcttgcaataaatctgagttcaaagaagctatagaattaagcattgtgcttttcatgtgaaattcarttcgacaaacatttattgttaaaaaaattattttaacttccccttcttaatacagtgggtcctgtagaaggaggaagtttagtgccaaacactgaactattttcaattgaggttatcagaggtcatccatagggctgaagagttggggaaatgtctcctcttctcctccagttctatggtttttctccctggtctgccctttttttttttttttttaacactagttccaaacatccaagtataatagaaaaacgctgaattcagaggttttgtcttatcctgttaatttatttggggccacatcaattcacatttcctaagttctcatcagtcagcaacaattgcccaggctccatagtctgttggattgaccaagtctggcttacattataatggaggaagcaagaactcttcacacgactcagaaattcctaggaaagtagacaacacctgaatgcatatgtgactgccatcgctgtattcagacacatccattgctcaaagacaagtagttctttgtacatctctactcagatatctacattggggttcctaggggttgcttggctagttggagaaggcctgagattgtgtagtgaagaaatccagaagaattttgagcagagttagtgtcaaggagggtcagggagcagggacatttcttagggaaggtgatatgtaggaaaaggtatggacaagtgacatcctgggttaaggtactgatgtaaaatatggtgccagggttcagggtctcctgaagcccatccttggagcttctagggatctgtaaagtccaggttaagagctgctgctgtgacacctgcctgaacagacagaagttagtgtggtataggccaggaaaggcagaaaggggtgcagaaggaagggaaagtagttctgtttctcaaaccaaagggaatgctgaaggatggatgttgggggccctgagaagttccaggtagagtggctcagatgacaggaggccttctcagaaagacacaggaaggactttgggctatgaacctacagaggctccaagtaccagtgacctggcttctgaacgcatctcatcaactcttatacagggttgaagatttccctcttaaaagttcactggggaccaggcgcggtggctcatgcctgtaatcccagcactttgggaggccaaagtgggcggatcacttgaggtcaggagttcgagaccagcctggccaatatggtgaaaccctgtctctactaaaaatacaaagattatctaggaatggtggcacatgcctgtagtcccagctacttgggaggccaaggaaggagaatcacttgaaccagggaggcagaggttgcagtgagccaagatcacaccacagcactccagcctgtgcaacagagggagactctgtctcaaaaaaaaacaaaaaaaaaaaaaacaaggttagaatagggaatagatttcactcatctgaacaaaacaaaacaacttaatgtttgttatcagggagtacaaataccatccatattgatataattctatttttctcttctattttccttggtagaaagtgacaataacttctttggtttaaagagaactttcattctcacagtgagcctgaggtcggtcattttctgcacttttcaagggagttgaggctctgggcagtttaggggcttgtctagtgccctcagcctgtggtggctggaggcataactccaagctcagtgctacttccatcatgctttctacttggttcttggtcagataggtcctacttttgtgcttgggatttcactgcattgctgatgctcacattcatcctcacctgacaaaggccattaactacatcactgatctctgccttgaccacttgttcaatagttttagccactgggctagcagttgggaggcactaagatatgtgacccacctgaggcccaggaatgtgttatcactcccacagatggggtcctctagttacccctgggcaaggagcaggagcactaatctccactccccttcataggaaagaacaaccaatctgtccaattacagagaactttggaaagatgccaaggcactctgagcccagaattaatgaggtccagagaagaaattcagctccaaaaggaagaggtttgtggagacctacaagctgtttctggggtccttggacacatagaaaaccagaagccatcaatgagtggggcagctttaactcccttcatgtaggacctgctatgttagaatctaaagtctgctcaggagcaggcctacctgctcacactagagcatccagggggaactgtgaatacctgctcatggccaagacaggtgactctcagcagaggatggctccaaagaagattgctaagagctcatttcaggggcggtggagaataggccacaggtgagtgctaacaccttgggaaatgtggggactgccacatcagtggaggacaacaaagctggcttcctgagactgggacgaggcttataccccataagggggaccttggggaaaaaggagccttcctgcagccactgtgactgacactggggaatcacttctcattctagatcactgggcctttggactgcagggctttgttcattgcttatttgtggtgatgggctctctttccttttaatcaaactttgtgcttgcaaaggggagtttgtaccaccttacagggtctctgtccataattttgattcaagctaaactgatcaagtgcaggatatgttggctccaaggttatgccaggatacagttttctccaggtgaaataatccctttataacccccataatagatccacaaacaggcaggattagtgtgtgggtcaccttaaaaatctggtaaacccctcttgttcccaagtggctgtgtttgggagaacttagtaaagggaggagcttcctgggaactttttgtgtttagtctcaatctgccaatgatttacttacccctgtgttgttgagttggaagattgggtggtgatttatcagaaagtgtagcaggaagaacttgtcatttctaagacctcaaatactggttaactgcrtttgcagctagaagttaggctctgattcactgttttgtattttctaaaagggttatatgtaatttgaaagatagacctgccaagacgtgagatctgtgttctccttggttagagctaacatttttggtgaggaaagcactgcaggtaacggttcagagcctggactttggtggcaggtggatgcaagttacagtcacagctctgctacttgctaatcgtgtgatcttggcaatttatttaactctttagccttcagtttgcttcctttgttaattttttttcttagttctattagtttttcagttatgttttctgaacctagagatacttttgcctcttttaatattcgtagtagaaattcatttctcttgttttattgcattggttacaattatcagattgtaaccaatgatgtcagtgacaatgacaatggacattcatatcatattcctgatcttaatgggatgtttcaaatgtttcatattaagtatgataattgctatatgttctggtagacattgtttaaaatcagcttaagaaagtttccttgtactttaaaaaaattgtgaatggatcttaaagttagtcacattcttggcatctcttgagccaaaatgatcatatggcttttcttctttagactgttaagataatgcattttatcaatagttttccctattaactaattatttttaatgtcaaatcattttaaaatctaagataaatcctgattggttatgatgcatttttctttctcacatatttcttgtctttttctttttctttttttttaaatttttgtgatgattttcactatgctgcccaagctagtcttgaactcttggactcaggggatcctcctgcctcagcctccctagtagttgggactacaggcatatgccaccatgcctggctgcattttttttttaatattgctggacttgatttcatcatattttatttaggatatttaaaatttaagtttttaaatgatattcatgtatcattttcttgtgtgctatctttgtcaggttttgcagctgtgatttttaattaattgtgttgatttaaaggagcaggctggcacagagaagaggacatgcggaaggagctccagctctccctgtcagtcaccttgctgcttgtctgtggcttcctctaccagttcaccctgaagtccagctgcctcttctgyttgccttctttcaagtcccaccaggggctggaagccctcctgagccacagacgtggcattgtgtttctagagacctcagagagaatggagccaccccatttggtctcctgttccgtagagtctgctgccaagatttatcctgagtggcctgtggtgttctttatgaagggtcttactgattccacaccgatgccctcaaactccacatacccagctttttccttcctgtcagcaatagacaacgttttcctcttccctttggatatgaaaaggctgcttgaagacacaccattgttttcatggtacaatcaagtaagtgtttagggaaacttaaaatgtcaacgaattgtatatatgggtaaactgagggtaaggactcaggtcggagatgggaatagaacccacatttgggttgactctcatttggccctctttttaccatgttgagaactgattcaaataaagagggaagacttacattaggtgcatctttattctgctgtcttttgcttctagccttatttcttttaggatcttggttactttggagactattcttaactgaatgagtttttatatcttttctaggtgtataggacacttatttttcactacagttttaaatccacttatgttaaactttattttttttttcacctaaagtggaaaccaggcaatatttaacatgaaaatgatgtaagtagaaaattcatgaaggatggrtgaaatgctgcgatatgagattgggttgtattaagatatgattgagaaactcctggagcttagaggaattttgtaatccccaagtttgtagtgaaccagaataagggaataatgtgccagtctaatatttctcttatagaggagctgaaatcaggttgcttaaagaaattatagtacaacaactcaatgattccattatgcaggctttaactataattttttaaaactgacatcctatgaagactataacacaatatggaattaaaaccaccttatgtcataatgtaattataatagttataacgatttaagttatgcaaaaacccacacacatctattgaaaaaaaaaaagacctgaaagaactmtacaacacacaataatagtaggtgttttcgtataattggattagragtgaatttagtgatgagaatgtgttgattttataaataacattattttagaaaacaaaaagtaatctaaacattgacataaaaataatactattcacactgggtgtgctggcatgcacctgtagtctcagctactccagagaccaaggcaggaggatcrctggagcccaggagttcaaaggccagcctgggcaacatagcgagactctgtctcaaacaaacacacaagcaaaaataatactatttgcttgccacataaagttctgtctaaattctaatcataggctgtagcaaatattaccaaacttttttttctgtgtagggccagatagtaaatattttcggccttgtgggctaaggtggtaaaattgaggatattatgaaggtacttgtggtagtttcttccgtctgttgtaacaaattaccaccaacctggtggcataaaacaacagaaattcattctctcacagttctggaggccagaagtcccagattattttcactgggccaatatcaaactgctggcagggctgcatttcctcctgagttcctagggaaggatgatcccttgcctctgacaagcttctgtggctgctggcattccttggccaatagcccctcactccagtctctgtctccatcttcaaatctcttttcctctgtttgtgtaaaatctccctctgtctatccatttaaatgacacttgtgattgcatttagggcccatccaggatactctccccatcttaaggttcctaatgaccacctgcaaagatacttttcccatataaggtaacattaacaggttccaggaattaggacctgaggtctttgggtagccattatttagcctactccctgacccacctcatttgcctgggaactgggtggactgtcctgggtggagggcatgcttgtacctagttgctgtcagctggagacattttttggactaagtgacagacatgatggggagggatctggtgggccagaaaggtaggggctggggctgggaatggctcctggggtcagtttattcttggccccagtgacttctacatcccaaagtgcatatctctccttctgaagaaacttgaagtcctcaaattgggacccatcaggaggaggtggggcagttcatggattgagttttcactgtgttggcagctgccaacagcagagttcccaacaagcaggtggcactgccctgcacagtggcagggcgggcagaggggtagggaggcagtttctgggagtggaggggacaccccagcttggtctttgtggctctcagtgctaacttgctagagggtgctctgggactctacaagtttcctgatgcctgggctagactaacgctacctgatatagtttgaatatatatcctcaccaaatctcatgtggaattgtaattccattgttggaggtggggcctggtaggaggtaattgggtcatgggggtggatcacwcacgacttggtgctgtcctcaggatagtgagtgggttctcgtgagatctggttgtttaaaagtgtgtggcacctacccccccacccccactctctctcttgctcctgctctcgccatgtgatgcgcctactcctgcttcaccttcagctgtgagtaaaagctccctgaggcctcctcagaagccaagcaaatgctgttgctttgcttgctgtaaagcctgcagaaccgtgagccaatcaaacctcttttctttataaattacccagtctcagatatttccttataggaatgcaagaacagcctaacacactgcctaaattgtattttgctccttgaaaaaaatctgtaattaaattattttgggagargctgcataccacatccttttcttacagatgaatcacacamatgaggatattaaagcctctttatctttctgaactgaagaaatctaactggattcaacccatcacttcctaaacttatttgagcatggaaccctctttcagtgtgacaaataatctcttggcactgatgttccatggaacacagtttagattgctctgagctgcaccttaattttactatgttggattttaggagcaagatgggctctgagctagagagctcctaagtgtttgctccatctgagcctgcagaatactacagtaggctgtacatctatagggatcataccacaataccctagggatactgagctgtggcatgtgcttccccagttaggccaccacaggatagctgggaaccacctgttaggaaagatctaaggtgccatcacttccttgtgaccactgggttttctgcactgatctgggctattgtagcccttgatgatgcccaggaatgagaattatgggcatagggtggggatgggcaactgttctctgagcagctagaaccttaaacctctttccgctggtcatccttattggagcgcttatgttttttgttttttttttttktgagacggagtcttgctctgtcgcacaggctggagtgcagtggcgtgatctcggctcactacaacctccgcttcccgggttcaagcgattctcctgcctcagcctcccaagtagctgggactacaagcacgcaccaccatgcccagctaatttttgtatttttagtagagatggggtttcaccatgttggccaggatggtctcgatcttttgacctcgtgatccgcccacctcggtctcccaaagtgctgggattataggtgtaagccactgtgccccgcccctggtcataatttttaacttaaaaaataggaatgatcatagtacctatttttgaggactcgcgtagattaaaaagagcttagaacaattattgataaatgttagctattattattaggtttttggcaattgtatacaatgtcacaattattgttttttttttttttttttttttgagatggagtcttgctctctcgccagtggtgcaatctcagctcactgcatcctccgcctcccaggttcaagtgattctcctgcctcagcctccagagtagctgggattacaggtgcccaccaccatgcctggctattttttttggatttttagtagagatagggtttcactatgttggccaggctggtctccaactcctgacctcgtgatctgcccaccttggcctcccaaagtgctgggattacaggcatgagccacccacgcccggcttatttttatttttattttttttgagatggagtttcactctcgtggcccaggctggagtgcaatggtacaatctttcctcactgcaacctccgcctcccaggttcaaatgattctcctgtctcagcctccctagtagctgggattacaggcgcctgtcaccacgcctggctaatttttgtatttgtagtggagacggggcttcatcacgttggtcaggctggtctcgaactcctgacttcagataatccacccacttcagcctcccaaagtgctgggattacaggtgtgagccaccatgcccagcacaatgtgacaatttttaacaacttgtgaagatttctgcaagttttagttgacctgctttcatttgactcgatagcagaattttaaagactgtttattttgtcaaaagccaggggtggttgtttaaccttttaaccaatgtatttaaaattaaaaaacaaacaaacaaaacattttgctttctatttctcttcagaatcttagcattccatatgagaacattgacatttatgctgatttatttttattctttttaaagtcattttctgttttacccacattttagcctttgcagtcatctgtgactcttctctctcccacccacacccagcccattagcaaatcctgaccagcttcatcttcattatgtgcccttccctcacccccactgttagcaccatcatctcatgtctggattatgtcaaccgactcccaacttgcgtttgcttctgcccttgccatctaccaaccctaccccagactgatttccacacagcagccagagtgaccctttgaagagtaattgagatcacttccctcctttcttctaaacctttcaaataacttcagtcttggccccagcctacatgatccggcctccctccccacccctctccaattctgatctcattgcctaccccactcccttctcagctctgcttcagctcactgcctcctccttgttcccagacatggcatgtgtgcttttgcctcagggcccttgtattcactgggatacagayctgagcttcagtgacttttatgccctgcatttgtggaactatatgaaccaggaagggaggtctgtggttagaggaagcaacacactggtggacaatctctactgcaagagaagagagttctaggagttccctcctcctggaactctcttttctcagctatgggcatggttcatccacccacttcattccagtttctgggggaactaacgtaatacagcgctccaccctggccccttcacagtcccttcacccagctttttttcttcatagttgttgtcagcatccaacacagaaggtttatttattatctgtctcctcccagtagggatttctgtttgtttgttcactgctgtatccttagcagttttaatagaattcggcacatagtaaataggccctcaataaattaattcctttaataataaaggaattaatacatgagcaaaggtatgcattttaagatttttttatcaatttttcaaatagcagacatactgatttttttcattgtcagttgttagcattttaagggctttatttggttcttcctctacagttacatatttgtagtttatgtacacccacgttgaagaatgactcatacagtgcatagtgaaatcttttctggatttcttctttatctttccaatgctttaatgtttttttaaaaaaaccatttcatgaaatctttaaaagctgctaaaactttcccattgatactgattgctgcaaactttttacttaaatgaaaaattttagagtgaggtaagtttggtaaacttgcaaaatcgggctgtggcaaataggattttgggaagctggcttctttaacccctccccagcctctctgggcctggcctcctgctgtgatgcccctccctcttcccctggctacttggggctgatttgcacctgctcctgcagatcaacgccagcgcagagagaaactggctccacatcagctcggatgcatcccgcctggccatcatctggaaatacggtggcatctacatggacaccgatgtcatctccatcaggcccatccctgaggagaactttttggctgcgcaggcttctcggtactctagtaatggaatatttgggttcctcccccaccacccctttttgtgggaatgcatggaaaactttgttgaacactataattcagmcatttggggcaaccaaggccctgagttgatgacaaggatgttgagggtatggtgtaaacttgaagacttccaggaggtgagcgacctcaggtgtctgaacatatccttcttacacccccaaagattttaccccatctcctatcgagagtggaggcgctactatgaagtgtgggatacagagccaagcttcaaygtctcttatgccctgcatttgtggaaccacatgaaccaggaggggcgggctgtgattagaggaagcaacacactggtggaaaatctctatcgcaagcactgtcccaggacttacagggacctgattaaaggcccagaggggtcagtgactggggagctgggtccaggtaacaaataragctaacactcgtttgctgctgctgcagtgtggaaatggacatttcctggagtgccacattttcacttgatctccactgtctcttggsggggtgggcagagggttgcctctcaaatgtcagttaggattagctttctctgtctgtaatagaaaaatcccaaatgatactggctataaaacatacacccatggtccatttgactgcttgacctccaacccaccatgtttgcatttcaggcagtaggatgaagaaaagaggaaaggtgcacttgctttattttgtgaagacttcctgcaagtaccgtataacactttctcttacattgcactgactgagatgtagctgcaagagaggctgggaagtttaaggaggaagaaaaaatgggtactgggataggcagctaacagttttgctacatgttctatttaatacagtaagattaattccaggacctgttagagcattgactgaggtaaaaagagacttgatttctagtcctgattttgacattcattaatgcattcagtcaataaatattaactgagcctggtctatgtgccaaacattgatttagatgctgcagatacagctggatcaagcagatgagatcctcagcacttatatcctaatccctggcctcatgatcctgggacagtctcctcccctccccagggtgtctgctgttctctaccctacctctttccaatatacacattaaccctgtcataattggcccacagaagcaacttaccaactcagactatttaaaactgctgccctttttagattcacataaaaatttacctcctgcatttcaaaatgtcatgttcaaagcaccataaatatatacaatttttatttgtcaattacaaataaataaataaataatttattatttcttttcaggaggtatgaaaattaatatttcttcagcaaacacttagccaagattttctagaactttccttttgatagtttgctttatgggaaaaagtttatatttgcccccaaatgtaaaattatgacaccctttcaaactatatccatctatccctcttttattctaatatttccccctttaggaatcactgctggccaggcacagtggttcacacctgtaatcctggcactttgggaggctgaggcaggtggattgcttgagcccaggagttcaagaccagcctgggcaagatggtgagaccctgtctctacagaaaatacaagaattagctgggtgtggtgatgcatgcctgtagtccaagctagctgggagactgagttaggaggatcacctgaacatgggaggttgagggtacagtgagccaagatcgtgccactgcactcagtctgggtgacaaagccagataaaaaaaaaaaaatcactgctttgacaatcttgttaaaaaatatttacaagtcaagtctcatgtcccagctttatttattcacagctacttgctttggacttgtagatgtctgataccatcgtcaggctctgaggcctgctgccataccccatggctgtcttttgggttgtgtcctaggaaccactgctggttttcagctctcctgactgtctccacagatgaggatttctagggctagctgtcttagagacaagcagggacacatacattgtctctcccttctatttttggagaatgcatgacaaatggttcttcaactattcctgaccaacagggttttgaggggtttgattagaaatattttcgatatttcaaaaatatgtgaattggccacgcacattggctcacgcctataacgccagcactttgggaggccatggtgggagaactgcttgagcccaggagttagagatcagactgggcaacacagcaagaccctgtccctacaaaaaacaaatagccaggcaaggtggctcacctgtagtcctagctacttgggaggctaaggaaggaggatcacttgagcccatgggttctaggttatggtgaactatgatcacaccactgtgctccaacctgggcaagacagtgagaccatatcttaaataaataaataagtaaataaatgtacacacacacacacacacgcacacacacatacacaaattcattttgacattaatgataatttgatgtttataggkagctttacctggcagtaaattatgtttttgattaataaaaaatgtagcaaataaaataataatgtattacttaatgaatccagtttgcttagtgaaaaggaacatttcaaaacatggtggtggtgatgatggcaagagtagtaagtggtaagaaatgtgaggttcctgggaccccagataaccctggattccttctggccttttgtgaatctatgccatgaatttatatcaggctacattttgcaaataggctcatgctggtgtttttccctgtattaattttttttcaaatcctactcattcttagaatttcaaataggattgtgtggggcaaaaagtgaaagtgcgtgttgggtactactgtcatgtttgtaggtacctctcgctctttctctgcatatatattcacgcttattggtaagaagtctcttccaagtaccctgcactgccaccttgtctgcccttgctttttccccaggactcccacccacaattcaacaggactgtctctttccttctctagggtaagagccagcatcagtgctgattggttggtatctgtgccagactcgttaaatattttgaataccattcctgagtttctcatataaatagttaaaaaaaatacaaatggaatcataagatacatgttatggccatccgtggtggcctatgcctgtaatcccagcactttgcgaggctgaggggggcagatcacttgaggtcaggagttcgagaccaccagcctggccaacacgatgaaaccccgtctctactaaaaatacaaacattagccaggcgtggtggcgcgtacctgtaatcccagctacttgggaggctgaggcaggagaattgcttgaacccgggaggtggaggttgcagtaagctgagactgtaccactgcactccagcctggacaacaagagccaaattctgtctttaaaaaaaaaaaaagatacatgttatttgtatgttgtttttcactttaaaaatgtgtatgtcgtaggtaccttttttcattagcacatcaagatataatatacttttttctttataatggttgcatagtgtttcattgtaggatacatgataatctactcaatcattatttgattggtggatatttacattattctaattttaatagtacatgtaatactatagcaaaaaatcctgattactgcatttttgaggactttaaattttgataattatttttcaagaaggctgtttgaaactgcccattttcccacttttcaccagtttaaaacatctatttaattttggtcagtataataatttaaaacatgtaatttttatgttcattttggtaaggttgtttacatgtttaactggcaattttttttattatatgaatcatctcatcttttgtccactcttcttttgagttgttctatttcttgttgatttgtaagcactctttataaattaatgtcacgaatactgtatcattacactgcattttttttagttctttgttttttaacctcatttaggatgttttcaccatatatgtttcaaaatttttatgtaatccaacctgtctttttttttgttttttgggtttcatgccatgcttccctacccttctgtcactctgctccccttcaagaaataaaggcagagctctctcacccaagggaattgtcaggaccctgaatctcagatgtatcttctaaactaagttacaaggttagtgcactctccttggtggtattggggcagggattcttaatttagggggctgtgaagagattttgggggtctgggaacttactctttatttttactagctgttaatcaaaatgtatcattccttccaattatgaatgtatgccacaaaccacagtagtattagtagaacctgtgactttgtcattaaatattagttttttcctatcacattaaagttattacggatatcttgaaataattgtttacactcttactacttttaggtcagatgctagatcttgccatttaatgcattaataaacaaaaatgctattattttacacattttcttatgttttcatagctatattttcaatattttgatgtcctctgtaattctatgttttgcttggtgcatttaaaaccattcttaggctgggcgtggtggctcacacctgtaatctcagcactttgggaggctgaggtgggcggatcacaaggtcaagagatcgagaccatcctaaccaacatggtgaaaccccgtctctactaaaaatacaaaaattagctgggtgtggtggcaggcgcctgtagtcccagctacttgggaggctgaggcaggagaatcgcttgaacccaggaggtggaggttgcagtgagccgagatcatgccactgcactccagcctggagacagagcaagactccgtctcaaaaaataaataaataaataaaaaataaaaataaaaaccattctgaggaaagggtgtgggcttcatcaaactgccaaagaggaatccctcctccaaaaggcaaaagcccaggcaggaggcagctggggcagctccttctagatcccacccgcccatcactgccagccaatgaggggccatatcacagccacgccttaggccaggcttatccagctctgcattttcatttttgcagaagggatgttttcctgagaaaggaggtcttttcggtaagtgctcagacttccttcaaagtgaacttttcagggattgggctagaatgtacgatctgcctaagaaagtttcctctcagatcctgccagttctagacatgtcagagtgcaggcctttcttttgttgctagattcttagatttttcagaaaccagcaaaccagattttatgtaaaatcctcctctgactgtatgcctgcctatctatacatcaacgcagaaaacccaacaatacacttttgacctaaaatcacctcagggctcattagtggccggcatcccagcgcagggagacctgtcccatacacctcagatacacttcccttcaggagaatgggatccagagcaggtttctaaggtgtgatgccagcatttggcagcagagggcactcctattacaggctgtctaggctgtgtcctatttcctgaggtgtaggagggagaccgtctgtgaaaggggctgagctgggtcagagggcgggtgactagtactgggctgaggagggagtgaggggccattgggatattgaaaatccatcctcctgtcctcccacccagcagttatgggccagctgctcggggtgacaggaatgtctcctggactagccagctagggccagtctcccttggtctatgcacctgtccccacggctgatgccagagcttgtgtgtgctacagtagaggtgggcagcagaaatgacagctttccagtgccaagtgatctagtcctctagaggttgttggtatccttgggactaagaaaataacttggcacatgataggcatgcagtaactcctccctgtgttgagtgttgaactaaggcccagtaagggaagagtgtgagggttccatgcatgaggtcttagtcagctcaagattcaggatttggtttttggctaaggtagatctgggtgcatgtcaagtctactttcttacaccagccctgcaaaggagggcaccctatttacacatggggaaattgaggctggtggaaataacatgcacaaaggtatcctcagaactactttctgcaaatttcagggatacagtgggaagagagctgagaagcaaatgtccttggcgatttcacagtgtcaagtcaggagtgcacaccactgacttgtaggcccagggcagagcctacatgtaatttagctaatttgattctaacaactcttctaggtagagtttacttttcccattttacagaggagaaaaatgaaaggtcaga

SEQ ID NO: 93284 - DNA, 74803 bp, Homo sapiens
  misc_feature (1)...(74803): n = A,T,C or G
tcctagtaagtaaattatgctgggaaaactggctagccatatgtagaaagctgaaactggatcccttccttacacggtatacaaaaattaactcaagatggattaaagacttaaacgtaagacctaacaccataaaaaccctagaagaaaactgaggcaataccattaaggacataggcatgggcaaagacttcatgactaaaacaccaaaagcaatggcaacaaaagccaaaatagacaaatgggatctaattaaactaaagagcttctgcacagcaaaagaaactatcatcagagtgaacaggcaacctacagaatgggagaaaatcttttcaatctacccatctgacaaagggctaatatccagaatctacaaataaacaaatttacaagaaaaaaacaaccccatcaaaaagtgggcaaaggataggaacagacacttctcaaaagaagacatttatgcagccaacagacatatgaaaaaatgctcatcattactggtcatcagagaaatgcaaatcaaaaccacgatgagataccatctcacaccagttagaatggtgatcattaaaaagtcaggaaacaacagatgctggagaggatatggagaaataggaatgcttttacacttttggtgggagtgtaaattaggtcaaccattgtggaagacagtgtggtgattcctcaagaatctagaactagatataccattttacccagcaatcctattactgtatatacccaaatgattataaattttgctactataaagatacacgcacacgtatgtttattgcaggactattcacaatagcagagacttggaaccaacccaaatgtccatcaatgatagactggattaagaaaatgtggcacatatacaccatggcatactatgcagccataaaaaaggatgagttcatgtcctttgcagggacatggatgaagctggaaacaatcattctcagcaaactctcacaaggacagaaaaccaaacacctcatgttcgcactcataggtgggaattgaacaatgagaacacttggacacagggcggggaacatcacaccccagggcctgtcaggtggtagggggctgggggagggatagcgttaggagaaatacctaatgtaaatgatgagttgatgggtgcagcaaaccaacatggcacatgtatacctatgtatcaaacctgcacgttgtgcacatgtaccctagaacttaaagtataataataataaaaaagacacatgcacacgtatgtttattgcagcactattcacaatagcaaagacttggaaccaacccacatgtccatcaatgatagactggattaagaaaatgtggcacatatacaccatggaatactatgcagccataagaaaggatgagttcatgtcctttgcagggacatggatgaagctggaaaccatcattctgagcaaactatcacaagttctcactcataggtgggagttgatcaacgagaacacatgggcacagggaggggaacgtcacacaacagggcctgtcggtgggtggtggcctgggggagggatagcattaggagaaatacctaatgtaaatgacgcgttgatggatgcagcaaaccaacatggcacatgtatacctatgtaacaaacctgcacgttgtgcacatgtaccctagaacttaaagtataattaaaaaaaaaaaagaaaaggttatttatgaaacaatgtagtaaggaaccagtaagtaggggagagaaatgtgaaaaaaaaaagtttagataataaaatattccttaaaacctgatagaaaattggagaaatttgactaattaacatttcatagttagagctcttagtcttgcctaaagtaaaataagaaatataagtatattttttaatatacttaagcatgaagctggttaagtatggagctaaatttcacatacatgcatgcattgcttcacaccgtttactgttttgcatggatagtgctggcactggagtacttattggtcatgtgcctagagtgaatttcttgattgtacaggatgtatgatgatattggtggacttaaggatattgaatggtgtatcaggaataaaatattcattatatgggtgtttgggggccctgagtaacactgtagcctccagggtagattgagtaggaaaaatttagggtggggttcctgtttgtttttgcttctaattttcatttgtttgctgtttattctcctccaggctttgcttgtggtcgcataaatagaaaaccatttttttgtttgttgttttagtttctagtggaaggcttttatttggttctgtgaatagttattttattttctatgcatttctaccaagtcatcatttgttccatttatctggaattcctaggctacctttgttgagctcacaggaattggtggagcacactaagctttttaaccttaaactaactttttggatattaggcttcctgatactttaagtatattgagtatacttttgtaaatagaacttgagtcatatttctctctctctgcctaatttcttcaaaatttgtaaattgtttgtgaatattcttaattcatagcaatgtgtttgtttgcatacagttgagcagggtcactagggctgctcatggagagagaactcaagaaagctgacatgccggcaaaagggtaagaatttcttaccagttggacttctggcccctctttgtgcaaactggttgaatgaatggtaaaatataatgagaaggcatgagaatgttaatttttataaacatttaacaagcttcccaaaatcaaattgcagcttcaaaattgtcttttctgacctcaaactttgagatgctacagcaggcccgtgaaccatccaaaagagaggtaaacaggattatttgatatgtttagttacatgggaagcattgtgaaaataaaaaataatgtttaatcatcttcaggttatatattagtgaatgatattaatatatgttccagaattgtatggaatttctaaaattctaatatgtctgagtatatgctatcaatcataattattgtgttattgtagaccacagaaataaccaaatctccttgtcaatagtgtttttaactatcactatttaaagtcatttgaactccatggtctaagtcaaatcagctatgaaaacccattagttatcagtgctatgcacctaaattggagaaacaactggtattcaagaggacataagtccagtgttaagcatggactcatggaaaaccaagatggccaccttgttcttcctgagtccttaaagcttttgttattaaagtttctgcattccgtgactcatcatggaaaagataaaatgatccagattaaatatatactggtttgctgacttataaattgctaaaatagtttataaccaatgtttggtttacaatcaaagcttcaggtacatttggctacctgatgggccatttaaacatttaaattgtcattttatttatttatttttttttttttgagatggagactcgcctgttgccaggctggagtgcagtggtgcaagctcagctcactgcaacctccacctcccaggttcaagtgattctcctgcctcagcctcctgagtagctgggattacaggcatgtgccaccacgccgggctaatttttgtatttttattagagacagggtttcaccatgttgatcaggctggtctcaaactcctgaccttgtgatctgcccacaatggcctcccaaagtgcggggattacaggtgtgagccactgcacccaaccatcatccttcatttacatagggcatacaccaggtaaccaatgcaaacctctagagggtattgaaatcccagaaaattctgtaactggtcccttgagccacttgctcaggcctgctcccaccctgtggagtgtgctttcattttcaataaatctctgcttttgctacttcattctttccttgctttgttttgcattttcaattctttggtcaaaacgccaagaacctggacaccgtccacccataacagtttcgctagttgcatgtgattgtaagacaaataaaaatgatgttgtgggctgggtgcggtggctcacgcctgtaatcccagcactttgggaggccgaggcgggtggatcacagggtcaggagatcaagaccatcctggctaacacggtgaaacgccatctctaccaaaaatacaaagaattagccaggcgtggtggcgggcgcttgtagtcccagctactcgggaggctgaggcaggagaatggtgtgaacccgggaggcggacttgcagtgagctgagatcgcgccactgcattccagcctggtcgacagagccagactccgtctcaaaaaataaaaattaaaaaaaaaaaaagatgttgaggcaggagtatagggcctgaaggcagggaacctaaagactttctagaactaaatcaaatggaaacacttcagctatgacaggaaatattctcttcatttacatagggtgtacactgagtaaatgacttcgtaacttcacttcgtcctcttcatttacatagggcgtacacccagtaaccaatgggaaacctctagagggtattgaaaccccagaaaattctgtaacaaggtcccttgggcctctttcttgggcccactcccaccgtgtggagtgtcttttcgttttcaataaatattcgcttctgttgctttgtttttcccttgctttgtgtgtttcgtccaattctttgttcaaaacgccaagaacctggacaacttgcagtccagaccctcctctagtaacaatgttatataagtatttggttgatgttagagtaatcactggatgggttcttcctgcctgctgcacaaacaaaatcaattcaggaagaccacagcattgcagtaaggaaagagtttaattgatgtgaggctggccacgccacatgggacatggagttattactcaaatcaatctcatcgaaggctagtaggttaggggtttttcaaaggtggtttggtgggcaggggctagggtatggaaaatgctgactggttgggttggagatgaaatcataggggttgaagctatcctcttgtactgagttgcttgtgggtggggccacaggagctgttgactggtccaggtggagccatcagtgtcaggcaaacgtgaaaaaatatctcaaaaggccaaacttaggttctacaatagtaatgttacctgcaggagtaaatggggaagttgtctatctggtggcttccggaataatggctggcaatggtctatgtttacaccttagcagagagaattcacactcctctgtcctcctagcctggtggtctctcggttagctttacaaaggcagttgagttttggggaagggctattatcatttaaactataaaccaaatgtctcccaaagttaacttggcctaagctcaggaataattaagggcagctaaaggcaagatggggttggttaaatcagatctctttgactgccataattttctcactgttagaatttttgcaaaggctgtttcattagtaccctactcatttaggtgaaatgaacaatgtgtattttatgtgttccagatgtgtatcaatatcacataactgtcagggagggccccaggtatctgtccctgttcagaaagatcatgaagatgaataccgcgatgaggacagcttgcccgtctcagcgaactcagaacttgtcctcagtagccagcccctatgggccaaggggttacaaacttcgacttgccggcaattacagctgttttccatcattctccttgctgtaccttctggtgggagcagcatgggagttaataaagggaaagcgacaagcgtctgtagagcgccgggtggggtctcgggagaggagggctgggtgggaagaggcgcggcgggaggcggcgccccggctcgcattggcccagccggcgtccctcctctggaggaggccgggcgcgcccggaaaagtggtttgcctgacggcgagaggcagaggtgccctcggtgatagaggaaacatggccgagtatacgcggctgcacaacgccttggcgctaatccgcctccgaaacccgccggtcaacgcgatcaggtaacgggctcggtcgcctccagcccggggaccgtgcgggccttagccgccctctggctccggaggctttgactctcccccgtcggtttaaaccgagaaggacactcaagagttgagcaactggtacatgccaggaactttttttttcttttctttctttctttttcttttctttttttttttttttaacctagattagcttggttaatcttcgcagggaactctcgtccccgttttactgataaggaaactgaggctgaggctgagacagatcaacacttagggagttggcctcgacctgtccttcatgcggagccctcctgcttacttgcaactttggctttgcaggccgacttttttttatttttcttttttttttttaattatactttaagttttagggtacatgtgcacaacgtgcaggttagttacatatgtatacatgtgccatgttggtgtgctgcacccattaactcgtcatttaatattaggtatatctcctaatgctatccctcccccctccccccaccccacaacaggtcccagtgtgcaggccgactttctaatccaaaggtcttaacttagtttgatgttggactttgatccagcctcactccccttctttgagtccaggctgtccttacaatgtttggctaaaggctttaggaatagggcaatcactggcattagtgggactttttttttttttttttttaatgttaaaagtcccactaatgccagctcagtgattaaagcagaattttgccctggcccggaaacgcaaaattatttctcctgatttgtttaaacctcaggactttggtgcttccaaggaagactcacatcagactaagcctatgcaatagcattttctgaaaaattgcaccttatcttctttttctcactggggagtatttgccttgtgtggtgcactttaaacattaaaaagtgagatcaatgttgcctttttgaaaagtaatgattatttggtttggtccttctacatctcttaaaaaaataattatatgtcagccttgaaaaagaattacctatccacagggaataagattagtggaaattataatttatcaagaatatataaagcatagagagaaaggtctttggtcaaaattcttataacatgctgctgaagcaaagagactgaaatgagaagacctgctaattttaatagaatttaaaaatcctactgtcattggatttgatttatcattagtattaatattaattcattatgaattattgcatttaataatgtcaaaaaatgcaggactaaaatcacataaggatgacatgtctactaacttgccattcccagaataaaaagcaaaatatctgttatattggttttgacaaagaaaaatgtaagtaatatgattacatgtcaattttggactggtctatatactgattagaattgctagatattaggaccttagggggaaaagttccatactctaatacccatgactaggaatattttctgacaactgttttttttttttcttttttttttaagctcatttgcttgttttgagacggagtcttgctctgtcgccaggctggagtgcagtggcgtgatctcagctcactgcaacctctgcctcccgggttcaagtgattcccctgcctcagcctcccgagtagctgggactacaggtgcgtgccaccacgcccagctaattttttgtattttagtagagacggggtttcaccatgttggccaggatggtctcaatctcctgacctcgtgatccacctgcctcggcctcccaaagtgctgggattacaggcatgagccacgtgcccagcctctgacaattgcttttaatatttctggaatttaacctgctctccttgcccacccatgcaaccacctgtgccacccccatcctctttgcaggagaaatgttagggcctacctcataaagttgtgaagtttaaatcagctggaaattatgaagtggcatttaatagatgttagttattcctattagtcagaagacctgttcaagccccaaaaacaggccctgctactcaggacccacttcagtttcatcaagaagatattctccacttgggaataagtacttctctgcccttttttgtctgtcttctgaacttttttaggtagaaatggacatcctaggagttcctcaagtttaacagattcctcaatttttttcttacactttttctttcctccctttcttccttttccccttcctatttctaattttatatgggaagtcgtctcctcctagctgattgagagattcttacttgagtgtaatacacacacacacacacacacacacacacmtataaattttttccccaaaacaaatagtttaaatccttcattgctagtttagccagccatgtttgcttccattcagataaacaccagccctctttataagtataggacatgcctgattaataggcctgtctcccagaacaatggctttcacacgattgctttactgtaatccacagagtaagaaagctcacgtttttacgtagcaattcaagacacacttacatacaaacacgtaaccgaaagcagtttcctaaaacaaaacctatccttacttggtatattgtttgatatagtctattttctcatctcttctttttctttgaaaaaatcctggtcacaagccacaaacttgatttgatgacttttggtttaaaaaaaaaaactgtctaaaaaaaaaaggaaagaccttctatagtcaaagaagctgaagagttttggtcagtagtcatgaaatgctgtctctactccagactctatttcttcatgcctgacagtattaacaggagaaaataatttcataacttctgcggcctttacattgctatgactctctctgtcagcttgaatctagtaaagtgygtatctgttatagctattttcatttttttcctgtttttgatatttgcaaaattatgaacataaaaaaggaagataggttgaaatgggaaaagctggtttcttctcctcagtggcactgattgagctaattttggctagttttgtaagcattgtttattcagaaggaaatgtgtgccttttggactttttgatgttatataatggttctgaatttgcttttcatggtcagatttggcttctaattaaccagctgaagccaagaggttttgtctgatttcatctaggttaagaggtgaaaagtaattaggtgtaagggaatcataaataagggcaagtatcctttttatttcttggggttttaactaatagttgttggtcttaacaatatggcctttacagaagtttgttgttgtttgttttgttttaaaatttatttttaaccctgtgtactaaagaacagagattttactcagaatacttggaattccaaggcaaaactgattggaatctggttctgtggtttttcctttaagcagttcctcaccacttgccctagattctcttattgcttggtacttattaatcccctccttcttcacaaattttctctcttggtctttgtgactttgagctcacttgctgaatcactctgctgagcttgtcccacttcttaaatgaagatatatccagaggatctgccctcagctctcttttcctttggtagactcattcagtcttggttttagctatctcttctgcagatgacttcctcatatattaaaacttggcaaaatctgctacatgccctatctttccactatcttgcctttatatcttatcttagttaagattacgcttggctgtcactgacagaatagtgaagataatagtgaattagacaataaaaagctaatttctctcacagcagtgccctggaatgatacagctgctccacaatcaacaggggcctcaattattttctctgtctatctcttgctctaccatcctcaatacatagcttctacctcctgatccaaggtggctgctcctgatctaaccatcactggtgccaggaatagggaggaaagaaaaagggaaaagcatacccaaatctttaagaactcttccccaaagttgcatataccaaatatgcttccatcccattggctagaacttagttccttgtgcagaccttactgtaaagcaggctggaaaatatagtctttattttgggcaaccatatttttgtgttagtccattttcacactgctataaagacatatccgagactgggtaatttataaaggaaggaggcttaattgatcacagttccacatggctggggaagcctggggaaacttacaatcatggtggaaggcaaaggagaagcaagtaccttcttcacaaggtggcaggagagaggcatgagtgcaggggaaactgcaacttataaaccactagatctcctgagaattccctcacagaacagcagcagggggaaaccactggcatgatccaatcaactcccgctaggtccctccctgacgtggggatcacagtttgaaatgaagttttggtggggataaagagccaaaccaggctgggcgcggtggctcacacctgtaatcccagcactttgggaggccgaggtgggtggatcacgagctcaagagatcgagaacatcctggttaacacggtgaaaccccgtctctactaaaaatacaaaaaattagccggacgtggtggcgggcgcctgtagtcccagctactcaggaggctgagtcaggagaatggcgtgaacccgggaggcagagcttgcagtgagcccagatcgcgccactgcactccagcctgggtgacagagcaagactccatttcaaaaaaaaaagagccaaaccatatcacatatattcaagtaaaaaccaagtgttttaatactatgaagacgatggagaggaatggatatttgaggtaactcacagcccccgccacagctcctagactgtttctcatttaattttcttatattttaacaatatgaaaaactgaaagtaatttcacccttctctgaacttcaacatcactttttctttgtacctttattacagcactcagatatcttagtgtgccttacatgataaattatgtacaagtattggataactccttgtacartatatagaagacatgtaataatatttttaaattggttggtgtcaattttaagcrgtcaaagtgaaagcacagtgcaggamaattacatttttaaaaagtggattaatttaatctggtcagtgcttaattaatcataggcatatatattatttgtagaagaaatttaatagtcatagtagacatattatttgttggaagctttattgagaagtatctacagtttttatccattatgtgtgtgtttaatttttcatttttaggaaaggaaaacactctgaatggtaggaatttaattctgactgatttacttcatgtattttgttttcttttagtacgactttactccgtgacataaaagaaggactacagaaagctgkaakagaccatacaataaaagccattgtgatttgtggagcagagggcaaattttctgcaggtaactcaagtctaaccctctcccaccatctctggaatccagccacagactgagaccaatactgcattagctgtgcttgttggtaataacttagtgtaggtaatggatatggcagacttgagtgagaatgagtaacactgtggagaaagggacaggaattacaagagagacccagagaagggcttagtctcttttattgtggattgggcttttagagtatatttagttccagacttgatggctgttatacacctgctgatatatacctgcattgcatgtatctccaccatatgtgggcttgggcaaatctctttaacttcctgaacctcaatttctctatctataaagtgggaacaataatatctattttaaggggtttttgtgacattaagcgagataacatatctgaaagcctctactacagtacctacacaaagaagatggtcaataaatgttattgtttaattcacacagagtcttataatagaattcatttttcttcygatagtcacccatctcagtgaccatggcactgctttattgggttattgtgtgaagatgcaaaattattgacaaaatatggcaaaagtatgctgaaatggtgatttattcaatggcatatatggcgtcttttccttaatattcatacattataccctttgacaaaagtcacatggatatgggggcctattcaaccttactgtagccagagaaatttaatatgtgttaatggtagtctgaaaagacacagatgttagaatcatggcaataaataaatataaaaatgtgaatcattataatattaccatttatcttgcctgttatatgccagtaccatgtaggttatttattaaataataataataaaaataatagtatttttaaacatgttatatgttaattctcagttagtcctacaatcctcatttacaggtaagaagagattttgagcctgggagagattaatataatgtcccaaaccttaaccagttattaaatggcttactcactgtttggaaatttaaggtttgtcacccaagatgatgacgatgatgcatgggaagagtgctcagaatgataaagaacttgatatttctttgtaagaaagaaggtagatgagagaatgtaattagagtttggaggcagaaaaaattattcttctaaaaaagtattagggattatgaaacttgacttaatacatttacatagaacaatgcaccccaaaatgggagaatatacattcttctgaaatacatctggaacatttacaaaaattgaccagatactgaattataaaatcttatctaaataaatttcattaagaatacattatctgacaacaatgcaattaagctagaaatcaataacaaaaatataactagtaattctcatatgtttggaagttaatttccaatatcctctgagtaaaaacagaaataatggaatttagaaaaaatttggaactgaatggcaatgaaaacataatataaaacttgagggatgcagctaaagtaaaacttatcagaaaatttatagctttaaaaatatatattagaaaagaaaaatggctgaaatataatgagttaagtatttatgtaaaggaactgacaaactaaccgtaaaatacaccctaatcaagtagaagaaaggaaataataaagaggagaaattaatgaaatagaaaacatttgaatcaagaggaacaacaatgttagttttttgagactaatacaattgacaaactctggagagattgaaggagaagagaaggcaccaagcaatgcatataaagaatgatgaaagggatatcattgcagatactgtagcctttaagaaagataatggccctttggctgatgcaagagcctagtgcggtggtgggagaggtatcagcaggagcagcgctgccacggggcctgggggctgacctgtctgacttcccatccatgcggagcccactggaatcgcatccatatctggagatgagatgatttttgatcctactgtgagcaagaagaaaagaagaagaagaagccttttatgttagatgaggaaggggatactcaaacaggaaacgcagccctcagaaacaaaagtctggagccagagccaactgaggacaaagatttggaagctgacaatgaggacagtaggaaaaacgatgcttctgatgatctagatgacttgaacttctttaatcaaaagaaaaagaaaaaaaaacaaaaaagatatttgatattgatgaagctgaagaagttgtaaaggatcttaagattgaaagtgatgttcaagaaccagctgaaccagaggatgaccttgacattatgcttggaataaaaagaagaaaaagaagaatgtcaagttcccagatgaggatgaactactagagaaagatgaagctctagaagatgaagatagcaaaaaagatgatggtatctcattcagtaatcagacaggccctgcttgggcaggctcagaaggagactacacataagaggagctgctgaattgtgtgttcaacatcatgagggaaaagaatccagatatggttgctggggagaaaaagaaattcgttatgcaacctccacaggtcgtctgagtaggaaccaagaaaacttcttctgtcaactttacagatatctgtaaactattatattgtcagcacacttgcatttttgttggttgaattgggtacaagtggttctatagatggtaataaccaacttgtaaaggaagattccaacaaaaacagatagaaaatgtcttaagatttatcaaggagtatgtcacttgtcacacatgctgatcactggacacaatcctgcagaaggacatgcaactcttatttcctacagtgtgaaacttgtcattctagatgttctgttgccagtatcaaaactggcttccagactgtcatgggcaagcgagcacagccctgtgccaaagctaactaatttgctaatcactgatttttcaaagcgtgttgtggatatgtggctaaaccagtttgccatcagagtggatataccattgtattaaaagcaagataaaaaagctgccaagttctttggctagtggctggttggtgtgaaatccttgcaagatgctgatgctcaagctgttgacatatgtatagactactttaacaactgtcagagaaacatgatatggggtaaagaggtgcttttttaaaatcgttcatagacttctgtaaaatacaagataaattaaagttattgtaacagtgaaaaaagaaagataatgaaaatattatgaacatgtaaaaaaaatagcttctcaaaattaactcaagaagaaatagaaaacccaaatagttctgtaatcattaaagaaattcaatcagtaatcagaaatctcaccaagtaaatacttgaccctgaagactccactggcaaggtctactgtaaagtcaaggaaaatattccaattttacataaacatttyagagaatcaaaaaagtggggccactttctctattagtttcttagagcaccataacaaattgccacaaaccaagtggcttaaaacaacagaaatctattctctcattgctctggaggatagaagtttgtaatcaagatatcagcagggtcattcttcttctgttttctttagggaagaatccttccttgcctcttctagcttcttatggtttctagcaatccttggcctatggatgcatcactccagtctcactttaatcacatggctttctttcctccatgtctaaattttcctgatcttctataggcccaccctaactcagcatgacctcatcttaatttgataacatctgcgaagaccttctttccaaatgtcacactcacagcttctgggtaaacactattcaactcagtacacttcccaactcattttttgaggcagcatacccttgatactaacacctgacaaggacagtatggaaaagaaaaattacaggctaatttcatttataaatgtagatataaaaatcgtagtgtaaattgagacaacaaagcaactaggtaacaatattatgacggaaacaaaccctcatatatcaatattaaccctgaacataaatggcctaaatcctccacttaaacatatagacaggcaaattggattaaaaaacaaaacctgatcgttttctgcccacaagtgacaccctttggtaaaaacacccacaaactcaatggagtggaaaaagatacactgtgcaaacacaaaacaaaaatgagcagtagtagctatatttacatcagataaagcagattttaaatcaacaacagtaaaaagacaaagaatgtattatataatrataaagggttcaatacaaggagaagatatagctgtcttaaatatatatgcatcccaaaatggacaactcagatttataaaacaaatactactcaacctaataaaagagatagacagctatacaataataagggaggacttcaaaaccccgctgacagcactagacagatgattaaggcagaaaatcaacaaagaaactatggacttaaactagactttagaccaaatggacctaatagacacacttatagaacattctatgcaataaccgcaaaatacacatttttctatttgtgcatgggacattctgtgcatggaacgttctccaaaataaatcatatgcttggccataaatcaaatctcaacaaattcaaaaaaatctaaatcatatcaagtatcgtttcatattatagtggaataaaagtagaaatcagtagcaagaggaactctcaaaactctacaaatacatgggaactaaacaacttgctcctgaatgttcattaggtaaatgaggaaatcaaggcagaaatttttttaaaatatagaaagatcttaaagtcacaacctaatgttgcacctcaaggaactagaaaaacaagaaaaaaaccaaacccagagctagcagaagaaaagaaataacaaagatctgagcagaactaaatgagattaagacaaaaaaataataatgaggattaaggatcatcatggtggacgggacacagactagattgcagctctgacttggatggacagagcagcatgcagaggctcaygtcgtgaattttagctccagaatgactactggaataaatcaggaatcccaagaggacccacagaccctctgaaggaagcagactgctcctgcaggacacaggagacatcccaaatactgtgagtgcccaaactgcggaaatgggagagggagatcctccattctggaacacacacccccactggggaaactggaggtctagtttgtgggagaagattctgaccttacctggagatgagtcaatttagagagccatgtgaaatacatgggtggaggaagcagcaggaaaggccctgggagcttgctgggtccccargcaggccattcctgcctagcatcacagagatccttcgagagggtggccagaggcatggggaaaacaccacagggagacgaaagtctgcagctgaactttgtaacaatttgaaccagtctagaagcctcctggccagaactcgggggagggtgggaatctggagtgcagacttcacaggcaggggaagaactaaagcccttatgcagctgggaggtgggtagcctggggcaagttcttagccctgcttgcccactgcctggaaacagactcagtgctgttagatggggagtgagaccagccctttggattgtgtgggagctgggtgaggcctgagtctgccagctttcccccactttccttacaacctgcatgactcggcagaggcagccataatccttttaggtacatgactccagtgaaagttgaaaagagtgtcctttccccactttgtttttgtttgctttgtcaaagatcagttggctgtaggtatttgggtttattttttgggttctctcttctgttccattggtctatgtgcctatttttatactagtaccatgctgttttggtgactatggccttatagtatagtttgaaatcaggtagtgtgatgcctccagatttgttctttttgcttagtcttgctttggctatgcaggctctttttttggttccatatgaattttagaattctttttctaattctgtgaagaataatggtggtattttgatgggggttgcattgaatttgtagattgcttttggcagcgtggtcattttcacaatattgattctacccatccatgagcatgggatgtgtttccatttgttaacatcatctaaggtttctttcagcagtgttttgttgttttccttgtagagatcttttgcttcctaaatagtttattttatttttttgcagctattttaaaaggggatgagttattgatttgattctctgcttggacacagctgggataattggttagccacatgtaggagaatgaaattggatcctcatctctcactttatacaaaaataactcaagatggatcaaggacttaaatataaaacctgaaactataaaaattctagaagacaacattggaaaaacccttctagacattggcttaggcaagcatttcatgaccaagaacccaaaagcaaatgcaataaaaacaaagataaatagttgggagttaattaaactaaagagcttttgcacagcaaaaggaacagtcagcagagtaaacagacaacccacagagtgggggaaaatcttcaccatctatacatctaacaaaggactaatacccagactctacaacaaactcaaacatatcaacaagaaaaaaaaatcccattaaaaagtgggctaaggacatgaatagacaattctcaaaagaatatacacaattggccaacaagcatatgaaaaaatgctcaacatcactaatgatcagggaaatgcaaatcaaaaccacaatgtgataccaccttactcccgcaagaatggtcataatcaaaaaatcaaaaaacagtagatgttgatgtggatgcgatgaaaaggaaacacttgtacattgctggtgggaatgtaaactagtacaactactatggaaaacagtgtggagattccttaaagagctaaaagtagaactaccatttgatccagcaatcctactacttggtatctatgcagaggaaaaaagtcatacgaaaaagatacttgcacacacatttacagcaacacaatttgcagttgcaaaattgtggaaccaacccaaatgcccatcaatcaacgagtggataaacaaactgtggtatttttatacgatggaatactactcagccataaaaaggaatgaattaacagcattcgcagcaatctggatgagattggagactattattctaagtaaagtaactcaggaatggaaaaccaaatattgtacgttctcactgatatgtgggagctaagctatgaggatgcaaaggcataagaatgatacaatggactttggggatttgggggggaagggtgggagtggggcaagggataaaagactacaaatacagtgcagtatatactgcttgggtgatgggtgcaccaaaatctcacagatcaccactaaagaagttacttatgtaaccaaacaccacctgtaccccaataacctatggaaaaataaaaataaaaacagaaaaaagaaatatacttatgaaaatattacaaatataagttcgtaatatagtataagaagatacaaaggataaatgagatgaaaagttggttctttgaaaagagaaaaatttatatactgctagctaaactaatcaaaaagagagaagtttcaaataaacacaattagaaattataaaggtgacagtacagctgattccacaaaaagacaaaagatgctcagagactactgtgcacatctctacatgcataaactagaatacctaaaaaaaaaaatggataaattcctgtaaacatacaacctcccaagactgaatcaggaagaaatagaaatcctgaacagaccaatactgagttatgagattgaatcagtaataaaaaattttttgaccaaaaaaaacccaagaccagatagattcacagccaaattttaccagatgtgcaaagaagagctggtaccaatcttcctgaaactattctgaaaaatcaaggaggaaagattcctccctaaatcattctatgaaagcagtaccaccttgataccaaaatcaggcaaggacacaagaaaaaaaaaaaacaaaaactaaaggccaatataactgatgaacataaatgctaaaatcatcagcaaaatactgtcaaactaaatccaatagcacttcaaaaagatattacatcaatattagatgggctttattgcagggtttctaggatgcttcagtaactgtgattcaccagataaacagaattaaaaaacaaaatccatgatcacctcaatagatgcagaaaaagcatttggtaaaatccaacatcccttcatgataaaacccctcaacaaactagacatcaaaaaatacctcaaaataataaaagctatatacaacaaaaccacagccaacatcatactgaatgaggaacaggtgaaaacattactcctgaaaactggaacaagacaaggatgcccactctcaccactcctagtcaacatagtactggaagtcctagccagagcaatcaggcaacagaaagaaataaaaggcatccaaattggaaaagaggaagtcagatttcctgtgttcattgataacatggtcttatacttagaaaatcctaacgactcttccaaaagactcttacacttgataaatgacttcagtaagtttcaggatacaaaatgaatgtacaaaaatcagtagcattctatacaccaataacgttcaagctgagaaccaaatcaaaaactcagtcccatttacaatagccacaaaaaaataaaatacctaggaatacatttaaccaatgaggtgaaagatctctacaaggggtactacaaaacactgatgaaataaatgatagatgacacagacaaatggaaaaacatccatgctcatgsattgaaagaatcaatattgttaaaatggacatactgcccaaaacaatatacagattcaatgcaattcctatcaaattaccaatgtcatttttcatggaattagaaaaaacaatcctaaaattaatatggaaacaaaaaagagctcaaatagccaaagcaatcctaagaaaaagaacaaagctgggggcaacacattacctgacttcatattatattataaggctatggtaaccaaaccagcatggtactgatacaaaaatagacacatagaccagtggaacagaatagagaacccagaaataaaacygcatacctacaccaactgatcttcaataaagtcaacaaaaatatgcaatgggaaaggatatgctgttcaataaatggtgctgggaaaattggagagccatatgcagaagaatgaagctggacccctatctttcaccatatacaaaaattaattgaggatggattaaagacttatgtgtaagatctaaaatcataaaaattcctggatgaatatttaggaaatctcttttggacgttggcctaggcaaataacttttgactaagacctcaaatgcaacaaaaacaaaaatagatgaatgggacttaattaagagcttctgcacagcaaaagaaataatcagcagagtaaacagacaacctacagaatgggagaaaatatttgcaaactgtgcatccgacaaaggactaatatctggaatctataaggaactcaaacaactcaacaaggaaaaaccaattaactccattaaaaagtggacattgtcttttggttatatatacttaaaaattttttttgaagtacacataggacatatacatttgccaaaaggagacatacaagtggccaataaacatatgaaaaaattctcaacatcactaatcatcagagaaatgtaaatcaaaactgcaatgagatatctcacaccacttagagtgactattattaaaaagtaaaacaacaayatgttggcaaggatgcagagaaaagggaatgcttatacactgttatttggaatggaaattagtacaacctttatggaaaaacagtatggagatttctcaaagaattaaaaacagagctatcatttgacccagcaatccaactactggggatccgtccaaaggaaaatatattattatatcaaaagatacctgtactcatatgtttatcacagcactgttaatgatagcaaagtcatggaatcaacctaagggtctatcaatggttgattagataaagaaaaccatagtatactacacaaccataaaaaagaatgaaattacgtctttccttaggccattatcctaagtaaaataactcagaaatagaaaatcaaataccgcatattctcacttataagtgggagctattatgaaggaataattgtcagggaaaaaaagggggagctaaacaatgggaacacatggacatacagagggaagtaatagacatagggaccttcaaaagggcaaggaggttggggtgagggttgaaaagttaccaagtggtacaatgttcaccgtttgggtgataggcacaccaaaaacccagacttcaccattatgcaatatatctgtgtaacaaacctgtacatgtaccccccgaatctataaaaataattttaaataatcttagtgtactgtgaagctgaatctaacaacatataaaaagcataatatatcacttttgtcctaggaatatcagattggttgaacactagattaatgaaattcatcccattaaaagattaaaaagaaaaattatatgattatgtcgagatgtagaaaaagcattctataacatttgacgtgcattaagaagaaacattcttagtaaatgaggtacaaaaagaaaatgccttaatcaggcaaaaggtatccattttgaaaaatctacaggaaacaaacaaaatggcgaattgaaagctttccttatgagaaaggaacaagacaaagctgactgctctcactatttcttttgacattgtattcaaggttcttgataaaccagtaaagctagtaaaagaaacaaaagatataaggaatgaaaaagaagaaacaaaacttcattattcagaagatacaataatgtttgtagaaaaatcaaaataatctattaaaaaattgttagaattaataagaaaatttagcagttttgctgggtataaaaatcaatatcccaatattaattagattttgatgtgctggaaataattaaaaagtgaaatcactacactgtttgtgctttggtttttcagaaactgggataataatcatactaaccttatgctgtaagtagaagaatatagtatagcttttaagaatgtggggtttgtagtcaaattgcctaagtttaaatccctattctaccagttattagtcatatgtctgaagtagtcacttgtctcaaagcattaacttccttacctgtaaaatgggaattgttatgctgcttaacttaggtgttatgaaaattaaatgacacagtatatgaaactgcttagcacagtgcttgatgcatttatccaataattgttcatttctgttattatctaaaaaactatctcaatctaaagctacaggaatgataggcttgagacttggattgaaattgatcttgtttctctagaaccaaaaggaattgaaaacacgaaacaaaacactggactagagagtgaaatataatgaattggtgagaaaaaagcttaactcctggattgatgctagatgaggaacaggtagcaaaaagggaaaaaaagatgaataggctagatataaaataattaatttttaaaacttgtaccaagcttagtgttttcaaagaatagataatgctgtaggaaaaagcttactatgtataatgttatatgaaaacaggaaaatataaaaatgattttatggtatgctctaaatcagctgtcctcaacctttttggtaccagggactggtttcatggaagacagtttttccatggacaggggtagtgggtgggggtgcaggcctgggagggtgggggggcagggattgttttgggatgaaactgttccacctcagatcatcaggcattagattctcataaggagagcgcaacctagatccctcacttgtgcagttcacaatagggttcacgctcctgtgagaatctaatgccgctactgatctgacagaaggcagagctcaggttgtaatgctcgctcacacatgtggaaaaaaactaagaactcctcaaaatattaaattatggctatatagtgatatttagggtgatcttcatgttctttttaattttgcgtggttttcaaattttccataatacatgttatttttataatcaggaaaagcaataaatattatttttattgaagataaaaatctattacaaaaacataattctaagctgcttgattaacatataactcataaatatgtatacatgttaccctgatattttatattgtgatgactcatgcccttaacaaagatatggagctaagttgctgtgaatagrcttgattaacagtatcacacatacaaaaatgagaggggctgactcaatctcagaataatgatctttggaggagagtccctattccccttttctgagatttttaatttttttaaatatagacttactacttattatatggaaagatagattttagaaaattacagaattcctggtaaagattcaaggattttctctcatagcattctacattctccaatatacttgttttcagccaaggatgaagtgtaagggcccaaagaggtctgagactttagtcatcaggaactctaaaaaaaattaagaaataaataaaacaaattaattttttaaagagtatcaggtaacttactgttatataacaatgcccatgtatttctcaactctgttttctccttgtctttgtgcccttaggtgctgatattcgtggcttcagtgctcctaggacatttggccttayactgggacatgtagtagatgaaatacagagaaatgagaagcccgtggtggcagcaatccaaggcatggctttcggagggggactagagctggccctgggctgtcactataggattgcccacgcagaggtaacaaccaaggctctatatagtggctggtgtgtggggcttttctttagggcaaactctaaatgtagtcataagtatcagcggtgattattttatttatttgtttttttgagatggagtctcactctgtcttccaggctggagtgcagtggtgtgatctcggctcactgcaacctccacctcccgagttcaagcaattctccttcctcagcctcccaagaagctgggactacaggcatgctaccatgcccagcaaatttttgtatttttagtagagacggggtttcaccatgttggccaggctggtctcaaactcctgacctcaggtgaccacccaccttggcttcccaaagtgctgggattacaggcatgagccactgcacccggcccagaggtgataattttgaatggttagcttactggttaaygacttcagctgttacgtgccagtacagtggtactaattgttaaaatgttcaaatacttcacttccattctggtaagtaaacacctgctactctgagccctagtttcccttgtttcccttaaccttagccctagggcctctctatgatccatcaactacaggggaactccttgtttcccttaaccttagccctagggcctctctatgatcttgtttcccttaaccttagccctagggcctctctctgatccatcagctacaggggaactccttgtttcccttaaccttagccctagggcctctctatgatcttgtttcccttaaccttagccctagggcctctctctgatccatcagctacaggggaactcctgagtcaatagagagccccgagactctacctccagtactatgacccatatcaggtttcactgatgcagtgctcatgcagtatgagtattaaatatgttggctgtcacttctaagtatacatttaaatacttctttgataactcaaagatttctgtttcatggtcccttataattatcagtacctaataagacaaatttctattggaaaatagcacaaaactagtaaatatggggaaatttctggaaataggtttaatttaggctgttagacatgtcagatgaggtctgtgataccactgtgtatcacagtatatataatggtggcatttttgtaattaatatatttttctaatgatgaaaataatattcattctactaaactagagaacataagaaagtatacagatgtaaactaaaatcatcataaactcacagttcagaaataaccactattaacattctatttcattctagtctttttttgtatgtaattttttcttacagattctttttcctttgaaaaatgtcctttaaaaaaaagtacattggctgggcatkgtggctcatgcctgtaatcccagcactttgggaggccgaggcaggcagatcacaaagtcaggagatcgagaccatcctggccaacatgatgaaaccccgtctctactaaaaatacaaaaattagctgggcatgctggcaggcgcctgtaatcccagctactcgggaggctgaggcaggagaatcgcttgaacctggaaggtggaggttgcagtaagctgagatcgtgccactgcactccagcctggtgacagagcgggtctccatctcaaaacaaacaacaacaaaaaaaaccacatttgggctttttttgtatttagtttatactctatttttatactataatatttaacccataattaaatattctttattctgccaatctctgtcttttaattagagaacttaatacacttatatttaatgtaattactgataaggaagaacatctgccattttgctatttgttttctatgctttttggtttttttgttcaattcctccattactgctttcatttgtgttaaatgtaaaagtatacccttgtaactttcttgctgtttcttttactatatatatttttagttattttcttaatggtggttaacttggtgattacaattaacatcttaatttatgacaatgtagttcagattaatactgactgaattttaataatatacaaaaaatttgctcctctgtagcctccattacttgcccctttatgctattattgtcacaagttatatcttcatacattatgtactgcttaacatagatttatcattgttgctttacatagtggtcctaaatcagataagaaaaagaggaattacaaatgaaaaatacattattactgtcttttatatttacccatgaagttactctttatcagtgttctttatttcttcatgtgaattcaagttactgtctagtgccttttcattacagcctgaagtatttcttatagggcaaatatactaacaacaaaatcagtttttctttatctggaaatgtgttaattttgccttcattttcaaaagatagttttgttggatatagaattcttgattgacagttgttttcttttggcactttgtgtatgttatttcatgccttctggcctctgtggctgaggagaaatcatgttactcttctggtaaatattctttaaaaatatcattataggccaagaacagtggctcacgcctgtaatcccagcactttgggaggccaaggcaggcggatcacctgaggtcaggagttcaagaccagcctgaccaacatggagaaatcccgcctctactaaaaatacaaaattagctgggcgtggtagcacatgcctgtaatcccagctacttgggaggctgaggcaggagaatcacttgaacccaggagacggaagttgcagtgagccgagatcgcaccattgcactccagcctgggcaacaagagctaaactctgtctcaaaaaaaagaaaaaaaatcattataagtggcggcataatattcaatcatatggctataccagaatttatttaaccatttcccaatggtgttttaatttttataaatgcttacaaataaatacacatatatgtcctaagtgctccttttctgtgtccctcgtaccacaacctgtaccctgagtgcagatctgagttactagcaataagtaaagaggtagagatgggcagtgatggaaagaatggtgattgactgttaggaaaacctcatgtaagacaggcctcacatatgtgaggtattttggaactgctagaatcacgatctgggtaaatggcagtccgcatttaagtaccctcctctcacccttatacctgtaaatggctaacagatcctcagccacttttaaatggaatgggccaagaaaggcaataaaataaaggactcaagctccccttcttgtctggactgagattactgtctgactttaaaaaaaaaaaatagccttttggagatgtaatttaaataccatacaattcattcatttaaagtgtgcaattcaatggtatatgagtatattctcagagttgtgcaaccattatcacagtaaattttagaacattttatcaccccaaaaagaaaccttgtatcctgtagcagtaatcctccatcaccttctgctatcctaagcacctactaatctactttctgtctctatagatttgcctattctggatatttcatataaacagaatcatacaatatgtggtctcctgtgactggctttttttgtttatcatgttttgcctattctggatatttcatataaacagaatcataygatatgtggtctcctgtgactggctttttttgtttatcatgttttgcctattctggatatttcatataaacagaatcatatgatatgtggtctcctgtgactggctttttttgtttatcatgttttgcctattctggatatttcatataaacagaatcatatgatatgtggtctcctgtgactggctttttttgtttatcatgttttgcctattctggatatttcatataaacagaatcatatgatatgtggtctcctgtgactggctttttttgtttatcatgttttgcctattctggatatttcatataaacagaatcatacgatatgtggtctcctgtgactggctttttttgtttagcatgttttgcctattctggatatttcatataaacagaatcatatgatatgtggtctcctgtgactggctttttttgtttagcatgttttcaatgttcatccacgttgtagcatgaatcagttctttattgattttgctgaataatattccattgtatggatgtactacctttcatttatccactaatcattgatggacatttgggttgcttctacttttttggcttttatgaaccatggtgccatgaaaatctgtatacaggatttttgtgggcatatgttttcatttctcttgggtatatacccaggaatggatttgatgggtcatatrgtaactctatgtttaacatttaagaagctgccagattgttttccaaagtgtctactctgttttatattcccactagcaatgtatgaggattctgtattctccatatcctctccaacacctgttattgtctgtcgttttttaaatagccatcttagtgggtataaagtgttaccttgtggttttgatttgtattcctctgatggctaatgatgttgagcatcttttcaagtgcttactggccatttgtatctcttctttggaggaatgtctatccagatcgtttgcccatttttaacaggttgcttgtcttttattattgatttgtaaagttctttatatattctagatagaaatcctatatcagatatataatttgtaagatatgtatattctctcccattctgtgggttgtcttttcactttcttgtgtttcctgattcttgcaggactccagaaagttgtttccagagaaaattatttttgttggctgagacaggtcatattacagtcagagaataaatgtgtaagaagctaaaaatgtgtttcaacatgaagagttagggacagcacagctctgtttatgctgttaattaaagaaaaggatgtgcactaatttgccctgtagaaatcttgctgaattcagtgacaccatgcttytgagaatacaggaaatccagggaaacgcttgccttaactctgaacataccatctcatgctaatggcctttatgccttcaatctttgataggctcaagttggcttaccagaagttacactkggacttctccctggtgcaagaggaacccagcttctccccagactcactggagttcctgctgcacttgacttaattacctcaggtcagtatagaccttggcaacaactgtctagattagtgtgaagaattggactaggatttagaaaaattctggcttgaccacctactccctatgtaaccataaaaggattcttgaacttcttggcctctcgattttctgatctgtaatatggagaactacctttctgagcttctcaaacgttatcgtgaagatcaaatgtgagagccttttaaatgaaagtgcatgcaaagagcgaatcaaatttaggattttatttcagttcaagtgactattcatcaacactggtgttcacatagactgcattatattcagaactaatttagaaattgtaatataggcygcrcgcagtggctcatgcctgtaatcccagcactttgggaggccgagatgggcagatcacttgaggtcaggagttggaaaccagcatggtgaaaccccatctctattaaaatacaaaaaaattacctgggcatggtggcaggcacctgtaatcccagctactcgggagactgaggcaggagaatcgcttgaacccaggaagcggaggttgcggtgagctgagactacgccactgcactccagcctgggcaacagagcgagactcatctaaaaaaaaattgtaatataaatgagaaaaccataattttcaaggtatgttttcaaattttaatatgaaaatgactaaatttttcactggcaagtattaagatatcagctagaaatgcaagttgttctttttattttcttttttttgagacggagtttcgctcttgtagcccaggctggagtgcagtggcatgatctcggctcacggcaacctccacctcccgggttcaagtgattctcctgcctcagcctcccaagtagctgggattacaggcatgtgctaccatgcccagctaattttgtacttttagtagagacggggtttctccatgtttgtcaggctggtctcaaactccctacctcaggtgatccacctgccttggcctcccaaaagtgctgggattacaggtgtgagccaccacatccggccagcccggtgctttataagttgttctttctcaatagagaatgtgaacactacaacactagaccacatttagagaccctggatttactctctttctctctctctctctctctctctccatatatatatatatatatatatttttttttttttttttttttttttgagacggagtctcactctatcgccaggctggaatgcagtggagtgatctctgctcartgcaacctccgcctcctgggttcaagtgattctcctgcctcaggtttaccatatatttgtttgtaagacattaaagagactttcagttgaggtcaatttagaagaaagaacatatacaacaatacacttcaaacagatataactaataataagaatttaggkcagtcatcttacttttttgkgccttattttctttataaatgtagctaggaatagcacctactatagggkgatgtggcgaaaatcggataagttactgcgtacaatgtccttaggacagccccacacatggtgatcactccataattgttagatatatattattattatttattaataatttctttcttgagatggagttttgctctagttgcccaggctggagtgcaatggcgcgatctcaactcaccacaacctccgcctcccaggttcaagcgattctcctgcctcagcctcccaagtagctgggattacaggcatgcacctccacacctggctaatttttgtatttttagtagagacagggtttctccatgttggtcaggcttgtctcgaactcctcacctcaggtgatctgcctgcctcggcctcccaaagtgctgggattacaggtgtgagccactgggcctgacctatttttttttgagaccgagtttcactcttgttgcccagacggggatgcaatgctgcgatctcagctcaccgcaacctctgcctcctgagttcacgcaattctcctgcctcagcctcccaagtagctgggattacaggcatgcaccaccacgcccagctaattttgtatttttagtagagtcggggtttctccatgttggtcaggctggtctggaactaccaacctcaggtgatccgcctgccttggccccccaaagtgctgggattacaggcgtgagctgctgcgcccagccaggtatatattattatacccaaagatctgtcttttttagtaaaagaggaaaattgaagaaaagtgagatgaagatcttggtattagactatatgctgaagaacaggccataaaaagagcacaagctttagaatcaaagacctggctttgaatcccaactctaccacatataaataatatgccttgtgcaacttaatttttatttattcatccagcaattattaattttctctcatatgctgggcccttttctaggcattaggcctatagcagtgaaatgaaccaacaaaaatttctgccttcatggagattgtatgaagaacagaacaataatcacaacaataatcatcattgtcatatttcattaattcaaaaatgtccttttccccacagctttcaaagtgagatgactctcagattcattgtaagtcatggtttaatttacagttttttcctagtttctgtgttaggaatttgggagcagcttacttgggatatagctcagggtttgtcatgagatcggagtcaagacactgtgactagggctgtagtcatctggaggatctactttctttctttctttctttcttttttttttttttggagatggagtttcactcttgtcacccaggctggagtgcagtggcacaatcttggctcactgtaacttccatctcctgggttcaagtgattctcctgcctcagcctcctgagtaactgggattacagaaatgcgccaccatgcccggctaatttttgtattattagtagagacagggtttcaccatgttggccaggctggtcttgaactcctgaccacaggtgatccacctgcctcagcctcccaaagtgctgggattacaggcgtgagccactgtgcccggcctggaggatctactttcaagatgacccagtcacatggatgactagatggtgctgaccttggcaggaggcttcctttcctatgtacggggacctctccatagagcttcctgagtattcacacagtgtgacagctcgcttcctccagaaagacaccacagtgtcttttatgacctaccgttagagtcacatgccatcttttctaaactctcctattggctatgcaggtcttctctattcagtatgggaagaagcttgaataccaagtggttagacttgctgggggtcactttggagactagccaccacaactgtatgcacacacatatgcctacctattatataatttagatagatagatagatatagacaggtggagataagtgctaagaaaacacaaaacagaaagggagagatataaaatgttaggaatgggaggtgaattaatatttcaggtagggtagctagaaaaggtttctctacaaaatgacatctgagtaaagacctgaagaaggtaaggaagcttgttatgccaatatctggaggaagaaatcccacatacagaaaatagcaagtacaaagacctgaggcagggacatgcttggaatgttcaaagaacagcaagaaggtcaatgtaactggaatgaaatgagtcaggggaaaagtagtaagaggatgaagtcatatctttttgggcttggaaggttatagaaagaactttggcttttcttgtgaatgaggaagaaaggcattggagtgtttcaagcagaggagtaacatgctctcacttaggtttttcaaacaatcactctggctgttgaaaatatactaattggagacaaggacaaaaacaggaagactgagggctgctatcataatccaagggagagatgatgggggcttggatctgagtagtggcaatgtaaatcataagatatggtcagattctggagatattttgaaagtagagccaacaggattttgtgacagagcagatacgagatgtgagagaaagaggagagtcaaggatgatctaatggccagagtgagtagctggaaggatggtgccatcactaagactgggatttctgctgatagagcaggttttatggaagtatcacaagagcttcatttgggacatgttaagtttgagaggcctgttacacatccaagtggagatgtcaaatagacaattggatagacaggcctggggtttaggagagagaggtcttctgaactcctctaagcctctgttttctcatcagtaaacaaccacatggttgttttaaggaataatgaaataacatgacatgcttctgatatagtgcctgttaaacagaccacatttcataaacggtatctggcccccaaagatgtccacgtcctaattcccagaacctgtgaatatattatgttacattcaaaataacctttgtacgtgtgattacattaaagatcttgagagggagattaccctggactatctagctcagcccattttatcacaagagtccttataagagggaagcagaaggtcagagaagagagaagacactatgtgctggctttgaagatggcaggagaggtcacaagccaagtaatgtaagcagcttctagaagtggaaaagacaaggaaaacattctttcttacagcatccagaaggaacaccttctgctgacctgttttagacttttgacatcttaaactataagatagtaaatgtgtgttttaagcctctgagtttgtggtaatttgttacagcagtaatacactactaatacaaaagctattagtaatcacgatattcagaatcctgctttggtttggaaaatatttttttcyttcyttttttttttttttttttttttggggacagggtctcattctgtctcccagactggagtacagtggcacgatctcagctcaccacaacctccacctcccgggttcaagtgattctcctgcttcagcctctccagtagctgggattacaggcacgtgccaccacacccggctaattttttgtatttttagtagagacaaggtttcaccatgttgaccaggctggtctcaaaccgccgacctcaagtgagccacccgcctcggcctcccaaagtgctgggattacaggtgtgagccactgcgcccagccgaaatttttttttttctaagaaagggtgttaaagaaaaagattagttaaattgtgaaagttgaagattccctactgatgtgaatgaggaaaaaaagtgccaactttgtaggcactgttcccataggaaattaataagtaaatagatttaggtggctaaccctttctgatcttctgaaatccataagacaggtaattctggaaagtagagtgattacaacagcaaccttctccacaatttccttagaatgccgtctgaaaatgaacgaatctttagcagtarccacaaaggatatgcctgatcatattgcagttcgttcgctgatgttctctgtccaatcaactgacaggactacagtgtcctgctcctctttctgttttattttctaggtgctgtcccctttgttcacagaaaagcatagaaagctctgctgtattctcataaagcttggccccagccctgatgagtttctctatactcattcacaggacaggctttgagctctagactttggtgggatacctcttactacccagaatactatggggggaaagaggaattgggagtaacatctttatcctgcctgccttttagctgtaggtccaggtgggttttcgctatacattttttagtactagcacctcaaggctctcaggcagaaataattaatatcagcaaatattgttctatgaccaaaagaaagacacacaaaaattcttaaaactaaaacaactgcaactctaaaacctatgaaaatattttatgacttaaaaaaaaagaaacataaacgtcagtctgctgaaacattaaagaaaacaaaaaattttagaaaactcacattattctaaactagaaaagaaaatattttgttaaataagaacaccgtatttaaaatcaaaaccttagccaaaataatttctttttgaagcaataaaaagatgtggtaggatagattacagaatcaacaacatagaggataaaaagagacacatctaaagaattcagaagaatttaacaaaaagataaataaaatgtaaatgaagatagcagacatggaagatacataacagaggtctctgctttgaataatacgtgctcccaaagcacaaggcaaaaaaaatgaaagcaataaccaaaagaaaaaatagaagaaattcttcagacattaaatagcatcagagattgtactttaacaagcatgccattttcctggaaaaactgatgaggagataattctttgatgtgtcttggtaaagattttaaacttccagaaaatagaatcctgcaagcttccccaggataaaaacaaataaaacgaaaggttactttcaaaggaactaaaattataccagccacaagtaaatgctgtggaatattcacatgctaggatgctatgtaatatttatgaagaatgatgatctaaatctcagggttcttaaagtgtggtccagggactctcgggtgtggcctaagacctttacagagtccttgagatyagatctattttcrtaataataagacattacttgcctttctcacaaatgtgtagtggaattttccagagactgtaatatgccttgtgatatcacaacagattgaatgcagaagcaataggagaatgagaatgcagctgtcttctgttaaatcagacagtaaataaatttgcaaaaatataaaacaattgcactcttctccctaatttttaaattttttatataattattttgcataaaaacattatgctaacatgcagtgagtttattattttaaaatgaactaataaagaaacatttttaaagcttgcagtgatttttctttttttatttttatttttctgagatggtatctcccactgtcacccaggctggagtgcagtggcacgatctcggctcactgcagcctccgcctcccaggttcaagtagttatcctgcttcagcctcccaagtagctgggtccacaggctcgtggcacacccagccaatgtttgtatttttagtagaaacagggggcggggggcaccatgttggccaggctggtctcaaactcctgacctcaggtgatcctcctgccttggcctcccaaagtgctgggattacaggtgtgagccaccacatccggccttgtgatttctacacccagacaaaagcttgcagttttaatttctaatacagtaaatattgatatatataacctacataaacacaagctttttggagttctccataatttttaagagtgcaaaggggtcctaagacccgtttgataactgctagtagaaatccgtatagaaaccatgatataaaattgtgtatacattagccaaattagaaaataatgtgaggcgggccgggcacggtggctcatgcctgtaatcccagcactttcagagtccaaggcaggtggatcacctaaggtcaggaatttgataccagcctggtcaacatggtgaaacctcatctccactaaaaatacaaaaaagtagccgggggtggtggcatgggcctgtagtaccaactactcgagagactgaggcaggaaaatcgcttgaacccaggaagcagaggttgcagtgagccgagattgcgccactgcactccagcctgggtgacagtgagactccatctcaaaaaaaaaaaaaaagaaaaaaaaatatcrtgaggctatatgcattaaaaatggatttttcctttaaatggggggatgattttataaatctgtagtgtataaaaggagagttagaccagaaatatgacatttatttccttcaataaatcaagttagatagttttaatttataatggtataataaatacagtttaaagaatgtgaactattttaagtatgtaatgtcaaattcataaaaggatgcttaggatccaacatactacaggattcaaagcacatgagacaatttattgtgcaaaagacaaaataggaagcaaagaagcctaaaatataggaggaaatcataatagtgtaaaatgagtctgtaaatttgagggtttacagatacttaaagtatatgggggaatattgaataattttgttgccctatttgcagtattgcctgaaaccaagattattggaagaaatcaggaaaactggctttgacaaaaagaaataaaatgaactaggattggccttttcccaaagcactgcttaaagaaacatcactatttttaacatgcagaaaagaggtaaaaacagtaagaatatgatggggttttgatttgcatagaaaaggtcatagtgaattagaagaaagctaacattagaattatacacctgtctttttaagtagtctgcacaattttaggaaaacttgaatatgacatttggaaagagttccatgtggaaaaaaattgtaaaggttagaaaagaagctatcaagaaaattggaaaaaattgagattactcaggttggagaagaaactctcaacctcagttcccttagggcacacagggttcttattagagcccattggacagtggttgtcatctacacttacgatgtcataagaaaaaacaattttaaattacagcctaagaatctggattggatatacagagccatgtctttagatccttagttctttgatacaggataaaagtccagctatgcatcattgaacaacgagatatattctgagaaatcattaggcgagtttgttgttatgtgaccatcatggtttacttacacaaacctagatggtatagcctattacacacctaggctatatggtatggcctcttgttcctaggctacaaacctgtgcagcatgttactgtactgaatactgtaggcatttgtaacacaatggaaagtatttatgtatctaaacacatctaacatagaaaaggtacagtaaatatatgatatcgtaatcatatgggaccaccatcatatatgtgttgttgacagaaatgttattatatggcatatgactgtacttggaatcccattgactctgttagaatagtagtggtactcttccaattttgtgaaatccaagccagaagaaatcattacagctagagaaatttttagtctatctgggagtagctcacattctccctgcttagttgacctcaaaatccttttataataatatccaggtttccatgtcccattttgtgtttgcttggttcccttaacctgggtaggctgattcactctctccttaccaaagtgattttatacacaggatacttatgtacagaaaccatttatgtacctcttaccctactccttactccagaaggagatctgaaagcctgttttcagagatacttccagaaaactgcccaaatactgcttttcaaagagagacctaccaaaaaaaaatcactgaactttctatccaatcaagaaaactcatttgtagttctctgaagcaataataagaaccaggaatggagggtttgtctccgatggcatccaccaacactgtaagtgcagtgaagactgtgggactgttgccaccaagatggatttgatggttgcttttcagaaggcaagatggtactggcaagaaagcaagcgatgtgtcactgtcttcttccttctgaccctggggtaggggatgctgatgtcccctacctcttacctcagaatatgcagwtcaaattgcatatttacaactggtgaagaactgtcaaggcaaatttaggaacggtgcaaaccctcatcaaacttctatatctcctattgctgacattctgtactggaggatgccaatggcatgattggatgctaagtataccagcaccaccactgccagacactagatattggcacctgtgaaatgagatttaacctgtcgctgctgcttagtgtcactaactccaagctaaaaaccctcaacagagcactcagttcactaactggggtcatgggccacactccagctgccacagtcaaattgtcaattgtctaatcatctgtgtccttttcagcttctgtagtagaaggcagggcttcaaagctcacacaatagcaattccacaaactaagggaggagctgagatgctgggtagccaaaaactggcagaaatccatcccatttgtcctaggtaattttaattataccttatagaatgtcaacttaatttttttctcattgagttaactatatttatgtctggggactatcttttttttaaattttctctctctctctttttctttgtttttggagatggagtctatctcttttgcccaggctggagtgcagtggtgtgatctcagcccactgtaatctccacctcctgggttcaagcrattctcctgcctcagcctcctgagtagctgggattacaggtgcccactaccatgccyagttaatttttgtatttgtagtagagacagggtttcaccatgttggccaggctggtctcgaactcctgacctcaggtgatccacycgccttggcctcccaaagtgctgggattacaggcgtgagccaccgtgcccggtccttttttttttttaaccatccacagccaatggggtgtgctagggataaggtagatactatatattactctgctgctgctacttctattattattataaaaaactaaacayctcacatttctatagagatctgtagttcataaagtacttctatagagatttatagaatataaagagaatctgttattctcacttaatactcagaattactgagataagcataattattgccatttgccaatgaggaaattgtggtcctggtgcagttcttcatggtcacacaaatagtggaaactagagctggagcttgaatccaagtttcctggttacctcagtggtgatctttctattctttcagtgagtgtggttcttacttattttattcaataatagatatttatatccagacagacagcctttcctactagagagagtaatgcttttgctttaatcttacatcgctctttgatttgttgttattgttgttgttgtttatttcaggaagacgtattttagcagatgaagcactcaagctgggcattctagataaagttgtaaactcagacccggttgaagaagcaatcagatttgctcagagagtttcaggtaagaagataataataaaaatagccaaagactgtaaacaggatacatgttcatttaaataagaaactcctggccgggcgcagtggctcacgcctgtaatcccagcactctgggaggccgaggtgggcggatcacgaggtcaggagatcgagaccatcctggctaacacggtgaaaccccgtgtctactaaaaaatacaaaaaattagccgggcgaggtggcgggcgcctgtaatcccagctactcgggaggctgaggcaggagaatggcgtgaacccgggaggcggagcttgcagtgagccgagatcgcgccactgcactccatcctgggcgacagaacgagactccgtctcgagaaaaaaaaaaaaaagaaaatcctgaggctgggtaatttataaagaaaaaaagatttaattggcttacagttccgcaggttgtacaagcatggtaccagcatgtgctcagcttctggtgaggtctcagagcttttacccgtggttgaacgtgaagcaggaataggcacgtcatatggcaagagagcaagagagaagtgtggaggtcccaaactctttttttttttttttttttctgagacagagtcccgctctgttgcccaggctggagtgcagtggcgcgatcttggctcaccacaacctctgcctcctgggttcaagtgattctcttgcctcagcagcccaagtagctgggaatacaggcgtccgcccaccatgccccgctaattattgtatttttagtagagacggggtttcactatgtttgccaggctcatctcgaactcctgacctcgtgatctgcctgcctcgacctcccaaagtgctgggattacaggcatgagccaccgcgcctggccccaaactcttctaaacaagctgatctctcatcaactaagtgaaagctctcttatcaccaaggggatggtactaaaccgttcctgagggatcagctcccatgacccagtaacctcccaccaggctcccacctcaaacactggggaccacatttcaacatgagatttggagcggacacacatctaaaccatatcacaggctctataatttaccgcagtaaaactgtgggccttgagaactttgtctccgcaaactgagttatgtccttctctcagtggtttcttactttatggactcgggatgttcctttcagagttctttcagtggcactcacagaggtttttttgtttgtttcacagtttcttttcagtctatggatgttgtcatctttaaatgagcaagatggagagggtaaaaatagccagaaaaaaataattgggaagagtattgcgttacaggcagaacagagtgctggtctcccgcttggtggcaggcaatggcccagtgtcattcaaaggcattcttttgaaggagtcattcttttgttgaccttggcagagaccaaacactttcctgaaataatctttcttttttgtggctctagccagttactgtttcaatgtgaaagtaaaagcttgaactggagaggggaggaacgatggggagaaaataatggagacccctaaagagaatcagcaagtccttgcccaaatagaaataaatttcctactatttttctcggcctttcaggcaaccttcactgtgttttcatcattgtgcttcccgagggggcttattgttttgttagaagtcacttgacagacacacagcaaaggctatttgcatttggaggtcccgaaatgattctttggtttgctaaaggtagacccgtgtctgtcattcacatctgtagttttagtttgtaaaggtctcaatttcaacaggaagttcttttccttaagtgatttccctagattctgatttgagaattaagttacttcaagaaatagttgaggttcatgatctaggagacctggatccaggtctcaaccttagctacatttctaaaatggtctggttataactttaatttattcacaatttaaaattaattgtaaacattaaattaagcatttttactttataaaacttacaaaatagtgtttcatctcaacgacattatacagtttgtccacttggtggcatccaaatattgaggcaccatttgctttaaacctgtaattcaccttttaacacttcagggctttagacaattatgtgttactattttaaattataatcatgaaaactatatagaaaaatgtaaaattgtgatataaaaatgtgtagaatataaatgtacatgtatttgcaattatacagtatataatygtgtatagagtaatgatcattatctggagtatgtatgaatacagatacaaatggaaaggaaataagcaaaaatgaaaatgttagtttttctccaaaatttcttaagtgatttttgcttttgttttgttttattctccagcttaggataagttagttttctcaaacatttctaaattatttttggttttgtttttattttttccagctgtattgaggtgtaatttctacagataaaattcatgcattttaagggggagtttggtgaattttggtagttgtttacagttgtrtaaccatggccacaatcaaaatatagttctatcaccctaaaaagtattctcatacccctttcccataaatccttttttcttccccttggccgcaggcaaccagtgacctactttctgtcatacttttatggtttttttagaatctcatatggatgaaatcatgcagtagtatatagtcttctgtggctggctttattttgtataatgtttttgagagccattcctattgttgcatgcattaatattttgttcctttttattgacttgtattccacattgtgggtaaaccacaatttgtttatccattatcagttgatggacatttagtttgtttccactttgggcctacacaagtctttgtagacatagtttttcctttttcttgggtaaatacctgagaatagtattgctgggttgtaataagtgtatgcttgactcttaaatgctttttaaaatttattaataaaaaaatcagtgatttaaaagacactaatttttgccaagcagatcagaacagatggaacaaatacggtgagactgagtttaaataagctctcattagaatgcttgtaatacatcctgtctagaaggcagctggacaatcacttatagaggcttaaaattactcataccttttcacttagtttttctattcttaggaatttaccatagagaaataatcacataaatacacaaagatttgtatacagtaatactcactaaagcttttagattatcataaaatattggaaacaactcaaatatttagttctgggaaattaattatgtaaaaacgataatctcaatgaactgactccattcagctattacaacttccatttttaaagaaagttgaagaacttggaaaattgcttacatatagtatkaagaagaaaacagccaggtagaaaattttacaagtgtgtgcgtgtgttcttatatgtacctgcataaggaaaaaactataaggcgatgtaacaaattttcagtagtggttgtacttgggtggtaggtaatctagactcttgatttgaaaaaaaatttatcttttcctaatatctaagtcattaaatttaccccctcccccaaaaaaatggatgactttgggaggccagtgtggaaaggacgcagtctgttagagaaatgggctcaggactggaggtcaggagagacagaggtctcagctttagctacgggaccttaacaaatcatctttggggctttgttttatgtattggtaaaagaaagggttcaacaaaattagctggtttcaaatcatgttctgagacctcacaggctacagtggttgggtgcttagttatttgtccttgcaacaactcaagcaaggttttggggtgtaatgtgtgttttggggtttaatgattagaatcccatggaaaccctaggacttttactgttttttcttttttaaatgagttccactgtttgaaatcctatgatttcttggtgctgctttgtaatagacaaacgctggagatcaaggtagagaaaaagacagatcaaccaaggattaactcagaatcttgtcaacatttgccatttattctcctaccaaatttataatttaaggaggcctatttatttgcctttcattttcatttgaggtattgtgcctatcttttctttttgtgcttccccactttcctcttttttctctttctttttttcttttttttttttttgagacggagtttcgctcttgttgctcaggctggagtgcaatgacatgacctcggctcactgcaatctcctcttctcaggttcaattgattctcctgcttcagcctctggagtagctgggattacaggcatgcatcaccacactcagctaatttttgtagttttattagagatggagtttcaccatgttggccaggctggtcttgaactcctgacctcaggtgatccacccgcctctacctcccaaagtgctgggattacagccgtgagccaccgcacccagcctctttgttttaaatacagtggttagtgtgtggtcatttagcagaacaaaattgatggattaacttgaaggaaagtttccacaaaaattcaatatgttaattacattaaatatatatgcatttattagaaatctatagttatggaaagctagagcaattgtcttgatctagagccatggtcctcaaacttcactgtgcatcaaaattgctttttggtgggcttgttaaagcacggttagcagggccccactcattactttctgattcattaaatctggggtggggcccaagaatttgtatctctaacaaacatgcttaggtgatgttgatgctgtgttctggggaccacactttgagaaccattgatatacagagaacaagggtaagaaaggagataatttttgctagttttgattttttttacacctgacacgcaaacactacctatagtctttttttttttttttttttttttttttgagacagagtcttgcttcttcacccaggctggagtacaatggtgcaatcttggctcgctgcaacctccgcctcctgggttcaagcaattctcctgcctcagcctcccaagtaactgggattacaggcacaaggcagcacacccggctaatttttgtgtttttagtagagacggggtttcaccatgttgaccagtctggtctcgaactcctgaccccaagtgatccacctgcctctgcctcccaaagtgctgggattacaggcgtgagctaccgcacccagctgctatagtcttaaagatatttttgtaaatcagttatgaaaggcatggttaaaatgcatacacatatggttgcacaaccttgtgaatattctgaaaaacactgaactatacactttaaagtggtgacttttgtggtatgcaaagtctgtctctgtcttaaaaaaaatacatgttgaatttttgtattcccttttcccatttgtaaccatattccaattattcagcctattctcactcccactgctcaaatgtttgctttaaaacaacaacaacaacgaaagaagaagatgaagaacatttatttagtttctacttcttataggaaaggagggagaaaagggaatttccaatggtcaaggttccaatcagcacttttggaaccaattacgrgtgggaagggagtgtagaaggttaacatacctaaaacgcaatttgggacttagcggcacatttctctacaaacttaacactgtatcctggtgagttgactgtggaagttcattagctttatgcattttaatgttcgtattctatgaagcctcccagactactgcagtgcaatggatttagcagtgcaatgcagaattacttggccaaaccagattgcattggctaaactagggaggggagcatcctataaaatgctatatatttgcacatgcatgtggctagcagcctgcctgtttctgaactaagaactcctgttctcatgtgcatgtttctggcatgatgctgaatgtgtgtgctgttattcaaagaccaagagactaaaggctctctctctctctaccttccccagctggaatgggcacagggaattatccarctgggagtgtcaactctggaacctaatgctccgttttcctttctgtaatgaaccctggtcctgttcctgtggctgtgctgggctgtgttagccacttttaacaattctaattctgcctaaagaccttggtctatttgttcttttggagttgtggcttttaaaaaaccttagtggttttatttgtctttctcttcattttatcttcttcactttgtaatttatttttacccgctgtgaacatttatatgaacatgtttcaaaagagcagagtgacctgccttacataggaggcctacgcacatgtctaaattgagcttcctttttacctgctagacaagttctgtgggtcaccttcttgaagcctgttaatgtgcagttattctgtctgtcctttgcaaagcttttatgatggacacagctttctgtttatcagggttagagagagagagagagacagattccttgatgtctgtgttcacgatttccgtgaaccgcatgttgagtctctctttagcctaggcagagaaaatcttttcctgccattacagcagaagaagaagggaaaataatcacctccttttgttccttcagaaacgtgactcacttatcttttttatcaaaaatgtcatagaatacctcatagaactaagaaaaaatgtgaatgggtsaaggaaagaattcaattaatagtatatttgaatcactgattacttcctttcctccccatttccctgggcagccaatgctgatgctgacatactgacacttgcctctcttattgtataggtactgctgagtgacttgaaaactaccaagtatacaagaaatacactttgaaaacaactgtacttatacacccaaaggggaaattctgaatatcttataactgaagttgtaagataacagcatccttagttatagctgtagcaagaaagagataggaaattgagcagggaaaaaccatctatgattgtgcccggatccaaaattttccagtgggtatgcttagtttggccctaggactggtctagacaagtgccttggatagctcccaaaatgcccatatgcagtctgcraggttttcagtgtccccgggataataggattatgctgatcagaactaattactgcacaccattaagcaggctttcttttcatttcagttttgttctctcctctctttttttcccatcttttcttttcaatctctggcctaaaatgaaattgccaggaactgcagctgtccttgattcagtggcggacaacactctctgctcttggagctcccagaggctataccttaaaatcagcttctgaacttttcaagaatagtcttactaggccccacctttaaatattccctttttttttttttttttgagacagagtctcacyctgtcgcccaggctggagtgcagtggcacaatctcggctcactgcaacctctgccgcccagattcaaagcgattctccttcctcagcctcccgagtagtagctgagactacaggcacccaccacgcctggctaatttttgtatttttagtagagacggggtttcactatcttggctgggctggtcctgaactgctgacctcatgatccacctgcctcggcctcccaaagtgctgggattacactgtgcccggcaaagattcttaactgaatctatggtgaggcctgggcatggctactcttaaaaaattcagcagttaattttgaggtatgatgtgggcatctgaacttcgtaaactcttcaaataaatctgatgtgtgctatgatgttgagaagcacccccaggaatgctgggaacagaggtagtatcacaagacagagatccaactctaagatatcccagcgctgtctatgccctgttacatggcatagattgcaccrgcagcccagcctgccttcctcctccgcttgtgcctccatgctcttgttctctccttcctctccccattgtccattcttgtcttccttttaggtcaccggcacattaaatcatctgtagaccctgggggagtccccattcttctctgctgagtttgctttcccttaaattgaggattgggctaactctttgggtaattgagcaagtaattggtgggcctattggatacggttcatgttttttcaaagtagtagggtgagagggaccacatgcctataaccactgtcttctctccattcctgaatcctattctttaacatcatatgggaaatcattaattcagaaactcattctttccaacactacttactaatcaagcattaagaaaatattcttgtctctttgatttaaaaaggaggctgagattatacaatatatctatattaccatgtgcacatgattacatccaaaccttactcacgttcccttggacacgcctaacacaccaatgccagaggggctcaatgccagatgcgcttatgttcatatgtctttttatggtgaaactgctctggtataagccctggtaggctttctgtctaaataactaagatgtacatttttgataaaatggttttattttttaagagatgccagtacattatagaaaacaacttctggtatagctgaagttttggtaactgtaagttgttatgaatttattattttatgaaaactttggaatcattctgtaaagttattttttaaaatagtaccataaggattcttattaaaatttcatatataatacatatggaaaatatatttttatgctattaaatatttatatccagaagcatggtgcttttctgtttttattaaggtcttattttatgttcttcaataaaatggtatagttatcttctgaaaggtcttgtacctttcttgataaattcatttctagatacactttaacagttttaatgaggcgtgatttgccttatagattgtgcagccatccccataaatcaattttaagacttgtccactcccacaaaaagtttcttcatgcccattaacactaactcctactcacatccccagccctaggcaaccactgatctttctgtctctatagatttgcattttttggaccttggatctaaatggcatcatacaatatgtaatgttttgcatctggcttcttttagttagcataatgtttctgaggctcatctgtatctgtattgtagcatgtatcaacagtttgatcctttttattgctgaataatattctattgcatggctctatcaaatttctttagtcattcaacagctgatggatgtttggattgtttccagattttgctattataaataatgctgccatgaatatttgtagacaagttttctttatggcatatgctttcatttctcttgtgtagattcctgggagtgaaattgctgggttgaacaatcagtttatgtttatctttttaagaaacaactaaactgttttccaaagcaatgtgctgttttacactctcagaagcaacgtatgaggcttcyggtttctctacatcatcaccaacattcagtagtgatggctttttattatagtcattctagtaagtctaactgcataacaaatgaccccaaaacttagtggcttaaaatcaaacatttattccacaatttctgtgggtccagaatccaagtgtcctaggtcctctggctttcagatttcaaacaaagctacaatcaaggtgttgtctgtggctgtagtcatctcaggttgattaggggtcasggggagaatctgctttcaaactcactcaagcggttgttggtaggattcagttccgtatgggctgttgtactgagggcctcagttcctcactgactgtgggctgaaagcctccctcagttctttgccacgwgggcttcaccatagggtggctcwcaacagggcagctggcttccatcagagtgaccaatttgagagggcaagaaagtatgagcaagactgaagccagagtctttttgtaacctaatctagaaatgacagcccattacttagagtctgtctaccacatttgttgcggttttaatttgcatttccttaatgactaatgatgtcgagcatctttttgtgtgcatattagccattcacatatgctccttgatgaaataactgctcaagtttttgcccgtttaagaaattacattgtttacctaattattgagtcataagagtttgttacatattctggaaacaagttctttatttgatatttgatgtgccaattatattttctattgctgtgctaaaaaattaccacaagcttagcagtttaaatcatccgaaattattttcttacagttgtgtagactagaagtattgtagaggtctccctgggctaaaatccaggtgtcagctggtgcactcttttctggaggctctaggggagaaactgtttcctgcttatttgggttgttggcagaactcagtactttgcattgtrggatcagagtccccatgttcttgcttgcaaacttgcgaccttgtaaaccttaaaggtcaatcccagcttctagagaacactgcattctttagttcttggtctcctttcctcatattcaaagctacatcagtgccaacaggtcgagtcctttgcatgttgcatttctctaacccttcttccttgttgaatccccctcaccacagtcaggaaagattctctgcttttaaggactcatatgattagattgcactcaatcagataacacagggtaatatccccatctcaatgtctaatttttttttttttttgaaatggggtctcactctgtcacccaggctgcagtgcagtggcacgaccttggctcactcactgcaacctctcaggctcaaacgattctcccacttcagcctccagagtagctgggaccacaggggtgcgccaccatgcccggctaattttttgtatttttggtagagacagagtttcaccacsttgcccaggttggtctcaacctcctgagctcaaagcaatctgcccacctcggcctcccagagtactggaattacaggcgtgggctactgtgcccagccaaggtctttaatcttactctcacctatacatctctttaccatgtgaggttatacattcacagattctaggaattaagacatgaacatttggtggggggggtgttattctgactaccacacaagtattttcttctagtttatggcttgtcatttcatttttttttttctgttttttttggagacagagtctcgctctgtcaccctggctggagtgcaatggcatgatctcggctcactgcaacctccacctctcaggttctagcaattttcctgcctcagcttcccgagtagctgggattacaggtgcacaccaccatgtccagctaattttttgtattttagtagagatggggtttcaccatgttgcccaggctggtctcgaactcctgagctcagacaatccacccgcctcggcctcccaaagtgctaggattacaggcgtgagccactgcacctggctgtcatttcattttcttattgatatcctttgaagaacaaaagtctttaatttttatgaagtctgatttcttgtttcttttgtatgtcatgcttttggtgttgtatctaagaatactttgcctaaccccaaggtcctgaaaatttttttatattttcttctaggaatttttatagtattagttcttcaatttagatttgtgatctgttttcagttgatttttatatatggtgctaggtaaggacctaaatttttttttttttttattgtttttggcatgtggatatccaattatcccactacgatttgttgaaagattctccttttgaggatttttttctgaacgattattatctaaagtgtgttgttgctttagggtcacagtatgcttgtgtgcatctgttaccatgtcactgtggtccttcgctgagtgcccttaggggactagaatctttccaataaaccacgtttgagatcgtatgagtcagcgtgcagtgtagcccacacttgagagtgtggatttatgtgcacagtcactttgctctgggtggaagtaggttatagttgacttactttctcggtgcttgttcctacagcccctcttttcatgtgttgctcaatctccctatcccttcttggtgcttgcacatctcagaccctttagccagaccctttagccaaacccttgccaataacagtatttttgttctcagttctgttccctctggttgyggagactttgaataaaaatgcacacacctattcagtgggatttagctggaaaaggtgaccttccaacctcacgtcaacttctggctcctcaaacagtaggttggcagtaaggcaggaaagttgttttcccatttctcactgagcagattgtgaatatttccatatggattttctgttgttaatgttgctccgattctttgttttaaaataaaaattctgaatgtgaaaaaaagagactctcctttcttccattgaattgtttggacacctatgttgaaaatcattggctataattgtaagagtttatttgtgaactctcgattctcttccattgatatatatacctatccttgcatcaataccacgctgtctccttttctaggtattttaaagtttttgttactattaggaacggagttaaggttattttgaatctaaaatattcactcaataatagacactagagtctctactacaggggaagggagggaggatggcaaaggttgaaaaaccaacttctgggtactatgctcactactggggtggcaggattattcatatcccaagcctcagcatcgtgtgatatacccatgtaacaaacctgcacatgtatgccctcaatctaaaataaaagctgaaataatttttaaaaattaataaataaaatattaactcagaaccgttttccttagactcattaatatttaatatattaatattaattacagattaaatattaatctattgattaatttaattaattaatcattaatctattataaaattgtcttggtcttggattaaaaagaaaatacaacttttatgcctaaactaggtaacctaaaattgctttgagtctactaaattctatcttgtaggactgtgttgcaaagatatcagagatgttagtgtacatatgtttagtgtacattaaatgtcttaatgaatagcttttagtttgtgctttgaatttgaacaggttattgttattactatatattcacattccctttgtacaagtaacatttccaaagctctgatccttcttattcctttcagatcaacctctagaatcccgtagactctgcaacaagccaattcagagcttgcccaacatggacagcatttttagtgaggccctcttgaagatgcggaggcagcaccctgggtgtcttgcacaggaggcttgtgtccgtgcagtccaggctgctgtgcagtatccctatgaagtgggcatcaagaaggaggaggagctgtttctatatcttttgcaatcagggcaggctagagccctgcaatatgctttcttcrctgaaaggaaagcaaataagtggtcarctccctccggagcatcgtggaaaacagcatcagygcggcctgtctcctcagttggtgttgttggtaagaccatggggtaatgaatggaatcctccaaatctgctcatgtaatgtgctaccatttgcttagggctaccggatgctaggtttcacgtaagacacattacttgtgttagctaagctaattctcacaccaccccatgagctctcttctttaacatgagaggcctagagacgccagccttctcaatggtgagctaaacacgagtagggtgaaagtctgaccctaggtctgactccagactgggaatgttttattcttttttttttttttttttttttttttgagacagagtcttgttctgtcacccaggcaggagtggagtggctcaatctcggttcactgcaacctccacctcccaggttcaagtgattctctttcctcagcctcctgagtagctgtgactactgccaccatgcccagataatttttgtatttttagtagagacagggcttcgccatgttggtcaggctggtctcgaactcctggcctcaagtgatccacctgccttagcgtcccaaatttctgagattacaggtgtgagccaccattcctggcctagcattttttattctatgctacctcttccctgtatgaatctctcattcctggatttcctgatgatgatgatttgtaccacatttcaaggtgtggcctgtcactctcatagctgggtatttgcaatcaagtctctgtctttccgtcccccgatccattcacttcacctgttcaaaaccactatcctcaaatccatcttaaccctgaaaccatggcttccttactttttttccctctggaattttcccaaacaawatatcttccttcctcagatgctagctccctgattggcttctctgggccactttcctaagcttcacttgctcttagtctcggctcaagaacggtctttggtggattttaaatcccttgagatggtaagtgaagcattctttgcaccagctkaggtacaatcttctggggagagggtccatagtttactaaaagcatcaactttctttcttttctttttttcttatatttaagtttttttaatcataattaaagacatgcaggaaagttataatagtacaaaaaattctcatatactttttatccagatcctccaaatgttaacgttttactatatttgttttatttccctctctcttttctgaaccctaagaaaaagttacagacttatgtgtatttcctaaaattaatattctcatacatgaccacagtataatttattttaaaaaacagggcaattaatataaagaactattatttagtctatagcccttattctgatttttctttcttttttcttttttttaaccatctttacgacttgtaagtatacagttcagtagtaataaatatatttatatccttttttttcccttcatctcccatccccccctccccttcctggcctttggcaaccaccaatctaccctgtatcattatgagatctacattttaagctcccacatatgagtgagaacatatgatatttgcctttttgtgtaaaagcatcaactttcttaacccttgcccagctgtctagcacagtggtctccaaccttttggcaccagggaccagtttcacggaatacaatttttcacggattgggggatgatggttttgggatgaaactgttctacctcagatcatcaggcattaaattctcagaaggagcatgcaacctagatccctcacatgcgcagttcacaatagggttcgcgctcctgtgagagtctaataccaccactgatccgacaggaggcggaggtcaaggctgaaatgctccctagcctgttgcttacctcctgctgtgctaacaggtcacggactggtaccggtccacagccagaggttggcgacccctgctgtagcaccaacccaacttggaggcaaagatctcactccacattttctcagtctgtttgttctctcaattcaactttggtatcaaagaatctgtctctaatataaatacattgtgctcctttcagctctgactctgttgaggtctacccttgattcgcttgggattttttttttttttttttgatatggagtttcgctctgtcacccaggctggagtgcagtggcgcaatctcagctcaccacaacctccgcctcccaggttccagcaattctcgtgcttcagcctcccaagtagctgggattacaggtgctgcgccaccaagcctggctgatttttgtatttttagtagagacagggtttcactatgttgtccaggctggtcttgaacctctgacctcaggtgatccgcccaccttggcctcccaaagtgctggarttacaggcgtgagcctttgtgcccagcctcacttgtgattttttaagaagatggataagtagagtgacaaagaactatgattgttcctctttttgtactattaaatatttcagcaataccaatatttatttctagttgttgtgcacttaacctctttctccttcaattccttcaagtcaagaataattaatgcaaataatagcaagctggtaagtgtatcagtattgtgtttgtcaaccactgtttgagaggatttcccgattttgttgtgaacctttctttaaaagccttcaggtttgtttctggcatataatgtgtaaaagtttgaagtatttttttaaaatgatatccacattgttttgaaaaatattggaaagggcgtactaaatatataaaagacacgtagatagaaatcaagtaagaggatctggacgtttctgccctcttcatgtgtattgctacactgccatgcgtttcatcttcgtgatgcaaccttccaccgctccctcgtgtcctctgacagactccatgacactcctctgcctcctgactgaaacccggcttaccctgaggacctgcatctgctgccctctccagggaatgctgccgcttctcccacactccatggacagctgggtcacttctcagaccattgcgctttatgggacactgtcctttgtggtcctgcactgtggtcttgtcgttctatcccttttcattactgtcatggctgccttccatttgctgaacactttagtacctggctcacagttacccactttggcccaaaccctgctgccatcctggttgtcctcatcgtctctatggacaatcattccctccttgtagcatctgggttttttgcctcctcagactcagggacattcacctcacctcacttccacattccacactcgcttctccacaggtcttgtcgttaccctgaatatttctccacttccaaaatctgaaacccctctcttcactaccaccaccacctcatatctttccttgtatctttcttaatgggttatttcaactacatccattacttgatcagctccccttatctttattttcttctctattcagctttaattttaagagttatcatttcagccactctcgggccaaagtctccaaactccatgattcattgcccttccattgtgctccccgcaaaatcctaaccctgatgatctcaatttttggcttgtttccatgagcccaggcccaggcttctcagccccgcaggagacgcagttctgattagtaaccctgcaagttcacgttctcacaccacacccaggctcccaggcctgtcaggacaggggaatgtagttgatcagaaactgcaaaactaacatttaaaacatccttatttggtatttacttctctgagtagaagaggttcctgatcaaattcaattccatggcagtcaaaagcagtaatttggcaggggagcaggactccttgcccctgtctatatgcatctgtgaggcaaaattagagaactatatgaagcttgaaaccaatagctaggaggccagagtttcaaaccccacattctaccttttaatgtagaaaagttttatcaaagctaaagtttaggatacaagttgctatagaagtgagagctgttcaaccttcttgttcttgagagaagtgcagggggttaataaatttggaaaactgtgttcttaataatttaatatatttattatatagtattgagtaatttaatacacttggaaaattaactaaatatgttctagagagactaaatcagtgatttctgatgactgatacatcctatcttcaaaaccaatcctccatgctagtaaatacaaagtatagaggagtaatatataagtggctttcacaaagctgttttcatccacagtgggctggttaggcaacacatcatctgccactgtaacaggtaacccagcaatctcagtagcttaacacaataagtgtttatttaatgcttattccataaggtcattctaggaccagggttttttcccactagtggctctgccattctccatgataagggtcagcaaactttttctgtaaagttccggatggtaaatatttaagctttgtgggccatacagtctctgttgcaactacccacgtctaccgttgtgcacaaaaacagccatagagccgggcatggtggcacatgcctcagttgcagccactaggggggccgaggcaggaaggtcacttgagcccagggcatagaggctgcagaaagccatgatgccaccactgtactccatcctgggcaacagagcaagactgtatctctaaaaacaaacaaaatacaaaacaaaacaaaaacccagccatagacaatatggaaacaaattaaccttgtgttccaataaaattttatttatgaacactgaattttgaatacgatataatttttcatgtgccacaaaatggtacttttaaaattttttatttaaaaatgtaaaaacatgtttttgcctgcaggcagtgcaaaaatcggcagtgggcggggtttggcctacaggccacagtttaccccatcacctactttaggcctcctgcaaggcctcagagtcattctctgcattctctacatctgggtggcaatggaggatcttgtgggagattttaggagccaatccaagaacccacatttcccccaatcaccaccatcgtatttcattgaccacagttactcacaggccctaacaggatgcaagggatctagaaagtacagtcttctgtgtgccggcaggaaaatgaattggtgttgggaacaaacaacatttttcatcaaataatttttcttcattttccatttttttcttgcctttgcttaaaatatttctccctatgtttttcccttcctcgacctggatggttcaacttcctcagttttacctattacagtctaatcttcctttaaggtccatttcaaatgtctttgtcttgaagctttttttgattcatccaactgaatgtaattttttccctttgaatcaaagaaatttgaacttttcacatcatttactttaccatatggaatggatattgtgaattcctctttccaccgctaaatcagaagctccctgaaggttgatgctcttcatgtttttttttaataacagtttaattgaaatgtaactcacatataaaattcacctttttatttatgtatgtatctttttttaaattttttttttttgaagacagggtcttgctgtgttgcccaggctggagtgcagtggcacaatcttagctcactgcagcctccatcttccagtttcaagcaattctttgtgcctcagcctcctgagtagctggtactataggcatgtgccactatgcccggctaatttttgtacttttagtagagatggggttttgccatgttggccaggctggtctcaaactcctggcctcaagtgatccacctgcctcagcttctcaaagtgctgggattacaggcatgagccactgtgcctggccaaaattcaccctttaaaagcgattcaatgtaaaatggtacagctgcggctgagcacagtggctcacccctgtaatcgcagcactttgtagggccaaggtgggtggatcacctgaggtcaggagttcgagaccagcctggccaacatgatgaaaccctgtctctactaaaaatacaaaaaaattagccaggcatggtggcaggtgcctgtaatcccagctactccggaggctgaggcacgagaatcgcttgaactcgggaggcggaggttacagtgagctgagatcacaccactgcactccagtctgggtgacagagcaagactccatctcaaaaaataaacaaataaataaataataaaatgttgcagcttctatggacaacagcatgacagtttgtcaaaaaggtaaaaattgccatataatccagcaattccacttctggatatttaccccaaagaatkgaaagcaggggccaggcacagtggctcacgcctgtaatcccagcactttgggaggccaaggcaggtggattacttgaggtcaggaattcgagaccagcctgaccaacatggtgaaatcccatctctactaaaaatacaaaaattagctggacgtggtggtgcacacctgtaatccctgctacttgggaggctgaggcaggagaatcgcttgaacccaggaggcagaggttgcagtgttccgagatcacgccactgcactccagtctgggtgacagagagagactccatctcaaacaaacaaacaaaaaaagaattgaaagcagggactcaaatagatatttttacactcatgttcataatagcattactcacaatcgcctaacagtacaagcaacccaagtatccattgaaggatgaatgggtaaataaaatttggtatatacatacaatggaatattattcagccttaaaaaggaagaaaattctgacacatgttacaacatgggtgaaccatgaggacatactgctaagtgaaataagccaatcataaaagatcaaatactgcataattccacttacatgaggtacctggagtagtcaaatgcacagatatagaaaatagaatggttggccagggttggggagagggaaaatggggagttatcatttagtaggtgcagagtttcagctttgcaattcgaaagagttctgatgatggttgcacaccttgtgaatgcatttaatgccactgaactgtgcacttagaaatggctatgatgggaaaccttatgtgtattttgccacaatttttaaaaatcagaaaatgcatagtaagcatatcaccaaaaaagaatacaattcaatggttgttagatattgacagagtttatgcaaccattgtcacatcaattttagaacattctcatcactccccaaagaaatcctctacccatcaacagtcactctccatcacccttccctccagcccttggcaaccacgaatctattttctgtctctgtggatttgcctattctggacatttcatataaatggaaccatacaatatgtagccttttgtgtctggcttttttttttttttcttcaagatggagtctcactctgtcacccaggctggagtgcagtggcacaatctcaactcattgcaaccactgcctcctgagcccaagcaatcctcccacctcagcctcctgaggagctgggaccataggcacatgccaccacacctggctaatttttgcatttctggtagaaacaggattttgccgtgttggccaggctggtcttgaactcctgagctcaaatgatccttgcgcactggcctcccaaagtgctgggattacaggcatgagccaccgtgtccggccctggcttctttaacttagcataatgctttcaagattcattcatgttatagtatgtatcattattttattcttttttttcgagacagaattttgctcttgttgcccgggctggagtgcaacggcgtgatttcggatcagtgcaacctccatctcccaggttcaaacgattctcctgcctcagcctcccaagtagctgggattacaggtgtgcaccaccacgtccagctaatttttgtatttttagtagagatggggcttcaccatgttggtcaggctggtcttgaactcctgacctcaggtgatctacccgcctcgtattttattcctttttatggccgaataatattctccattttgtgtatctatacaccagttgatgaacattcaaattgcttctattttttggctaattttttaacgtgagaaaatgaaatttatttttattgtataaatgcaaaatttacaggaaaatattttaaagctttaaaaaatgccaagtgacattgatacaggaaaatcacaaagcaggagaactacactaaattaatagatttcattttaaaatgtctcatcgtatctcagattttggaatattccatttctgtggaagacagttgattctgttgaagatataatgccccctagtttaattaacaagtactgatagccactgatctatttctcttaaggaggagataagaaagatgtgtatacattctgtgtacaggtaatatacacaattttctggatccagccttagctcagggtttctgaaattatttttttaattttattttagattcagggggtacgtgtgcaggtttgttacatgggtgtatgtattgcgtaatgccaaggtttgggcttctaatgttcactcaagtagtgaacacagtacccgataggtaggttttcaactcttccgtcttccctcactcccccttttggaatccccagtgtttattgttcccatctttggggccatgtgtacccagtgttcagctcacacttataagtgagagcatgcagtatttggttttctgtttctgtgttaatttgcttaggataatggcctccagctgcatctatgttgttgcaagtgtgtgattttattcttttttatggctgcatttggctattttgaataatgctgctactgaacattcatgtacaagctttatgtggacatgtattttcagttctcttggagatttagatatcagtggaattgctggatcataaagtaactccatgtttaacattttgagtaactgctaaactgttttttgcagcaactgtaccatttaaaaaatttgccagcaatgtatcagagttctaatttctccaaatcctcaccaaaatttgttattgtctgtctttttcattattgcaatcctagtgggtttgaagcattatctcactgtggttttgatttgcattcccttaatgactattgatgttgaacactttttcatgtgattattacccatgtgttgcttgtgctttgggtgtcatgtcttagaaaccattgcctaattcaagatcacaaagatgtatccatccatcagacttactcctaagatctgcttctaagaattttatagttttagctcttacatttaggcctatgatccattttgagttagttttgtatatggtgtgaggtaagggtccaacttcattcttttgcatgtggatatccagttgtcccagcatcatttgttgaaaagactatactttctctgttgaatgttcttggcactcttgttaaaaatcaattggccataattgtgtgggtttgcttttggctatcagttctattctgctaatctatatgtctatccttttgcaatgaccactatcttacactgtcttaaatactataggcttcctttttttttttttttttttttttttttttttttttttttttgagacagggtctcactctgtcacataggctggagtgcagtagtgtgatcatagctcactgcaatcctcaaactcctgggctcaagatatcctcctgcttcagcttcccaaatagctgtgactataggcatgcaccatcatgcctggctaatttttgttgttgttgttgttgttgttgttgttgttgttgtkacagagtttcaatcttgttgcccaggctggagtgcaatggtgcgatcttggctcactgcaacctctgccacctgggttcaagtgattctcctgcctcagcctcccaagtagtggggattacaggcatgcaccaccacacccagctgattttgtatttttagtagagacgggttttctccatgttggtcaggctggtcttgaaatcctgacctcaggtgatctgcccacctcggcctcccagagtgctgggattacaagtgtgagccattgcacctggccccctggctaatttttaattttttatagagttggagtctcactgtgttgcctgggctggtctcaaactcctggttccaagtgatcctctcaccttggcctcccaaagtgctgggattacaggcacgagccacctcacccaaccttgaatagttttgtcatacaatttgaaattgggaagagtgaatcctccaactttgttctttttcagtattgttttggctcttctggatttcttgcatttctatgtgaattttaggatcagcttattgattctgcaaaaaaccagctgggatttttataggaattgtgttggttcttcacatcaatttgggtagtattaccaccttaacaatattaagttgtctgatacaaaaacatttaatgtttttccatttatttggtcttacttaatttctattaacaatgttttgtactttttagtgtacaaatcctcctattctttgttaaatttcttcctgtgtattattctttttgatgctattgtaagtagaattgtttcttttaattttatattcagattgtttatttctaatatatagaaatatacttgatttttgtatatcaattgtgtacctacaatctcgttggactcatttattagtttgtatagcttctatttgtgtgtgtgaatctgactaatttttatatcctctgaaacacttaagagagtgcagagtcttaactagtactcaatccatttgtgtttcttgactcaatctctttaaatgccacattgtcacataagccttccatccagtgaataatttatcagttcccaataccactgaatcattctttttctcctttgatttttatctgcaggcttgggaacaatgggccgaggcattgtcatttcttttgcaagggccaggattcctgtgattgstgtagactcggacaaaaaccagctagcarctgcaaacaagatgataacctctgtcttggaraaagaagcctccaaaatgcaacagagcggccacccttggtcaggaccaaaacccaggttaacttcatctgtgaaggagcttggtggtgtagatttagtcattgaagcagtatttgaggaaatgagcctgaagaagcaggtctttgctgaactctcagctgtgtgcaaaccagaagcatttttrtgcactaatacttcagccctggatgttgatgagattgcttcttccactgatcgtcctcacttggtcattggcacccacttcttttcgccagctcatgtcatgaagttgttagaggttattcccagccaatactcttcccccactaccattgccactgttatgaacttatcaaaaaagattaaaaagattggagtcgttgtaggcaactgttttggatttgtggggaatcgaatgttgaatccttactacaatcaggcatatttcttgttagaagaaggcagcaaaccagaggaggtagatcaggtgctggaagagtttggttttaaaatgggaccttttagagtgtctgatcttgctgggttggatgtgggctggaaatctagaaaggggcaaggtcttactggacctacattgcttccaggaactcctgcccgaaaaaggggtaataggaggtactgcccaattcctgatgtgctctgtgaattaggacgatttggccagaagacaggtaagggttggtatcaatatgacaagccattgggtaggattcacaaacctgatccctggctttccamattcctatcacrgtatagaaaamcccatcacattgaaccacgtaccattagccaggatgagatccttgaacgctgcttatattcacttatcaatgaagcattccgtatcttgggagaagggatagctgctagcccagagcacattgatgttgtctatttacatggatatggatggccaaggcacaagggcgggcccatgttctatgcttccacagttgggttgcccacagttctagagaaattgcagaaatattacaggnagaaccctgatattccccaactggagccaagtgactatctaaaaaaactggcttctcagggaaaccctcccctgaaagaatggcaaagctnggcaggctcccctagcagtaaattgtgattcagtcttccagattatgcctcacatgctagcatcaggtaatgctgactgaatttcagtgaaattaaatcaaaaatccaaagtaagattgttctgaaatacaaagcaaaataaataatcattagaatcttctgtgtaacgactctaatggtcaaatctttaggaatgtgcttcctatgcctctgaatctgtccttatcagataaattcaatgcatgaacttgtgtgaatataataccataatagctaatgaaagaggctcaggcataagttgagattctcaaatgcttttatcattggataaatgtgtcatcaattaataaatgataaatgcagctaagtcatacattcattttgactcctttcaatgtcacacacatagtattgatcagaaatcttatgaatcatacatacactcaacaaacattaaagttgtaggaaaaagacagttggaaattggtaagggaactgagtacttcaaaccagcacagggaacttaggttagtgtggcaagcctttcctcttctggtctttcctcttctgtttatggagaaataatagaaagtagtaagtcgttaacttagtgtaagaagggtcttagagaacatctaaccttctaggatttcccaattctgtgatagagtaatgacaccagttttcctgtcatgacaagcctctgtgatgttacatatggaaatggttgaatcttgaaaaatctaaaattgttgcaaaacatattttgtatgattttgttgtaagagttcttctctttttactttttgccttgtgtagttaaaaattaaggggctggtcaatacaaaaacttgtacacaaatatttatagcagaattattcataatggccaaaagctgaatacaacccaaatgtctatgaactaatgaatagataaaccaaatctggtatatccatacaatggactatattattcagccataaaaagaaataaagggccaggcacagtggctcacacctgtaatcccagcactttgggaggctgaggcaggaggattgtttgaggccagaaatttgagaccagcctgggcaacatagcaaaaccctgtctctacaaaaaatactttccgtacattagtggttrcctaaggctagaattgggggtgatgaatggggagtacaggattcatctaatgggtacaggatttctttatggttcatgaaaatggtctaaacttattgtggtaatggtcacataacaatatattaaaaaccattgagttgtatattttaagtgggtgaattatatggtatgtgaattatatctcaataaagttgttagtaaataaatggggctgaagatgttatccttcattgtggtgtaaatgaactttcacaatattttcacctgtgaacccaaataaaatgattaaagttctgatggaaaaatcttgaatggagtataagttttccgttgttaaaaagcaaacaaaaaaccaacaaaaaatccaagtgtgccttgaattgtacagagcacaattattatgtttgaaatgtgtactacttaattttatataatttggtttgtgaaattaaagacatcaataaaaatgattcctgaaagtagtaattttgtctccaaagtgacttgctttcaaatcagtgttaaaaaaaacccactaactttttcttcaaacctggaattaattttgagttcttacaacttattttcaccctacagtggcctctagattaagggggttttttttgtttttttgtttttgtttttgtttttttctgactggagtcttgctctgtcgcccaggctggagtgcagtggcgctatctcagcacgctgaaagctctgcctcccaggttcacaccattctcctgcctcagcctcctgagtagctgggactacaggtgcccgccaccacgcctgcctaattttttgtatgtttcagtagagacagggtttcaccatgttagccaggatgatctcaatctcctgacgtcatgatccacctgcctcggcctcccaaagtgctgggattacaggcgtgagccaccacgcttggcctagattgagattttgaaactagagggtctatgaataggttttatgagtcaataacccctgaaatgttatgataaagtttgtgtacatgtatctgagtacatttcttggaaaaggtaccatatctcacatcatattctaaaaagtatcatgacccgaccaggcgcagtgactcacgcctgtaatcccagcactttgggaggccaaggcaggtggatcatgaggtcaggagatcgagaccatcctggctaaaacggtgaagccccacctctactaaaaatacacaaaattagccgggtgtggtagaagcacctgtagtcccagctacttaggaggctgaggcaggagaatcacttgaacctgggaggcagaggttgcagtgagccgagatcatgccactgtactccagcctgggcaacagagtgagactctgtctcaaaaaaaaaaaaaaaaaaaaaaaagtatcatgacccagtaaaggttaaggaccaatagaaaatggcaagagcagcctggcaaggtggctcatgcctgtaatcccagcactttgggaggccaaggtaggcagatcacttggggtcaggagtttgagaccagcctggccaacatggtgaaaccccgtccctactaaaaatacaaaaattagccaggcgtggggcgcatgcctgtagtcccagcttctcgggaggctgacgaaggagaatcccttaaacccgggaggcagaggttgcagtgagccaagattgtgccactacattccagcctgggtgacagagaaagactccatctcaagaaaaaaaatgagaaagaaaacaggaagaagaaaatatgagttcattccttcttattttacatcaaatgaagccaaactaattcgaatttgctgggtcccacatataatagtagttaatatgatgaaattttcaggatatcctctcctgtccttgaacatatacttgcttaaatggctgattttgttaataattttaaaacttaaaaaaaaaactttggattttgttttaaaaaatatgttctaatgatcattgactctgatgggaattatatattggaaacacccttgaagctgtaagactcccagcttgaaagatgctcttaatgatagtacttaaatcagtaaagccaccatgcagctgcagttgctctctatttactttcagcaggaacaggtgtgcatgagagcaattaaagtgaggaatcctaaattcccctgattaatgatgttacagaattctttatgcaaatcacactctactgcactgtaggaacctaaaatttcaaggtcttagatttgtctttaaaacagatacctagaaatcagaaatattgcagcctcactagattatctgaacctttttggtagccattgataagattaaatcaagttctctggactatgtttaaaagcagctttctgcaagaacagaatagttcttgactattcttgggactgtcagtgccatctgcttatcttaccagcttatacgtattttgagattaacagacaagttacactgcttccaggcaggacagcagcattcacaactccagcggacaccattcatactgtgtaccaaggggttgtcatccacatagaaaagatatgaatgacatccccaggaattgtataatgcctagttttgtttccaggacactctgtgtggcagtttcaagccaaaaactcttctggttattgctgtatctttctaaataatagttgacaaaagtggctgagaaaacctctgtttagactggatcaccaatgggaccaaatttgggacaaaatgggacaaaatgattgcattttgtttgttctttttaatatttttttcctagcaccctgagaaagaggaatatgagagagatgaacagaactttaaactcttgtccaaagaataccagggcatttaatttattttttattttttatagatactatgttgcccaggctaatctcaaatttctgggctcaagtgatcctcctgtctcagcctcccaaagtgctcagattacaggcatgagctactgcacctggtccccctgcacatttcaattgaaatatttatttcttcttttgcacccaaactgaaagtagcctggcagaatgagtgcctgaaagcatctcataagatgacctgagcagagctaatgcagtcgctcatgcgcacattttcactgtacttaggctattccacattctctaagacgacacacaaacagttgctaattctagccatagtgtgatatccctagcatgagattagggcaattccacattctctaagacgacacacaaacagttgctaattctagccatagtgtgatatccctagcatgagcttagggcaaaaccttctccaaccagatcctaaatgcacatggatttccaaagctggccaaggcctagagtgttgttgatttggaaattgaccgttggctgtcccccaaagtttctcttcttatgtagggataaatgtcccaattgttagctaaacatatagttgcccagaatacacaacgtatttgtcagcttctcttatatggaattgtggatatgtgactaacttctagacaatgggatgtcagagggattgtcacatgacagcttctgggaactggccttcacagtcagatgatgtacagcctttgcccatttcatttttgtctcttcctccatcttcctgcctggaacacagatgtgatggccagagttgcagccactagactagaccatgaagacagaggccaggccctggaatgaagagcaggaatgaagagcagtaaagagcctgggtccctgaggagctcatggagcagcattgccaccctacctccagcagtcatttatgtgagagagcaatcaactcgtatcatggagaatttcgtgttatttttaagtctttactcataactgaccctaaaatctgaatgaatgcaagtgggatccaagaattagtacggtttggggttctttgttttttgtttgtttgtttgttttctcagtgctataggcaattctgatacacaagtagttttactgatttatttattttgggacagagtttcactcttgtcgcccaggctggagcataatggcacgatctcggttcactgcaacctttgcctcctgggtccaagcacttctcctgcctcagcctcccaagcagctgggattacaggcatgtgccaccacacccagctattttttctatttttagtagagacggggtttcaccatgttggccaggctggtctcgaactcctgacctcaggtgatccacccgcctcggcctcccaaagtgctgggattacaggcatgacccaccaggcttggccacacaggtagtgttaagaatctagtctcattaaataaaatttgttttttaaaaaaatgtttttgccagtccgatgtgtttttcaacttgatgtttaattactcagaaatttgtatatgtttcacatataattgttgtgggcagacggagatgcccactaagaacctgagaatagggctgtaaataaacatttggtaggaaatagtctcacaggcctacttgaacctcagcttgactattacttaattagaaataaaaaacattcatgaagaaaatatgtattaacagaaggagaagtgattaacaatagcataagggaaaagaagaaaacttggaaaagcagcatctctcagcactgactaaaagtactaaatctggggtacataaactttctgctcactagatcagagatctccaaaatggggtgccgctacccaaaagagcatgaaaaatgttccacagaggtgcaggcagaagatactagaactaccattgctacttatttttgcctacaaaataagaacttaatcttgattaatattttgtgtgctgatgttcactgttgccctcaacaggctgcatctcagacagctgtgaggtgtcctgagcaaagcaggagacatccaaaatgcagaggccgacagtggtatcctcccactttcatttgctttcagcgtattgagaaatattgtagattctatgtaatggggtaagtggatagtcagactaaattatttaatttaactaaactaaccgtcacaaaaaattccttgaagggaggccctcttaaaaaatttacttatgaatggataaagaaaatggggtacacatacacaatggaatattgttcagccgtaaaaaagaataaaccctgttattcgtggcaacatggatggcactggaagatgttatgctgagtgaaataagccaagaacagaaagctaaataccacatgttctcactcatatggggaagctaaaaaaagcagatctcatagaagtgaaaaaagtggaacagaggataccagaggcagggaagggtaaggggaaaggagggagagggagaggtctgttaaaggatacaaaattacacctagattggaggaataagttccagtgttctataccgctgtaggatgatacagttcacaataatatattatatagtttcaaatagctggaaggagaatattgaattttctagactcagagaaatgataaatgtttgaactgatggatatgctaattagcctgatctgaacagtatacagtgtatgtatcaaaacatcgccataagccccatgaatatgtatagctattatttgttaattaaaaaataaaattataaaaaaaaggattccttcaaagaaagcacaattgaagataaaacaaagcaagcaaaggtgagcaacgagaaaatggcaaagctggcagttctggtgtcagcttttagtcagctgcattacaaggtagaatgagttagtcaaatctcgcaagaagttggccaaaaaaaatggaaattatcaagaagattattagaaattttgatcgatggccgggtgtggtggctcacgcctgtaatcccagcactttgggaggctgaagcaggtggatcacctgagatcaggagttcaagaccagcctgaccaacatggtgaaaccccgtctctactaaaaatacaaaaattaactggcatggtggcacgcgcctgtaatcccagctactcgggaggctgaggcaggagaatcacttgaacccaggaggcagaagttacagtgagctgagatcgcgtcgctgccctccagcctgggcaacaagagaaaaactccgtctcaaaaataataataataaataatttttttaaaaaagaagtatttatgtacctgccataaatagtgaagtttgccctaaaagtatactgtctgatattagctaataataatatgaaaccatcacatattagtaacgtgttttaatacattatttaatcaatatctaatcacttataaatttcttttttgtgttgtataatgtacatgtatatcaatataataggaaaagtatatgatttgtaagtcaataagcattctgcatattagatatatatactaaaattttctgtggtgtgctacccagatcctctttcaggaatgaaagattgattaattctcccagcttccagaagtgctgccagaagatgg
